United States Patent Application Publication US 2005/0208558 A1 - sequence listing, part 7

SEQ ID NO: 6064 - DNA, 3665 bp, DROSOPHILA
caagctggattagcacttttgaccacgattctccctttgcagtccacacatgtatgcacattacatactcacataccaagtacatactgaaatcgtaaccgggccggattttggcctcctaagtggcccataagtgggctattagtggtcttcttcacagaacatctttcaatgatcaggacaaggacaactagaatcggatcggttcggcggagttataattataaatactaatttaattatatatgcacattcaaggggggaatgtttcctgaattacaagcagaatttttcgtttttagttcgggcaccatcaatcttacatacatttacatgcagccggcgaacggggttttcagataaaagaattaacaacgcaggttcttaattattgttattttatacatatggatatttttctatgtgcacgattgggaggttctcttaattggtgaacgttcttgagatacttggcttatcgcgtgcgccactgtgattgcgaggaccaagtccttccgattgttattatattaatttaaaatgttattctcgatttattttctcgctgttttcaacatgtacgtttgtatataatgtatacattactctacatagatatgaacaaagttttgcccagctgaacggtcagactgcacgatgaatgaccgataggtggggctctctacacgactcagcggcgatagttatcggaaatcgaacaataaactgttgaatttaagtacttgaatttagtactaagaaatgttgattggtttcattcaataaaaacctatcatgctaaattgtcattgcagtagttgtttccttttttcctaaccaaacatattaaataggaaaggaatatattgcatcaaacaattatgtatcttaatgtggctaatcagaagtcttttattaaaccagaccgtaattataaaaaatatcgatacccgatccaaaaaataggctgaaatgaaccagttagaagcagaactcgacgtatagcggtgccaaggaaagtgcggtcacactgcaaggacattactaagtatatattttatgtgttattaaggttgtgttttcctgataaataactgcattgtgatactcgattgctcgaatgatggtaattattaggttgcagctaaaggacatcgtattaaccatttgtcctttctgccagtgccacatatcaaactggagttccctgaaaatagtgctggcctttctctcggtcaacatcttctggctcctgaaggtgtatcccccggcaggagatggtgcgcagaggtgtccgcccactccccaaagtcccgtggccgtagagtgtccctagcattcggatatcgcctatgcgctgctccagccgcttaacaacatggacggcttcgtggtcccgaacaactccgcgtctctggccttcgataacatcaacttgagctacggccgctgggacaaccagctgctgtacaggatcaaagactttgctctgctaggcgagcagtacgtagactcctcggagggcagcttggtgtgcctggccacccagacttcagtggagcgcctcaactcgcttccccaggtggcagccaattggcagggcaagatgtccgtggccctgtttgcagctgggcccgaggagtttgtagtcctgcaatacttcgttacctatatgcgcctgtgcttcgcaaacatacgcgagaatgccacctttcacttgctcacaccgagggacttcgacaagctgccccgagtagccgcacttccccttaacatgaggggcaaattcgactgccagtacccggataggacgctcaaggccctgctcaagttccgctccctgaagaccctgcagtggcgacagaggaacacctatccgcagaaccacatgaggaacctggcacgcaaggggtgccagacgaagtacgtctttctcaccgacatcgacattgttcccagcaccaacagtgtgccccagctgaaccacttcttcaggacagccaattgcacgaagagttgtgcctacgtaatccccacatttgaaatagacgttagggctacgtttccccgctccaagaatgcgttagtgcgcctgataaggaaaggactagctaggccttttcacgaaaaggtcttcatctataaccaatatgccactaatttctccaagtacgtttgtcaaaatagtgttatgaaatttgtagatttaatacgatttcttgtacttcaggtggctgtcccccaacacaaatgaaacggaagtatccgtcagccatgttgtaacgaactttgaattcctgtatgaaccattctacatagcagtggacaacgcaccagcgcacgacgaacgatttctgggttatgggttcaccaggaactcccaggtgagtagaatttaaacgtagaaaccacgcattgctcattgacttccaacttgcaggtttatgagatgcacattgctggctatcagttctacgtcctttcccctgtgtttaccggtcattggggattgcagaggaagcaggccagacccgcttggcgggagcaacagaataatgcgaatcgccggaagttcgacgttttcaaaagcgaaatattcgtgcggtacaaaaacgatccacgcctgctgttaaaggccaaaaagaatcaaatcctagtaaaataaataaaatagttaaaattattgagttgtccgtctatcagccggcgcgttttacttttgtcaagtgctgttctcattgattagtctttgtattttgcgaaggaacaaggataaactttaaactagataagcactcctaattttaagtaggatatcagatccgatgggtttgtgggacagtaatgtattaaaatgtatttacatgtattttgatcgtgatttctagaggctaggaggtgtgagtggagggcaacagtcatcaacgggctttcacgcgaattcggcgcccaaagcagagggagcgaggatggtccgtgtaaaggaaaagagcggaggccgaatgccggaagggcagagcgccggcgcaggactttcgcaagctgtgtgctccctcaaaaagctcacgtcgccttcgcaggacaataaaagctcgctccctcggccagctttccgcagtctgtggcaatcagaaggcccagtggattatttattgtgagtgttgaaaaaaaaaacgaattcatcgcaacgcgcaatgaggcaaggtgattgcctgattccgagcagcaaagaagtcgggaatagccagcataacttcataaatccccatccgatccggctgtaagtccgccgcaggtgagtccttcatccttcgccgttcggcgatgcaaggctgcccagtcgggtcgcccgtgttttcgatttttcgtaacgagcaggacacaaaggaaaaatgcgaataatggggaaaaacaagcgtcgactgacccacccatccatccatctatccaaccatccatccattccatccaacgagttggagcccccggctgtttgctcaattaggtatcagttttccaacgacagacgcattatcctgcgaagcctgcaatagctgtccttatggcgatgatgccatggcccaggcgttccatcatcgccaccacctcgctatcgatatacggcgcgaaggacacccttatcagaccccatcctcgtgccccaa

SEQ ID NO: 6065 - DNA, 1491 bp, DROSOPHILA
tatagcggtgccaaggaaagtgcggtcacactgcaaggacattactaagtatatattttatgtgttattaaggttgtgttttcctgataaataactgcattgtgatactcgattgctcgaatgatgtgccacatatcaaactggagttccctgaaaatagtgctggcctttctctcggtcaacatcttctggctcctgaaggtgtatcccccggcaggagatggtgcgcagaggtgtccgcccactccccaaagtcccgtggccgtagagtgtccctagcattcggatatcgcctatgcgctgctccagccgcttaacaacatggacggcttcgtggtcccgaacaactccgcgtctctggccttcgataacatcaacttgagctacggccgctgggacaaccagctgctgtacaggatcaaagactttgctctgctaggcgagcagtacgtagactcctcggagggcagcttggtgtgcctggccacccagacttcagtggagcgcctcaactcgcttccccaggtggcagccaattggcagggcaagatgtccgtggccctgtttgcagctgggcccgaggagtttgtagtcctgcaatacttcgttacctatatgcgcctgtgcttcgcaaacatacgcgagaatgccacctttcacttgctcacaccgagggacttcgacaagctgccccgagtagccgcacttccccttaacatgaggggcaaattcgactgccagtacccggataggacgctcaaggccctgctcaagttccgctccctgaagaccctgcagtggcgacagaggaacacctatccgcagaaccacatgaggaacctggcacgcaaggggtgccagacgaagtacgtctttctcaccgacatcgacattgttcccagcaccaacagtgtgccccagctgaaccacttcttcaggacagccaattgcacgaagagttgtgcctacgtaatccccacatttgaaatagacgttagggctacgtttccccgctccaagaatgcgttagtgcgcctgataaggaaaggactagctaggccttttcacgaaaaggtcttcatctataaccaatatgccactaatttctccaagtggctgtcccccaacacaaatgaaacggaagtatccgtcagccatgttgtaacgaactttgaattcctgtatgaaccattctacatagcagtggacaacgcaccagcgcacgacgaacgatttctgggttatgggttcaccaggaactcccaggtttatgagatgcacattgctggctatcagttctacgtcctttcccctgtgtttaccggtcattggggattgcagaggaagcaggccagacccgcttggcgggagcaacagaataatgcgaatcgccggaagttcgacgttttcaaaagcgaaatattcgtgcggtacaaaaacgatccacgcctgctgttaaaggccaaaaagaatcaaatcctagtaaaataa

SEQ ID NO: 6066 - protein, 389 aa, DROSOPHILA
MDGFVVPNNSASLAFDNINLSYGRWDNQLLYRIKDFALLGEQYVDSSEGSLVCLATQTSVERLNSLPQVAANWQGKMSVALFAAGPEEFVVLQYFVTYMRLCFANIRENATFHLLTPRDFDKLPRVAALPLNMRGKFDCQYPDRTLKALLKFRSLKTLQWRQRNTYPQNHMRNLARKGCQTKYVFLTDIDIVPSTNSVPQLNHFFRTANCTKSCAYVIPTFEIDVRATFPRSKNALVRLIRKGLARPFHEKVFIYNQYATNFSKWLSPNTNETEVSVSHVVTNFEFLYEPFYIAVDNAPAHDERFLGYGFTRNSQVYEMHIAGYQFYVLSPVFTGHWGLQRKQARPAWREQQNNANRRKFDVFKSEIFVRYKNDPRLLLKAKKNQILVK

SEQ ID NO: 6067 - DNA, 3042 bp, DROSOPHILA
ccgctcgcctggtcacactggcactggcgaacagctgttttcccaatcgaaaagcgcttgtgttccaaattttacgtaattcgtattttgaagccgatttctgccgtgtagccccaaacgcctagcgaaatgtcggccctccgccaagtgatgtgcagaagcaccgcctccctgcagctgtaggtacccccgcctggccggagcaagtgcatccgacctggcaaatctgcagccctctaattatccactttcgcatcttgacaccgcaggtaccaggccaacagggcagccgctgcccgctgggcatccaccgccacggacggcggtccgctggaccccaagacggccctggcccgccccgaagagctggagcagcgcaacaagctgagtggcaagatcaccgtgccgactgccgtcaatctcagcccgatcagcggcgttccggaggagcacattcgggagcgccgtgtgcgcatccatattccgcccaagaacgcaatgcagagcggcaccgataacgtgaacacctggcaaatcgagttcgacaaccgcgagcgctgggagaatccgctcatgggctgggcctccaggtgagtagctggcacgtccaccatgccatggcaaccttggtcaacgtctcgtgttccagcggcgacccattgtccaacatgaacgtgcagttcggatccccagaggaggccatcacgttctgcgaacggaacggatggcgctggtacgtcgacggcgccgcgaagcccaagaaggagcgcgtcaagaactacggcatcaactttgcctggaacaagcgcacgcgcgtctccaccaagtagacgctccccgcagctagccaggattatagaccacaattatctgattttttttttgctttgttcattatctgagtacccaaataaacagtcggctggactcaaatgaccacagcaccatgtaatggccaccagtttcgctgccaatggaagcggcaccatcacatgccgctctaatgacgagcggtttgggagcgatgcctattgtgctgcttctcgcgtggctctcgctcctcccgacgcctatcgccatgtcgatgcctgctcggactgcggcttctcttccggctgtcatcatgatgctggtaccaatctctgcgctcgttgcgccagtcccgatgctcttgtcgctgtcctcggtccttgtgctccttaaaacgatccatttggtcgttatgccgccctctgtcctcctggtaccgctgcctgtgctgcgtttgctcgttgtgccgccattggtgctcctgaaaccgctccgctggcttatcgcgtcgtcccttgtgatcctgttgccgctccgtttgcgtcctttgctgggattgctcaacataccgtccgcggtgctcctgtcggtcgacttgcttatgatgccgcccgccgtgctcctgttcccactgcttctccagcgcctgcatctgcaggctgactagctggtgcagctcctcgttgagcgtgggcttgctcttgcggtggcgccgatgattcttttgctgacgccgggtttcgcccaccacctcggcgaaggcggtgttgtcctggaactgcgggtgcttcttggtgtgctttagaacgtgctcgtagatgagcagccgctgactcgcgtcgagtcctgcctgcagatcatcaaaggaggcagcaggaaggaggcgtcgtgctctttcggtgcccacaatgccctgaatagtcgagtcatcgagctggatgctaaagtcgggattgttgctgcatgacgccggcaatggcaatggctctaacacctccgatttagttgcgccgtttttgtcctgtggtctgtggctacccgcccccatcaccccgcgctcgctccaaccgaagcgctgcaggatgacgtggagacgcctcctgctggctgtcacaaaaagacgcagctgttctcgcttctcgtccacatcttcgccagacatttttagccagcgcgaaacagaacagaacagaacagcaagtgttgggaaagcccgaaatgtgcggccagtgctgcagaacgcagcgtgtatttacagtcctagaaagtttggaatatctaatctatggtgccattcggctcctggaggggatgcgggatgcaggagctcagctccaaaagagaacggtgaaggccatgatcaggcaggcggctcctacccacggcgacttgcgctccccaatccttgccagcttccagaaggtgcccatgaatctgcaaacagacagcagacgagtgttgagtgtggtaacaatcagtggactggtcagggcgggaacgggcacctacccggtcttgttgcggtctatcaagctggggaagagcgagcgcaggtaggcacaggtgcagatcagcagcaggatgaccgacagcaggctgtggaagttgaacagggcgctctgtggagggaaacggtgctaagtgtacgacggaggagtatcggttaggtgagcgtttcaaaccatgatttagcaaatcgaaatccgtgcttggcgatagaataacaacaagcggtaaactagtgacgtgccagccgctcggcgcaggcgaactggttccaaaactggaatctcacgtttcgactgattcgataggtggttaatcaactgttagaatgataaggaatgttacaatgtttaggagttaatataagaatatatttatattaaatacatattttggcgacctacttccattatctgggatggacattggataaatattttacaatagaaagtaacaagctcttagccaagttcccacagggagcataaaaacgccataggaagtattgaaaagtgcaagagtttacaaaagacatcgtatacaaaaaaacgtaagcttaatttcgatagtatcggaacttgtattgcaatccaaccgtgggtcaagtaaatgaaataagataagactttgtttcaattaacgttggcagtggagcttcccccaattgaaatatgtgccaatggaatcgggctattaggtcaagtgaattcaatcgactggcgcgga

SEQ ID NO: 6068 - DNA, 1042 bp, DROSOPHILA
cactggccgcacatttcgggctttcccaacacttgctgttctgttctgttctgtttcgcgctggctaaaaatgtctggcgaagatgtggacgagaagcgagaacagctgcgtctttttgtgacagccagcaggaggcgtctccacgtcatcctgcagcgcttcggttggagcgagcgcggggtgatgggggcgggtagccacagaccacaggacaaaaacggcgcaactaaatcggaggtgttagagccattgccattgccggcgtcatgcagcaacaatcccgactttagcatccagctcgatgactcgactattcagggcattgtgggcaccgaaagagcacgacgcctccttcctgctgcctcctttgatgatctgcaggcaggactcgacgcgagtcagcggctgctcatctacgagcacgttctaaagcacaccaagaagcacccgcagttccaggacaacaccgccttcgccgaggtggtgggcgaaacccggcgtcagcaaaagaatcatcggcgccaccgcaagagcaagcccacgctcaacgaggagctgcaccagctagtcagcctgcagatgcaggcgctggagaagcagtgggaacaggagcacggcgggcggcatcataagcaagtcgaccgacaggagcaccgcggacggtatgttgagcaatcccagcaaaggacgcaaacggagcggcaacaggatcacaagggacgacgcgataagccagcggagcggtttcaggagcaccaatggcggcacaacgagcaaacgcagcacaggcagcggtaccaggaggacagagggcggcataacgaccaaatggatcgttttaaggagcacaaggaccgaggacagcgacaagagcatcgggactggcgcaacgagcgcagagattggtaccagcatcatgatgacagccggaagagaagccgcagtccgagcaggcatcgacatggcgataggcgtcgggaggagcgagagccacgcgagaagcagcacaataggcatcgctcccaaaccgctcgtcattag

SEQ ID NO: 6069 - protein, 323 aa, DROSOPHILA
MSGEDVDEKREQLRLFVTASRRRLHVILQRFGWSERGVMGAGSHRPQDKNGATKSEVLEPLPLPASCSNNPDFSIQLDDSTIQGIVGTERARRLLPAASFDDLQAGLDASQRLLIYEHVLKHTKKHPQFQDNTAFAEVVGETRRQQKNHRRHRKSKPTLNEELHQLVSLQMQALEKQWEQEHGGRHHKQVDRQEHRGRYVEQSQQRTQTERQQDHKGRRDKPAERFQEHQWRHNEQTQHRQRYQEDRGRHNDQMDRFKEHKDRGQRQEHRDWRNERRDWYQHHDDSRKRSRSPSRHRHGDRRREEREPREKQHNRHRSQTARH

SEQ ID NO: 6070 - DNA, 4301 bp, DROSOPHILA
ctgagttattgttttatttaaacagctttttccccgaatgagcaaatatgtaagcggcaaaacagttaccgcgttgtcagccctctgataaaaaacaaaaaaaaaaatacaaaaacaattgtggctgtcgtgcaaatagatggaaatagatttcgccaaatggcaatcatattattacaaataataatagtaattttcgaacgcagtagtgtaatgtaaattaatttttgggaattttaacaacaactacatcatctgttcatttgcccaactgtttctgcccttttaattgaaattagaagaaaaaccaaaaacatcttaacattttatggcgtttctattcttgaaaataagtgccttttttttatttgcccacgttacaattatcaacgacagatgttttcacgaacgaaagtaatttgtgttgaaatttttcaatttaggcattgaaattgtgactcagtcatcaactagaattaattatataattaacatactaatttatttaaacaattttatagcttgatttgaagataagacatgcatgcattccctgaatgtaaatcgttatgaatgagaatccattccagtccattaggcattttgccggggaacttttccaagttgtgcagcagttaagttttgcttttcccttaatcgagtattaattgaatttagctgaggtaatcacgggaaaaagccgcaatgactatattaaatcaatttaaaaacgcattgaaagatattcaatttgctatcgatatgattcattctcgatcggtgaatagtttgcattgcacatgaatagtacttgaattacttacttacttaatggcgggatcgataagctgggcgcctttcttaagtgtgtacttcaaagtgattctaatctaatcgtaattgggcgcactaagataaatattccaaattatggttgtggcgcattagtttcacatgtccattgtagttatctgcaattggatttggaaatgccgcacgcatgacgcgatcgtgtttgcccatgagtcccagactcgtggcttggatggatgcacaaatatttggacatgtgtctggtattttgctgttggcattaaatcttatattccccgaattgcgatatcacgcatatttgctcatcaagattggaaattccgctccattgcagaaaacagatgccgagaagccgacggcggagcgcaccaattggggcaatggcctggagtttctaatgtcctgcatatcggtgtccgtgggattgggcaacgtctggaggttcccgttcacggcctatgagaatggaggaggcgccttccttataccctacatcatagtgctctttctgatcggtgcgatgcatggcatcgtccatcactggttatactaaacttttggttttccaggcaaacccatgtactatttggagatgatcatgggccagttcacgagccagggaacggtgaagatttggtcggtggtgccgggatttgtgggcgtgggctatggccaggccttcggcaccatctgcatcatctcgtactattcctcgctgttggcgctgaccctctactatctctttgtgtccttccaatcggaattgccgtggtcctactgtcgcgatgagtggaccaattgcgtgaactcgaggccgcaggagtatgtggacaatctgcttacgggcgtatccttggccaatgaatcggccagaaatctcagcggcattgtggccaacgatgagacagagaaactccagagcagctccgaactctatttcctgtaagtaaaaccagtaacacagaacttattacgctactaaacggaattgacaaaaacaaattgaattatttgcgctccctaattgatttgtattcacttagctagctgttttcattagcactttttcgacgcacagtagcaaaaagttagcaaaaagttgtaacgttgtcattatttatttgattttgttttgccgcatgcaaattagcgagaattaagtcatttcaatttcaaatcgaaaatcacttgcaggaatgtagtgatcaaggagaagctggacatctcggacggcgttggtgatcccgattggaagctgacacttgccctgttcgtcgcctgggtggtcatctttctggtgatcatgcgaggggtgaagagttccggcaaggcggcctacttcctggccctgttcccctacgtggtgctcttcgtcctgctgatccgtgccgttaccttggagggagcacgcgatggcattctgttctttctggagccacagtggggtgaactcttgaaccccaccgtttggaaggaggccgttgtgcagtgcttcttctcgctggccgtgggctccggacccattatcatgttcgcctcgtacaatcgattcgatcacggaatctatagggatgccatgatcgtaaccacactggacacgctgaccagcctcctgggaggtataacgatatttgcgatcttgggcaatctggcgcacaatctgcagatcgaaaacatcagagatgtggtgcgaagtggcacgggattggccttcatctcgtatccggatgccatatcaaagttccaggcggtgccgcagcttttctcggttctgttcttcttcatgctgttcgtcctgggcattggatcaattgtggccctgcagagcaccattgtcaccatcatttgcgatcagttcaagggatggaagtactggaaggtggcactgaccacctctgtgtgcggtttccttatgggtttggtctacgttacaccggtacgttgagttccacaaaggtgcagcgaagaattcaattgattttcaactagctcaacgtatttatcgtttttcagggcggacagtggatcctcactttggtggacttctatggcggaacctatgtggtcttcatcttggccattttcgaactggctggcatcgtgtgggtttatggtgagtgttaactttattgtaaaattaatccaatacatgcataatgaacatacgtcaatgcaaacaggtctgcaaaacttttgcgatgacatcgagtttatgtgcaatcgccgagtttcactgtactggcgagtatgctggtccttcttcacgcccgtcatgatgatcatcatattcatatactcgatggtcaccatcgaaccgatcaaatatagcgaactgtacttccccgaagccgccaacagtgagtaacactagcacatacacttgaattgttactaactttgtgcattccagttgccggctggctgctgttcgccatcggtgctgcccagtttccactgtggggtctttggtacatctcgcgccatccacaaggcacctactggaaggtaatgattgcccacatttattcgttccaatgcatgatctataattgataatctttatccaaacagtctctgaaggcctcgctgaagcccagcgatcgctggggtcctgccaatccggaaattcggcgcgaatgggtgatcttcaagaatcagaaggcagcccaaagagccacgcagaaggatacgtcgaaacttggtttcttctggcgcaaagtggccaatttctgtggcagcaacaagtaaacaaagtccgcgtggagcggggagcagaggtggggatatcgtggggatatcagagattacgactaaccataaccacttgttatttatatacgccattgtcagcctctatgaagccatcacaaatgcgaagcacaatccttcgaccgaatatatcgcatgtatcaataaataaatagccgttttttttttttaattatatttttgttattctacgtacaaacttcatttatgaatgtgataatattgagcagaaaaaaaaaataaattattattatcaaagaatgtgttttcattccatatttttgtccaggaaaatttgatgtttttcaatatttcgtatccgccccgttttcataaaaaatgtaggcgaatgctgattttcttttatttttatttcatttttattcagtttttgtttgtttttctttcatacaaagccctttattattgttaaaatttcaattattctctttggtttctttattaattaataatttacaattttatgagttttcctatctcccctcgacttccattgatctctttcatttaatggctcttcttgttgcttttcgctttcttggggatcggtacattataacagtacagcaattgatttatgtaatatggtaaatttgctataaatagtgggaattcttatgaggtaaatgcttaatgagcaaaaaaaaaaaacaattacaatcgtcttcagatcagat

SEQ ID NO: 6071 - DNA, 2013 bp, DROSOPHILA
atgacgcgatcgtgtttgcccatgagtcccagactcgtggcttggatggatgcacaaatatttggacatgtgtctggtattttgctgttggcattaaatcttatattccccgaattgcgatatcacgcatatttgctcatcaagattggaaattccgctccattgcagaaaacagatgccgagaagccgacggcggagcgcaccaattggggcaatggcctggagtttctaatgtcctgcatatcggtgtccgtgggattgggcaacgtctggaggttcccgttcacggcctatgagaatggaggaggcgccttccttataccctacatcatagtgctctttctgatcggcaaacccatgtactatttggagatgatcatgggccagttcacgagccagggaacggtgaagatttggtcggtggtgccgggatttgtgggcgtgggctatggccaggccttcggcaccatctgcatcatctcgtactattcctcgctgttggcgctgaccctctactatctctttgtgtccttccaatcggaattgccgtggtcctactgtcgcgatgagtggaccaattgcgtgaactcgaggccgcaggagtatgtggacaatctgcttacgggcgtatccttggccaatgaatcggccagaaatctcagcggcattgtggccaacgatgagacagagaaactccagagcagctccgaactctatttcctgaatgtagtgatcaaggagaagctggacatctcggacggcgttggtgatcccgattggaagctgacacttgccctgttcgtcgcctgggtggtcatctttctggtgatcatgcgaggggtgaagagttccggcaaggcggcctacttcctggccctgttcccctacgtggtgctcttcgtcctgctgatccgtgccgttaccttggagggagcacgcgatggcattctgttctttctggagccacagtggggtgaactcttgaaccccaccgtttggaaggaggccgttgtgcagtgcttcttctcgctggccgtgggctccggacccattatcatgttcgcctcgtacaatcgattcgatcacggaatctatagggatgccatgatcgtaaccacactggacacgctgaccagcctcctgggaggtataacgatatttgcgatcttgggcaatctggcgcacaatctgcagatcgaaaacatcagagatgtggtgcgaagtggcacgggattggccttcatctcgtatccggatgccatatcaaagttccaggcggtgccgcagcttttctcggttctgttcttcttcatgctgttcgtcctgggcattggatcaattgtggccctgcagagcaccattgtcaccatcatttgcgatcagttcaagggatggaagtactggaaggtggcactgaccacctctgtgtgcggtttccttatgggtttggtctacgttacaccgggcggacagtggatcctcactttggtggacttctatggcggaacctatgtggtcttcatcttggccattttcgaactggctggcatcgtgtgggtttatggtctgcaaaacttttgcgatgacatcgagtttatgtgcaatcgccgagtttcactgtactggcgagtatgctggtccttcttcacgcccgtcatgatgatcatcatattcatatactcgatggtcaccatcgaaccgatcaaatatagcgaactgtacttccccgaagccgccaacattgccggctggctgctgttcgccatcggtgctgcccagtttccactgtggggtctttggtacatctcgcgccatccacaaggcacctactggaagtctctgaaggcctcgctgaagcccagcgatcgctggggtcctgccaatccggaaattcggcgcgaatgggtgatcttcaagaatcagaaggcagcccaaagagccacgcagaaggatacgtcgaaacttggtttcttctggcgcaaagtggccaatttctgtggcagcaacaagtaa

SEQ ID NO: 6072 - protein, 593 aa, DROSOPHILA
MSCISVSVGLGNVWRFPFTAYENGGGAFLIPYIIVLFLIGKPMYYLEMIMGQFTSQGTVKIWSVVPGFVGVGYGQAFGTICIISYYSSLLALTLYYLFVSFQSELPWSYCRDEWTNCVNSRPQEYVDNLLTGVSLANESARNLSGIVANDETEKLQSSSELYFLNVVIKEKLDISDGVGDPDWKLTLALFVAWVVIFLVIMRGVKSSGKAAYFLALFPYVVLFVLLIRAVTLEGARDGILFFLEPQWGELLNPTVWKEAVVQCFFSLAVGSGPIIMFASYNRFDHGIYRDAMIVTTLDTLTSLLGGITIFAILGNLAHNLQIENIRDVVRSGTGLAFISYPDAISKFQAVPQLFSVLFFFMLFVLGIGSIVALQSTIVTIICDQFKGWKYWKVALTTSVCGFLMGLVYVTPGGQWILTLVDFYGGTYVVFILAIFELAGIVWVYGLQNFCDDIEFMCNRRVSLYWRVCWSFFTPVMMIIIFIYSMVTIEPIKYSELYFPEAANIAGWLLFAIGAAQFPLWGLWYISRHPQGTYWKSLKASLKPSDRWGPANPEIRREWVIFKNQKAAQRATQKDTSKLGFFWRKVANFCGSNK

SEQ ID NO: 6073 - DNA, 2472 bp, DROSOPHILA
tagcagtttcgccttcacatgtcaaacacttcgagggtggtgtcctcatttctcgcataggccaccacatacgcattacgcatacgcagcgtgagcactaagctttaagccaacggaaacgctttgtaatccagaaaattgcagctgcaacctttggttagtcgtattgccaaatgagccagagctattgtaattaatcagaaatccgactcaattcgctgagttatttttatcacagaatggtggacgataaaaatgcaaactttcctctccatttgcaaatttatttgtcctttgggaagaacaagtctcgctgcaaatagtatctatttatggaaatcctcgggagagtaatgactggaaaattatgccactgacgtcaaaagggaaagacgaaactttttgcccactcaaaaggtcaaagtcaagactccaaatcaactacttggcactcatcaaattctagttttctgcgacttgttattacaatttggcaaaaaaaaaaataaaaaactatcatcaactttggcgtcatgctaaaccagagcaacaagttgctataaatggtcatcactgggtttactgctcgagttcaatgtttccagccaaattcagatgaaagagcaaagaaaaacgaattgttttgaattgagttcatagccattggatggcattgattgttgtttttttgcttggggtcacagagaaaatatggaaattgtgatacgattttatggcgttctgatgaagcttgtctttatttggccatttcgatgatttgtgagcaaagataataatctgcgaatggctaactccattaaattgctataaatacttaaaaggataccaatgatgcatttatatatttatgtagatttaaaggaactttgtttttcagattatttttatagcacagcaggctttgaataggatatctgcctgatttctacagtataccttactgtactacataagacaatacaaaatactttcaaaattagtaagatttctatttgaactctgatcaagttccgtacttgcagctgaattctttgatggcttccatggagctgaccctgaaatcggactattccgccgattctgttatcgatgacattatatccaagtcgctggcatcccaggcagttccaaggacacacaagagatcaactcgcgtctcctttcgatccctggccaaagttataatgactctgatcggaaacctcaagaaggcatcatcatttcatgaggtgaaggacatagactactggcgtaatctggccgagtcccgtttggaggtcaacaatcgctatgggaggtttatcgaagcccagcaaaggcgaatctataccctggagaccaggctccacaacctggtcaatttggcccgcgagacccagaaaatgctggccgagattggggccgagaagcgggcctgcgaggaacttggccatggcgagcacgccgactagatttagcataatttaatactttccgtctttcataaaccaatggtttatactaaatagttggtatgtgagttaaatatatacaaattgaaaatcaagcgcagttttgctagaatatttgagcaacttgggttactaagttgagtgacaattttcctactttcctctattgcagtctctctgcaaatttaatttgcttttataatctcctccataatcactcaagcctaaccattatttggttttattctgttttctgtttgttttgggcgatagtagagcggcgatttctttaatcttcagttgggtcttcgtgtttttcccacttctccatggtctgggtgtgtgcagtcttccaggtgaatgattttcacatcgaaagagctcctaactgcataatttagtaattggaacgtatcaaatttagttttctcccatagagcatgcaagaaaatgcgaagaggcgattggaccaaactttatcatttattgcaatctgtttcgtgttttccgtttcttttgctgccttacaaatcagagtttattttttttttttgggcgccactcccagaatcaaaaaaacaccaaaaaacaacagaattcaattaaaagtctctgcacgccattcgaaaccaaaaatattgacatatgccccttccgtcggctggctgaaaaacaagccaacaatgtgaccattgaactcgaacccagatagaaaatagatattgtttatgccacatgccatcatgggcccagaaatcttgtttttcgtctgttctcggccagacgatttggcccactctcaagaggaatgccatagagtttatttaccagaaagtgtatcgaatttcattggaataaacgaaaaaacattgcattattttgcaattttctggtgtaatatctattacccattttccatagtagtttctgaacataattccaagaaatgtggttttgaacttttaaaaatatctctttttgttttctcaaattgcttacc

SEQ ID NO: 6074 - DNA, 472 bp, DROSOPHILA
gtaagatttctatttgaactctgatcaagttccgtacttgcagctgaattctttgatggcttccatggagctgaccctgaaatcggactattccgccgattctgttatcgatgacattatatccaagtcgctggcatcccaggcagttccaaggacacacaagagatcaactcgcgtctcctttcgatccctggccaaagttataatgactctgatcggaaacctcaagaaggcatcatcatttcatgaggtgaaggacatagactactggcgtaatctggccgagtcccgtttggaggtcaacaatcgctatgggaggtttatcgaagcccagcaaaggcgaatctataccctggagaccaggctccacaacctggtcaatttggcccgcgagacccagaaaatgctggccgagattggggccgagaagcgggcctgcgaggaacttggccatggcgagcacgccgactag

SEQ ID NO: 6075 - protein, 135 aa, DROSOPHILA
MELTLKSDYSADSVIDDIISKSLASQAVPRTHKRSTRVSFRSLAKVIMTLIGNLKKASSFHEVKDIDYWRNLAESRLEVNNRYGRFIEAQQRRIYTLETRLHNLVNLARETQKMLAEIGAEKRACEELGHGEHAD

SEQ ID NO: 6076 - DNA, 3644 bp, DROSOPHILA
tctcattctgggccatttaatgcgtatacgcagtgtgtgctggcatttcttggtggccacaaacggaagcgctaaaccaaacataaaaacaaacagcactcctaatcgtgtgtataaatgtttatgctcgtgtgttggcatagttttatgtctcaattgaagcgctctgcctggccaaataaaaataatcagcaagtcaatatcccgatggggagcggaagaaacccctaaatctttgtctatttccgtacacttcattatcgagtcagtcttacactcacttctctagaaatttgtgttgatgatgaagtggctcggttggcggaattaatccatcccatgaatgatccatgattgccaagtaatggaaaagcgcttagttaattgtggggcatcgcacatggtagctgtttcgatagaaattgatggcgacacgtgttgaaatcgaattatacgaacataattcactcgattatttctgtctatcaattaattaccaacctgctgatgtgtcaaatgctttcgaatttattgaatgccattgctgcatttttgagccgtttgcctctaaatgtttatgcagttatttatgtgctctattattttcttcatgttttatagctccactcgaaagcataataaatcaatgctaagatatgtaccacattataaagtttatgcaatttaacatagattcacaaatacaatttaactatgttcagaatcgaaatttaaaatttaagtggtaaggttgccaagctctttcatgaggacagcaatgtgaccaataatccttttgatttttgattatttggctaataagtttctcacgtgcttcccttcgacggtgttgccacatagctacaattttgcatttcataataacgctttcacacaggagcttaaggagaacaggtattgaaggcaaatttcgtgttcatttccactgttccacttttaacgcgtataatggaagtgcagaattccaacatctggcaacgacgcaggaaactcgtggctttccttgaactttttcctattagtcgcgacttgatttaacttttatttaagtacccagtactaaaatattttacccaacaataatgtccgaagtattgcagcgcttggcttccactgaagttagaagtaggtcagggatttgcatcttacacaattaccataaccaagtcttcccacagaggcaagagatccaatagatcggttcctggagcgacgtcaactctttcggaagcatatgctaggggatgcctcgagtctgtttcgagtggtcgctgagcaggtgtacgacacccagatgcttcattacgaagtgaggatggagtgcgttcgctatatgttcacgaaatggaagaccttccggcgatttgtgagtggagacttcgacgagtacttgtggcatttgggcaagaccaagacggcgggcaccatactggaactgggtgccatgtgccacctgtaccgccgcaatgtcatcatctacgaacccttcgatatgggccggatggtcacctacaacaaggactacaaggagatcctacgtatctttatgaacagcatggggcattttgaaaccgtgctgactatgcaggacgtcgatatggccgccgtttgccagtctgtgtccttcaagatgctttacaagcacctgttccgcctgccagatgttgatctcgctgtggaatggatgctgtatccagataccttcaaaatgggcactgaatatgagttcgactcgcgcggccgcgccatccgtttgctgtgccgcaacggacgaagcttcaagctggatcgccctgagagcaccatttgcttgcttgaaaactcccagatgtgcccgtttcataatcgcaggctagcaatgggcggacagtttgccgacttttcctgcatgcggatccttctggaggagaacaacattcccttctcctatttggtagccaagtcaatggatccctgtaggtatcgtaacgtggagctgactagcgcgattgaagctcgtcgtgaagcgtatgaatttggtatttacataggcgactataacttcaaggtgggagctaagtgccaggtgcagttggataccaatagacgcgatctgctcagcgcttgttacatccaatcgatcgataagaagaagtccgtttgtaaagtgtttatcgaggagcagggaaaactggttgatgtgccctccgataatctacatccactgccaccagatgaattcaaggcctgggactttgctcgcaagcggccccaacgtctccacaatagccaaatggggagacagtcggtacaaggtgatcagcaaggattcgtccctgacccgatgcctggtacggctccctcgatgccaccaccaccggtggccgatcctcgtccggttaacgtaacagcacagcagccacctgttttcgggccctctagatggatggaacccacccggccgttgatgcctaatcctttgatgatacatcagacaggatcgttcgttttcgtccaacaaccacgagttggtccgccgtcggtcatgatgcacgttttgataattgtacacaacgcaccatacatgcttgcgtttgatcatgccccccacccgcctgcaccccagtgcactgccccattttaatatatttttttcttgtttttacaaatatgtcaatttaaatatttatatttaacatgtttaacatgtcgaaaatcagaataaaacgtgaaaaacagaaatatttatacgtttatcatttgcagatctttatatatttattcaaattacctaaacatatagtttacaattagtatttaattctagcctaataatatttaccatttaagttttaaactttcaacgaaacttagtagactatatatgtataaagaaaatgtgatgtgtttgccaactaatgaagttcgtctccggatgtgacctccactaccgatcgcacctctccggacaaacgactctgcagattcttgttgatattgtccaccatgtcgaaggcatctatgatcatttgggcctcgccctgcgccttttcgctcatctgttccagactttttcgcaactccctgtgctctccagtagtgtcccgctgctccgccttctgatacaagctggttcgcgagaagagggcggtggacgtcatgtgatcggggtgcttctccagttcttcgggcagtggaaagtcaatatcaaaagagaatcgttgcaactcctcatacttcgcgtcctggacctctttgtcctggccatagctgatgaccaccgcctggaggacgatgtcgctaccaggaagttgcatgtaggcaataacgtccttaaagagattctctttcctccacacggtttgtctgtactgcaccacctggtataccaccatctccggttcgggactgtattgcaccagcatccaagtgtcatcattcatggcctccggttcagcttccaaattatcatcgaaggcgagatcaaagcttcgcgctttcaggtgcagtagtatcttttccatataatcacgactttcgtaggcatataggatgtgggcaatgcagccgggagccaacctcaccagaggattacccttcagctcgggcttggtgctcagcagcattacattgtttggagaaac

SEQ ID NO: 6077 - DNA, 1591 bp, DROSOPHILA
gacgcaggaaactcgtggctttccttgaactttttcctattagtcgcgacttgatttaacttttatttaagtacccagtactaaaatattttacccaacaataatgtccgaagtattgcagcgcttggcttccactgaagttagaaaggcaagagatccaatagatcggttcctggagcgacgtcaactctttcggaagcatatgctaggggatgcctcgagtctgtttcgagtggtcgctgagcaggtgtacgacacccagatgcttcattacgaagtgaggatggagtgcgttcgctatatgttcacgaaatggaagaccttccggcgatttgtgagtggagacttcgacgagtacttgtggcatttgggcaagaccaagacggcgggcaccatactggaactgggtgccatgtgccacctgtaccgccgcaatgtcatcatctacgaacccttcgatatgggccggatggtcacctacaacaaggactacaaggagatcctacgtatctttatgaacagcatggggcattttgaaaccgtgctgactatgcaggacgtcgatatggccgccgtttgccagtctgtgtccttcaagatgctttacaagcacctgttccgcctgccagatgttgatctcgctgtggaatggatgctgtatccagataccttcaaaatgggcactgaatatgagttcgactcgcgcggccgcgccatccgtttgctgtgccgcaacggacgaagcttcaagctggatcgccctgagagcaccatttgcttgcttgaaaactcccagatgtgcccgtttcataatcgcaggctagcaatgggcggacagtttgccgacttttcctgcatgcggatccttctggaggagaacaacattcccttctcctatttggtagccaagtcaatggatccctgtaggtatcgtaacgtggagctgactagcgcgattgaagctcgtcgtgaagcgtatgaatttggtatttacataggcgactataacttcaaggtgggagctaagtgccaggtgcagttggataccaatagacgcgatctgctcagcgcttgttacatccaatcgatcgataagaagaagtccgtttgtaaagtgtttatcgaggagcagggaaaactggttgatgtgccctccgataatctacatccactgccaccagatgaattcaaggcctgggactttgctcgcaagcggccccaacgtctccacaatagccaaatggggagacagtcggtacaaggtgatcagcaaggattcgtccctgacccgatgcctggtacggctccctcgatgccaccaccaccggtggccgatcctcgtccggttaacgtaacagcacagcagccacctgttttcgggccctctagatggatggaacccacccggccgttgatgcctaatcctttgatgatacatcagacaggatcgttcgttttcgtccaacaaccacgagttggtccgccgtcggtcatgatgcacgttttgataattgtacacaacgcaccatacatgcttgcgtttgatcatgccccccacccgcctgcaccccagtgcactgccccattttaa

SEQ ID NO: 6078 - protein, 495 aa, DROSOPHILA
MSEVLQRLASTEVRKARDPIDRFLERRQLFRKHMLGDASSLFRVVAEQVYDTQMLHYEVRMECVRYMFTKWKTFRRFVSGDFDEYLWHLGKTKTAGTILELGAMCHLYRRNVIIYEPFDMGRMVTYNKDYKEILRIFMNSMGHFETVLTMQDVDMAAVCQSVSFKMLYKHLFRLPDVDLAVEWMLYPDTFKMGTEYEFDSRGRAIRLLCRNGRSFKLDRPESTICLLENSQMCPFHNRRLAMGGQFADFSCMRILLEENNIPFSYLVAKSMDPCRYRNVELTSAIEARREAYEFGIYIGDYNFKVGAKCQVQLDTNRRDLLSACYIQSIDKKKSVCKVFIEEQGKLVDVPSDNLHPLPPDEFKAWDFARKRPQRLHNSQMGRQSVQGDQQGFVPDPMPGTAPSMPPPPVADPRPVNVTAQQPPVFGPSRWMEPTRPLMPNPLMIHQTGSFVFVQQPRVGPPSVMMHVLIIVHNAPYMLAFDHAPHPPAPQCTAPF

SEQ ID NO: 6079 - DNA, 3512 bp, DROSOPHILA
catcgcgttaggtaggcttcctcccatcgacttgcacatatatcacgaccgatctgcattatcctccgccttcagtttactcgaaaccaagtcctcttcctcacgcatacttcccgaaggaccatctctgcgttcccagtgccgagttgcagtgctgcgcactcacgccctgctgcgactgatccctggagtccaggcacacgttgatcttgtagtgccgcaccagtccgccctcgcgcatgatccaccgctggttctccgagtcgtcgcacgccttcaggaccacctgtgacccccgggcgaaggtgaccagggtcaggcagaggtcgtcgtgcttgatctcgccgcgcttcgtgaaggcccactcctgattgccgccggtgttgtggcatgggaaaattcctgagaggattatggggaggtatacaaatacatgagtcgagaacacgaatataccgtacttttcgcggaattgggagtctaaaagtatgcaataaaaatctaaattttcgcatacttcgtccagttatttactttcgattcctttcaactacataaaactcaataaacaatagggctcttgtactcacccacagtgccgtcgattaagtggcccattgtgtccaagcactcggtgctatcctgtcggaattggccaacctcctgtgggtcgggtgcctgcaggtcgggatagacattctccagataccatttgaacggcttgcaatgcaatttctccttcaaagccagacggtcatcaatgctgagtggcaaggaaaaggggaacgatacaagtaggaaaaaaatgtgcaataaataacttggctaaagtattttgcgcactaaaagaatttatgtggaaagccaaatataataaaataaaagaaacggaattaactcgaacgagacactctgtgatatatagaagtacaacttcaagttcgatatgcacaatgccgagtgatttctctcagtgtacttacttgccgaagggaatgttcttggcgagtggcacagcgttgtagtaatgctgcttgtagtcatccatccagacctccgccgcacgtcgtgtgttccgtgcgaagacgttgccgcttccgccggggaaggtgtacggatgccttttgcggaaaacgtgacccacacggctgcagggtatgatttccaggctgccgccacactgccacacgcggaacgagatctccagattctcgccgccccacacatccattttcatgtcgtacttgcccagtttgttgaagtacgccttatcgatgacgaacagcccaccggcgatcatcggagtacggatggccgtggtggggtcattgtggcgcatcgcccgctccgagggactaagatactcccacttgaaaatcaggttccagtcaaagccgccgcgcaaatcggccgaggcgccgatatactggaagttgtccatgctaatcacatcgatcacggggcacacgacgcgggtgggatcctcgcgaacgcgttccagaagaggctccagccacatctcgttgcactccacatggctgtccaggaaggtaagaacactactcacagctgcatccgcacccttaaccctggacctcaccaaaccctcgcgcttgtcgttgcgaatcactcgcaccttgtcaatcttcgccagctccagaccatcctcagctgaaaaagtggtttggaaaatattgttaaatattctataactatagaatgaaattcattcgctaagcaaatattctcaattaaactaaatcacttacgatgatcactgtagtcatctaccaggacgatttcgcgtatcaaatgctcgggacttcggttaaggacactcacgatggttcgcagcaaagtggacctcgcctcgttgtggaaggtaatgatgacactcgtctccggtagatcttcgcggtacttcttggtacgacacctggtggaaactaattttaaaacactcccactccaaaatgttttcctaccaaaacctacatgggatttctggtgtcgggtatatcccgattgctgggcagagcatcgctggcctcctgattgaagcgattcctaatatagggatcttcgccattgcgtagagcacccgcccgaatgtagcccgcctcattgaagtactcaacctcggtgccacgaccacttggcgccactggcaagcgaccaccaggtccacctgttccgccactgagaccctgaatataaaaacaattttcaagtgtgcaaaatttaagttcgcaatggcattctcaaactgcaaaaaccttacctgcgatgtctcctccagagccacaatcccattcaatttgaggccgtggaccgcattgcgctcgaagtccttaacggagccgattaggatgacattgccgccgggatcgtcggctccgctgccagctgctcccgccgccgctcccggacccgctcctccgccagctggcgcccactggcgggcggtggaggcggcggccgccgaggaggagtcgtcctggtactgctgcatggcggtggccacctcacgtagccgcagcgctcgattttccacctaaaaggacacggagtccacgaggggagacaagtgttttaatttatttctttaatctgcgccacattggcgacgttgacgcccgtgcggggcaataactcaactcaactgggagcaatactcttacactcaaaaaaatgctcataaaaattaatatagaaagccattaaagttctacgtacaaggtgcgaaaaattttccgcagtgcaggaagggaatgaaaagggtttggttctcgtgcaggcttacggcaaagtttctctaaagtttcagcccgaaacacaacagaccagaatggaaaagcattgcgaatactgttcgtgtttgcttcaagattaataatctataaattgcaaatgttgccaggaactgagaaacaaaagcccaggccacgaccacgacccagtttaaacaatgtccaagattcctcggcgacactcgttctaaaataacacggaaaaccttttacagagcggcctgtaatatttcctgcccaaaactttgaaagcctttaaaaataaaacagtgtggttagtaattacgaaatgggcggcctctttaaattccttataaatttattggttgaatagctagctggtgctgttctcccttaagtaagtcacaaaaaaccagacctgacaactgtcgataaccaaacaaaacaaaacgtaagaatgtgtctggttcttttaaaatacagacaaaacaaggacaagaatgccacacagcagacacagaaatagccttgagaccaagtcttatatataatactcactcctataaagccgaataaaatggatgggtcgtctcagcttgaggacattcaaagtaaataatttataatggcaagctcgatgaagcacgaaacattttaaatggaagagctgtcgagcgaaatctggcgtgtcaaagaaagctatgcataaaaagcacattcaaatataataaagggtaagct

SEQ ID NO: 6080 - DNA, 1773 bp, DROSOPHILA
atgcagcagtaccaggacgactcctcctcggcggccgccgcctccaccgcccgccagtgggcgccagctggcggaggagcgggtccgggagcggcggcgggagcagctggcagcggagccgacgatcccggcggcaatgtcatcctaatcggctccgttaaggacttcgagcgcaatgcggtccacggcctcaaattgaatgggattgtggctctggaggagacatcgcagggtctcagtggcggaacaggtggacctggtggtcgcttgccagtggcgccaagtggtcgtggcaccgaggttgagtacttcaatgaggcgggctacattcgggcgggtgctctacgcaatggcgaagatccctatattaggaatcgcttcaatcaggaggccagcgatgctctgcccagcaatcgggatatacccgacaccagaaatcccatgtgtcgtaccaagaagtaccgcgaagatctaccggagacgagtgtcatcattaccttccacaacgaggcgaggtccactttgctgcgaaccatcgtgagtgtccttaaccgaagtcccgagcatttgatacgcgaaatcgtcctggtagatgactacagtgatcatcctgaggatggtctggagctggcgaagattgacaaggtgcgagtgattcgcaacgacaagcgcgagggtttggtgaggtccagggttaagggtgcggatgcagctgtgagtagtgttcttaccttcctggacagccatgtggagtgcaacgagatgtggctggagcctcttctggaacgcgttcgcgaggatcccacccgcgtcgtgtgccccgtgatcgatgtgattagcatggacaacttccagtatatcggcgcctcggccgatttgcgcggcggctttgactggaacctgattttcaagtgggagtatcttagtccctcggagcgggcgatgcgccacaatgaccccaccacggccatccgtactccgatgatcgccggtgggctgttcgtcatcgataaggcgtacttcaacaaactgggcaagtacgacatgaaaatggatgtgtggggcggcgagaatctggagatctcgttccgcgtgtggcagtgtggcggcagcctggaaatcataccctgcagccgtgtgggtcacgttttccgcaaaaggcatccgtacaccttccccggcggaagcggcaacgtcttcgcacggaacacacgacgtgcggcggaggtctggatggatgactacaagcagcattactacaacgctgtgccactcgccaagaacattcccttcggcaacattgatgaccgtctggctttgaaggagaaattgcattgcaagccgttcaaatggtatctggagaatgtctatcccgacctgcaggcacccgacccacaggaggttggccaattccgacaggatagcaccgagtgcttggacacaatgggccacttaatcgacggcactgtgggaattttcccatgccacaacaccggcggcaatcaggagtgggccttcacgaagcgcggcgagatcaagcacgacgacctctgcctgaccctggtcaccttcgcccgggggtcacaggtggtcctgaaggcgtgcgacgactcggagaaccagcggtggatcatgcgcgagggcggactggtgcggcactacaagatcaacgtgtgcctggactccagggatcagtcgcagcagggcgtgagtgcgcagcactgcaactcggcactgggaacgcagagatggtccttcgggaagtatgcgtga

SEQ ID NO: 6081 - protein, 590 aa, DROSOPHILA
MQQYQDDSSSAAAASTARQWAPAGGGAGPGAAAGAAGSGADDPGGNVILIGSVKDFERNAVHGLKLNGIVALEETSQGLSGGTGGPGGRLPVAPSGRGTEVEYFNEAGYIRAGALRNGEDPYIRNRFNQEASDALPSNRDIPDTRNPMCRTKKYREDLPETSVIITFHNEARSTLLRTIVSVLNRSPEHLIREIVLVDDYSDHPEDGLELAKIDKVRVIRNDKREGLVRSRVKGADAAVSSVLTFLDSHVECNEMWLEPLLERVREDPTRVVCPVIDVISMDNFQYIGASADLRGGFDWNLIFKWEYLSPSERAMRHNDPTTAIRTPMIAGGLFVIDKAYFNKLGKYDMKMDVWGGENLEISFRVWQCGGSLEIIPCSRVGHVFRKRHPYTFPGGSGNVFARNTRRAAEVWMDDYKQHYYNAVPLAKNIPFGNIDDRLALKEKLHCKPFKWYLENVYPDLQAPDPQEVGQFRQDSTECLDTMGHLIDGTVGIFPCHNTGGNQEWAFTKRGEIKHDDLCLTLVTFARGSQVVLKACDDSENQRWIMREGGLVRHYKINVCLDSRDQSQQGVSAQHCNSALGTQRWSFGKYA

SEQ ID NO: 6082 - DNA, 4872 bp, DROSOPHILA
aggcttcaaaaatatttgaataaattctttggatagcgttttgcactcgcaattagctgtatcttttttttgtgtagcctgatcaacattttcaggttttcttggcaattttcgctcctcggaacgagctgtatatattttctgggatgactggttaaaaggttcaggttttattggcaacttttgttcctcggaacgagctgtatatttcttctgggatgactggttaaaaggttcaggttgtattggcaacttttgttcctcggaacgagctgtatattttttctgggatgactggttaaaaccttccggttttattggcaatttgcgttcctcgtgtatatcgtttatctgtgatgcctgatcagatgtttctagtttttttggcaattcacatgcttccggtttaccttgaaatatgatcctacaatcagagggtttgcattcctggaccttccacgatttcacagagccctgtagatcccttagaaaaagctcctgtctcttcattatggcttccagtttctgaactctatcgaggatttttgaacacgttgaaggatctgaaggctgatcgtctgaactatttgattgtgtcccaaaatggttttcatattgtgtttctttatcttcttttctggtagtgacagatacgttctccattctactttgatggatattggctgtaaaatcggaagatataagagcgccgcctttgactacgattaatgggcgcttgaaaaaacatttgcgcaatgaagtattcgattttctaggtcttttttcttcatgctcagtcttcgaatattttttcaacggaaaacggacagtttttggttcttcatagtccgtttgcgtttgtatgctgttaaggtttttggacgatactggaatcgattgagtctctacatcatgcatattaagcatcgattgggtggatgcatcttggccacaatcgaaatcctcattgggatccgtttggaagacggtttgagtgcccatgtcctcggtggaagctatggtttgggttgattccgaggcgatggcagcgggtttcgggcgtcccgaaatggaacgacagctgcaagttgctccggcaggtaggcgagttgcagtcgccccggtgggcagcgaatcggccatggaagcatctgcaaaattaaaaagggtaataaaaggattaatcagtatttggaagaaactacctgtaaaggttttcgcattggtggtatataaggtgttgacttattagcagtaattcagtttgcaagtggacaacaagcagcacaatggtaagttaaatagaagcaaataccaagcattttaaaataaaaaatcatttccttgtagattaaccgccgtcagcgtttggaattcgccctgaccctattgccctatgatcccgagacagttcagttgtctgaaacgcagaaaaaagtggaggcgatcatcgcccgcctgcgaacggatgactcctttacggaggaggagagcgatgactgcaaggtgcggcgcattcaagatgcaaatgagtttgccgattccgccatgcgacacatcgaaatgtccgatagtggcaagctgagcactctggaaactcttacactggctgctgagaagctgctaaggacacagcgttcaccggatcaggatttcgatgacatggtgcaggatgtggagtactcgcagctgatgaggaacaccatccaggcggtaaatgaggcgcgtttgaagcttctccagcaatgggagcgcagtaagcgcaaggctctcgatctcctcaccatcgaaattgaaaaggtccaggaaatggatcaggagccagagcacaaacagtctcatgagcaggaccaggatcaggagcagagttcggagccttttaacgcgtttcgcgatggagccgatgagcacaacacctcgacgccgaaaacaaacgacgaagatcttggtttggacgatgacgatgaggactatgtgcccggcggagaagagacaatgggtaacaagaggaagcgtatcaagaaaccggtgacctccactccgaatgcgaaacggcggtgtcctggtttcgaattcgacctggacggcgaatcgccgatggtgacgatcggtcccaatggcaccgaagtttcccgcattagcctaagtgccatcaactgggacatgaccggaccctcgatcacgaggaagctgctctgcgagatcttcgaccgggatacactggcccatcatacgctatccggaaaaccatcgccggcatttagggactgtgcccgtcccagcaaacagcagctggatccgctcaaggtggccgatctggtctatctgatgactaacagcctggacatgactccgcgggaagtgcgcactgccatcaccaccaaatgtgcggatgaaaacaagatgctacgctcgcgaatgcagcgcaaatcaaagtaggaaacttttccatggaaactccctgggaaagacctcctttttcattttctaggaatgaattcccgaaagtaggtccatttacccgttaaaaccctaattctgattctacagtatactaagtcccggcacagccgataacaccaattgaataaagaaacccactttcttacccaactcaccagtggaattgaaattgatgcgggtcagggagtaatcacttttcgtcttccttgggaaatagactcttctgaaagtgcacgttgtgaaattggagaaaccactggagaatgtcttatttttaccttcttaataacattatcaggcgtacatattggtgtttttgtctaatttgctgtgctgtcaaactccctttgacgatttctttgttcggggcactcattggacactaaatataacaaataatttggactatgcaaaagaaaatgtttctgattgtctaaactgtacataatttattactcatttctatgttccatgtggcaacactggtagggaaaagctatcttacacacagcatcgaatttcgataacgtatcgttcacacttgtgacttttccgtgcttcaatcagttttgagcattacaaacagacatagttatatgttattatatttataaaaataaataaaaatatgcgacctgtttaatgcaaaatggatttcttgaggcaaataccataaaattttaagttagttactttttttatgcgaaagcaggttgggtttggttcggtctgcctccccagacacaatgtgttatttattttgcccatcgagtagtcaatacagcatggaagtttacaatattcaaggaccgtttttcacacatgcacccaagacgtggaaattgatgagtaattctcacagcccgaggcatttgtgttggaaaataaatggaataatcaattttcggttgtcgctctggccatcagtgtgtcaatgttacgtatgtatagtatagtatagaatgtattatatgtaaatatttgattttttcatctaatgttccacatcttgatatgcagatgccgagtgatttaaatatatctgtatgttataccacactatgatcctgtatggagaaactacgtttttcgaccacaaacagaaaggacagaaagtgtataaaaatgtgattcccaaacaattcatcgcaacgaaggacgggaattggaataggcgacccaaaaactataataaataaactctctagcaattccttggagcgttcatcaaagcaaaattgatatcaatcatacgaacacaaccgcccacacaatggcaatggtgcgtctatgtgatggcaaattgaaacattgtataaaatactggccagcccgcaaactacccactcggcaaattggccttaaaaataaaacaccatcaacacgaggccgacgaacaaaaaaaaaaacgtatcaaatttaaagaattgccaagttatttttagccgaagcccaatctcccgcaaaagaagaaaacaagtggtggattttcccttgcggctttaactttaaagcttaaagaaacaaaacaaaggctgaaaaatgaaaacaaagacgccgcggccaggcgtgacattgctggaaatgaatgcggcggaaaatgaagtcattactccaaggtaagtcgccgtcgaagtgagcacctcagtccttgccaaaaatcaaagtcacactacaaagatcccggaaccttggctccgtcgtttacccttttcggtaaaccctagttttttcccccaacgtgtcaacggcagtcgtgcgactccatctccgtgccacagccacgcatcgcatccattgaatgtgctgctcctctgacgatgactacaaccaaccactgtgtcgcacaataaaagaagcaataaggatcacaagtaacaatggccgaagagtgcaagtagagacttgaataccctgcctgatggtttaaaaatagttattgttagttgtggttgtaatattgctaagtgcatataaccagttatttaaagttcgcttcataaattgttatcttttgagaagctcgccgaaggactttttaatgggttaagaaataacagagtaggacacacgattaacctccccctggacgacaaactgccttcgatttcagtcacccaactgagctgacagtgacatttacacttcagctgctgctttgcttaaatttcttgcagatgatgaatgagtatacgcaacgttgacgcctgttgtgctcggttaagtcaaagtttttcagcatttagctcattaagcatgcaatagttattgtctccattggcttgtcaaaacagtgtgagctagtgattaagggaaaaacgctttgatggtactcaagtctgcttataaactgtggcaacaattaccttcgacttaagccagaatgggaaactttaaccagaccagatt

SEQ ID NO: 6083 - DNA, 1442 bp, DROSOPHILA
atgtcctcggtggaagctatggtttgggttgattccgaggcgatggcagcgggtttcgggcgtcccgaaatggaacgacagctgcaagttgctccggcaggtaggcgagttgcagtcgccccggtgggcagcgaatcggccatggaagcatctgcaaaattaaaaaggattaaccgccgtcagcgtttggaattcgccctgaccctattgccctatgatcccgagacagttcagttgtctgaaacgcagaaaaaagtggaggcgatcatcgcccgcctgcgaacggatgactcctttacggaggaggagagcgatgactgcaaggtgcggcgcattcaagatgcaaatgagtttgccgattccgccatgcgacacatcgaaatgtccgatagtggcaagctgagcactctggaaactcttacactggctgctgagaagctgctaaggacacagcgttcaccggatcaggatttcgatgacatggtgcaggatgtggagtactcgcagctgatgaggaacaccatccaggcggtaaatgaggcgcgtttgaagcttctccagcaatgggagcgcagtaagcgcaaggctctcgatctcctcaccatcgaaattgaaaaggtccaggaaatggatcaggagccagagcacaaacagtctcatgagcaggaccaggatcaggagcagagttcggagccttttaacgcgtttcgcgatggagccgatgagcacaacacctcgacgccgaaaacaaacgacgaagatcttggtttggacgatgacgatgaggactatgtgcccggcggagaagagacaatgggtaacaagaggaagcgtatcaagaaaccggtgacctccactccgaatgcgaaacggcggtgtcctggtttcgaattcgacctggacggcgaatcgccgatggtgacgatcggtcccaatggcaccgaagtttcccgcattagcctaagtgccatcaactgggacatgaccggaccctcgatcacgaggaagctgctctgcgagatcttcgaccgggatacactggcccatcatacgctatccggaaaaccatcgccggcatttagggactgtgcccgtcccagcaaacagcagctggatccgctcaaggtggccgatctggtctatctgatgactaacagcctggacatgactccgcgggaagtgcgcactgccatcaccaccaaatgtgcggatgaaaacaagatgctacgctcgcgaatgcagcgcaaatcaaagtaggaaacttttccatggaaactccctgggaaagacctcctttttcattttctaggaatgaattcccgaaagtaggtccatttacccgttaaaaccctaattctgattctacagtatactaagtcccggcacagccgataacaccaattgaataaagaaacccactttcttacccaaaaaaaaaaaaa

SEQ ID NO: 6084 - protein, 418 aa, DROSOPHILA
MSSVEAMVWVDSEAMAAGFGRPEMERQLQVAPAGRRVAVAPVGSESAMEASAKLKRINRRQRLEFALTLLPYDPETVQLSETQKKVEAIIARLRTDDSFTEEESDDCKVRRIQDANEFADSAMRHIEMSDSGKLSTLETLTLAAEKLLRTQRSPDQDFDDMVQDVEYSQLMRNTIQAVNEARLKLLQQWERSKRKALDLLTIEIEKVQEMDQEPEHKQSHEQDQDQEQSSEPFNAFRDGADEHNTSTPKTNDEDLGLDDDDEDYVPGGEETMGNKRKRIKKPVTSTPNAKRRCPGFEFDLDGESPMVTIGPNGTEVSRISLSAINWDMTGPSITRKLLCEIFDRDTLAHHTLSGKPSPAFRDCARPSKQQLDPLKVADLVYLMTNSLDMTPREVRTAITTKCADENKMLRSRMQRKSK

SEQ ID NO: 6085 - DNA, 4506 bp, DROSOPHILA
cagaagatacagcacaagtaccgcagtgtgtcggtgctgattacggagcaaattaacttgtatctgcagatcgagcagaagccaaagaaaaaggacgagctgatggtgtcgaacagcgtgctcaagctggccgccgatctgctaaaggaactcgaaacgccattcaagctctctggccttagtgccaatccatatctattcacaaccatcaaggtggtaatcctgtcggccctatcgggcgtgcttagcgaagttttaggctttaaactgaagctgcataaaatcaagatcaagtaacctatgcaaggcgcagacccatcatatttttgtagtacaactttttagaaacgctttaagagaaatctaacactacactctaaattagttaagtgaataaatttaagcgagccaatgtttatgcttgtcacgtgattgtttagctacgttaacaagcccactaacgactacgtaaaccaacagaaattagtatttacctacttaccttctagagcgacctgcacaatcacaaatcatgtttaggcaaattgtgcaatgcaatgaatcgcatgaaagttcatagaactttaagcctaaaatcagtgcacctattgtagttggctgttcattctgttacagtcccaagttaaattcctaaggcggtctcagctagtgttgcaattaataaatgttagtaaactataataaaaatctcgtttaaaataatatgctttgtctatcttactagtatataccaattggatgtttatagctgtgaaagcaacaaattggttctacctttttcttcattggatagaaagatctgatctagatgttaatctttaatctttgttgaaaactatatccttttttctttctgtgcaacacccgtctgctcttcgttaatcgatagttggctcaatagcgatcgaccagctgttgctgttatcgttatcagttcggccacccacaactgacgtaactttcgcctccactcgcgtggtaattttcgcatttagctcccttaaaatcccaccccccacaaaatgatccggcttaattggctattcaggagctcctcggtgctgctgcgcagccaggtgcgactgctccatgtgggagatgccaatgttttgcatagcgaggtagacaagcagtccgccgagtacaaggtgcatataaacaggctgtatttatgtttacataccagctaaagtccaagcttttttaggaaaatgccagagagatggccagtttggttggagatctgcggaacttcaccagccaggtgctcaagggaggcggacaaaaggccatcgagcgacacacatcgcggggtaaactcttagccagggagcgcatcaacctgctcctggataaaggatcgcccttcctagaactcagtgctttggccggacacgagttatatggcgaagaggtggtcaactccgggggaatcgtcaccggagtgggacgcgtttgcgggtaggtctgaaaaatccaagttgatcgaagttccacatcagaacttttagcgcttgcatagcacattcagtctgcagaagacaaggttacgcgtcattagggttaattaggtcgtagattatatttagattataattatagatcggcataaatagccgatccgatctagccgtgcccccagtctgtctgttcgtataaacgtaacgatctccggaactattcaagatattttgtgagtctcatagtgaaggtggaaaataaataaattgtgtacgaaattttttaaattatcaaaaataatatgcaattttcattacagaactgagtgtttggtggtggccaacgatgccactgtgaagggtggaagctactatcccattaccgttaagaagcatttgcgcgctcaggagattgcccaagaaaaccgcttgccctgcatttaccttgtggactcgggtggcgccaaccttccgcgccaggcggatgtctttccagacaaactgcacttcggacgcatcttctacaaccaggcaaacatgtcggcccagggaattcctcagattgctgtagttatgggcagctgcacggccggaggagcttacgtaccggcaatggccgatgagagcatcattgttaagaagcagggaactatatttcttgctgggccgccgctggtgaaggcggccactggagaggaagtgtctgcggaagatttgggtggagcagacttgcactgcaagacttctggggtcaccgaccactatgccttagacgacgaacacgccttgtatctggcccgccagattgtgagcaacttaaacttgtccgccactaattcgtacaacgatcagctgatgcactccagtcaagtcaatttccagactgctactccgccgtctgccgtagaagaaccgcgctacgacgcggaagagctgtacggcatcgtaggtcccaatcttaccaaaagctttgacgttcgcgaggtgattgcgcgcatcgtcgacggaagtcgctttacggagtttaagaagctatatggtgagactttggtgtgcggatttgcgaagctatatggccacacagtgggaatagtcggaaacaatggagtccttttctcggagagcgcactcaaaggcgcccacttcattcagttgtgcgcacagcgcaagataccgctcgttttcctgcaaaatattactggtaagttgatatgtggagtggctgggcgattaaataatgatatcgatctatgtaggcttcatggtggggcgcgatgccgaggccaatggtattgccaaaaacggagctaagatggtaacggccgtggcctgcgctaatgtgcccaagttcacggtgataatcggcggttcctacggtgcgggcaattacggcatgtgcggtcgggcctattcgcctcgtttcctatacatgtggccaaattcgcgcatctcagtgatgggcggaactcaggcagccaatgttatggctcagatcaccgaagatcaacgcaagcgagctggcaaggagttcagcgaggaagaagcccaaaagctgaaggctcccattgtggaaatgtttgaggcggagggttcgccctactacagtacggctcgtctgtgggacgacggcatcattgatccggccaacacccgtcagatcctgggccttagcttgaaagcagccttgaacaacgccggtcaggagaccaagtttggagtcttccgcatgtaaatccaatttgtatgctggagaaatttaatcggagcgcatttacaggcatttaatgcctttatttcgaaactgttgcatttattagcgttaaggcaattgttaactgtgtaatgtacaactgattgtttattaggaacaggcgtgtgaaatcgttcaaagcttacgaaacaacttttaagttgctaaaatattttaattcctgtgcaatagaacaaatgtttatgtcaaaaagttacagctatttaagaaatacggaaaacacaaaacacacacatttaaatgtataatgtataacaaaacaatttattttattagtattaagggttgtaagagtaaaaccagtaagattgacacagctgggatcaaacaaagccgcctatctagtgcataccactgttacacttttagtggtgttcaatataaatattttcttctgaaaataaatacgttttattgctaaatttcatgctgtcgtacatttataattgtattttttaaaaataacagtcgatatcgctatatagtggaccacggactatcgttcatctctagcgcctatcgatagacctccatgcggacctgcgctgggcggccgatgcatcagtgtacattttacatccctagcgctcgctcgtttagcagaagacggtttttcatagaattaacatttccttgtttaaagccaggaatcatttagttctccgtcgccccgaaggataacgaccaactgattaggtgagtttatcacaggatcccacgattgaccggttgaatgtccactgcatccacagtgtgagtgagtcagtgagtgagtctctctccgtttacatatatgtgtgtgtgtgtgtgcggctcctcaacttattcgcaaaaaagaaaagaagaaatcgcaaacctagaagtagcgtcagcagaaaagaaagttcatcggtatgtggcgatttaaaataactctgccgaaaacttcaagtgcacacttggccgaataaatagctgtacatcgcggagcctgcgtgcgcctgtgtgcgtgcctgtgcgtgtgcattgtatatttaaatgtcgcctgctgctgcttcgcttcctcctccaaaaataaaattccctatcctggttccttgcaagtgtgagtgactatcatctcggcgagtgtgtgtgtgtgtgcgtgcgtttgtttgttcttgccacagccgcagaaagaggccgcaaaaattccggtgcagtgtacatatatatggtggaaggtgcccaacccctactacctcgtttccgatgctcgcgacgtctggaaaagcg

SEQ ID NO: 6086 - DNA, 2073 bp, DROSOPHILA
taattttcgcatttagctcccttaaaatcccaccccccacaaaatgatccggcttaattggctattcaggagctcctcggtgctgctgcgcagccaggtgcgactgctccatgtgggagatgccaatgttttgcatagcgaggtagacaagcagtccgccgagtacaaggaaaatgccagagagatggccagtttggttggagatctgcggaacttcaccagccaggtgctcaagggaggcggacaaaaggccatcgagcgacacacatcgcggggtaaactcttagccagggagcgcatcaacctgctcctggataaaggatcgcccttcctagaactcagtgctttggccggacacgagttatatggcgaagaggtggtcaactccgggggaatcgtcaccggagtgggacgcgtttgcggaactgagtgtttggtggtggccaacgatgccactgtgaagggtggaagctactatcccattaccgttaagaagcatttgcgcgctcaggagattgcccaagaaaaccgcttgccctgcatttaccttgtggactcgggtggcgccaaccttccgcgccaggcggatgtctttccagacaaactgcacttcggacgcatcttctacaaccaggcaaacatgtcggcccagggaattcctcagattgctgtagttatgggcagctgcacggccggaggagcttacgtaccggcaatggccgatgagagcatcattgttaagaagcagggaactatatttcttgctgggccgccgctggtgaaggcggccactggagaggaagtgtctgcggaagatttgggtggagcagacttgcactgcaagacttctggggtcaccgaccactatgccttagacgacgaacacgccttgtatctggcccgccagattgtgagcaacttaaacttgtccgccactaattcgtacaacgatcagctgatgcactccagtcaagtcaatttccagactgctactccgccgtctgccgtagaagaaccgcgctacgacgcggaagagctgtacggcatcgtaggtcccaatcttaccaaaagctttgacgttcgcgaggtgattgcgcgcatcgtcgacggaagtcgctttacggagtttaagaagctatatggtgagactttggtgtgcggatttgcgaagctatatggccacacagtgggaatagtcggaaacaatggagtccttttctcggagagcgcactcaaaggcgcccacttcattcagttgtgcgcacagcgcaagataccgctcgttttcctgcaaaatattactggcttcatggtggggcgcgatgccgaggccaatggtattgccaaaaacggagctaagatggtaacggccgtggcctgcgctaatgtgcccaagttcacggtgataatcggcggttcctacggtgcgggcaattacggcatgtgcggtcgggcctattcgcctcgtttcctatacatgtggccaaattcgcgcatctcagtgatgggcggaactcaggcagccaatgttatggctcagatcaccgaagatcaacgcaagcgagctggcaaggagttcagcgaggaagaagcccaaaagctgaaggctcccattgtggaaatgtttgaggcggagggttcgccctactacagtacggctcgtctgtgggacgacggcatcattgatccggccaacacccgtcagatcctgggccttagcttgaaagcagccttgaacaacgccggtcaggagaccaagtttggagtcttccgcatgtaaatccaatttgtatgctggagaaatttaatcggagcgcatttacaggcatttaatgcctttatttcgaaactgttgcatttattagcgttaaggcaattgttaactgtgtaatgtacaactgattgtttattaggaacaggcgtgtgaaatcgttcaaagcttacgaaacaacttttaagttgctaaaatattttaattcctgtgcaatagaacaaatgtttatgtcaaaaagttacagctatttaagaaatacggaaaacacaaaacacacacatttaaatgtataatgtata

SEQ ID NO: 6087 - protein, 578 aa, DROSOPHILA
MIRLNWLFRSSSVLLRSQVRLLHVGDANVLHSEVDKQSAEYKENAREMASLVGDLRNFTSQVLKGGGQKAIERHTSRGKLLARERINLLLDKGSPFLELSALAGHELYGEEVVNSGGIVTGVGRVCGTECLVVANDATVKGGSYYPITVKKHLRAQEIAQENRLPCIYLVDSGGANLPRQADVFPDKLHFGRIFYNQANMSAQGIPQIAVVMGSCTAGGAYVPAMADESIIVKKQGTIFLAGPPLVKAATGEEVSAEDLGGADLHCKTSGVTDHYALDDEHALYLARQIVSNLNLSATNSYNDQLMHSSQVNFQTATPPSAVEEPRYDAEELYGIVGPNLTKSFDVREVIARIVDGSRFTEFKKLYGETLVCGFAKLYGHTVGIVGNNGVLFSESALKGAHFIQLCAQRKIPLVFLQNITGFMVGRDAEANGIAKNGAKMVTAVACANVPKFTVIIGGSYGAGNYGMCGRAYSPRFLYMWPNSRISVMGGTQAANVMAQITEDQRKRAGKEFSEEEAQKLKAPIVEMFEAEGSPYYSTARLWDDGIIDPANTRQILGLSLKAALNNAGQETKFGVFRM

SEQ ID NO: 6088 - DNA, 3461 bp, DROSOPHILA
atgtagagaaggatgggtgatttctcaccccttaaaggatttaaattggctctctggcatcttgtcaatttccaacataaattgtagccctgtgaattacctaagacattactttcgcagtatatacttgctgtttattagcttaacaataggaaaatgtttttgccaatgcaagtcctggtaaatatatgtatatattatccagtacgagtttttgaaaagttaacaataggtgatcccgagacatttttcgaatgaagtagaaaccagtccttggttttagctataagctaaaaataaagattcgatgcatttctgcgttttacatgacgaatattggaggtctaaggtgatctattaggatattttgcaaattcctaggtggtagggcattccttgaaaaccagggctgaaaaagctccccagggaatatactttttattatatgcatacgtatatggttattataatgtccatatattaataggggcggtatataagcataatgtgtttgctgccgataaataatgagagagagcgtggcgaaatccacccttgaaccaggtggactttttggctcgagttgatcagatgttagttttcccaaaagccgtactgtatataatatatatatatgataaaggtgtatgtgtgagcgatcgagaagggacacccagtctaggggatgaaaagtcaggccctttacataagggatacgcaggacctcaaatgccttctgttttgtatgtgtgtgctctgtgttgtgtatgtcagtcaacgaagtcacttccgttgggtttgcgttttagtttgagttcggagtttaggggcacgcgacacagagcgccagcagctgtcctgatgcaaggacacggaaaccatattacatcagtcaccagttaacattcactcaagaaggactaacttgctaaaagtacacccgcaatcgccaccagtttttctcccgccctcaaaaagccacgaatcaaaaaacttaattatggccgccttaagcttcagcccatcacctcctccaaaagaaaaccccaaggaaaaccccaatccaggaataaaaaccacgttgaaaccttttggaaagattaccgttcacaatgttttaagtgagagtggcgccaacgccttgcaacagcatatagccaatcagaacaccattattcgaaagatccgggactttggcatgctgggcgctgttcaaagtgccgcagccagcacaactaacaccacacccatatccagtcaacggaagaggcccctgggagaatcccaaaagcagaaccggcacaaccagcagaatcaacagcttagtaaaacatcagtgcctgctaaaaaatgcaagaccaacaagaagttggcggttgaaaggcccccaaaagcaggaactataagccaccctcataaaagccaaagcgatcagagttttgggactcctggaagaaagggtttgcctttgccacaagccgttgcccgtagaaacgctagggaaagaaatcgcgtgaagcaggttaacaatggatttgctttactccgggagaagatcccagaagaagtatctgaggcttttgaggcccagggggcgggtagaggagcaagcaagaagctatccaaagtggagaccctccgcatggccgtagagtacataagaagtttggaaaaactgctgggatttgattttccacctctcaacagtcaggggaatagttctggttccggcgatgatagctttatgtttattaaggacgaattcgattgtctggatgaacatttcgacgactcgctgagcaactacgaaatggatgagcaacagactgtccaacaaactttatccgaggatatgctaaaccctccgcaagccagtgatctcctgcctagtttgactacattaaatgggttgcaatacatcagaataccaggaaccaacacctaccaactgctgacgactgacttattgggcgatttgagtcacgagcaaaaacttgaagaaacagctgcttcgggccagttatcgcgatcgcccgtgccacaaaaggtggtaagaagtccctgctcttctccagtttcacctgtcgcctcgactgaattgctgttacagacacagacgtgtgccacaccgctgcaacagcaagtaatcaaacaggaatacgtcagtaccaacattagcagcagcagcaacgcacagacttccccgcagcagcagcagcaagttcagaacctgggatcgtcgcctattttacccgcgttctacgaccaggagcccgtgagcttctacgacaacgtagtccttcccggattcaagaaggaattcagcgatattttgcagcaagatcagcccaacaatacaaccgctggctgcctttcggacgagagcatgatcgatgccattgactggtgggaggcacatgcacctaaatctaatggtgcatgcaccaatctgtccgtttagccgaattttttcacatcacgcatctcggaaaagccgattgcattttttggcatactttttaaatgattttaaatcctcacagcataagtctgtggcaggccattctatctaaagttttttttaatcaagccatgactgagtcattgtgtaaatatcaatttaagccgagaaaggaggataacttcggccagccgaagcttatatacctttgctgttaaaaccatgtatttaatatgaaagttcgcacaatttcgatgaagtttatcacaaatttacgatttcatcaagatttgtatattctccaaattctataaaatatatgtacatttttgattcttgctatggtacttgtacgtatgatattgttgatcgatcctgcccgagtcaccttttatatcaccagacatgccgatcatgaatatttattgatgtggggtcggaaatgcctcactgctaccttcagacatattataatatcctctgaaagagtgtgacaaaatgaatgtatgaacactacatatttaaagtcatctagtgatataaaccaaatggaaataaccttgtaagacccaaccacaaaatagttatcctgataaacggcttaatgttgagccggactaacagagtgtctagtatataacaaaaattaatgtatttgtgtaaccatattttttttttatagatttaattgtaggaacgttaaaatgacaagcagataatatatgcttttgaataaatgcaaataaatatgaacatttccaaaaacttaatttgtttcttgtggttttatttctcaacgaaaattaggtatattaaatgacaatttataatttgtaccacattttagaaaaaaaggtgttttatattttagagagtgtcttatggcacagtatatctccggtgctttattgactcgatattcaaaatggggttccttctgtgacagaatgacagaattcggatttttttctagcggttcttttttaaacatgtgccttga

SEQ ID NO: 6089 - DNA, 1461 bp, DROSOPHILA
atggccgccttaagcttcagcccatcacctcctccaaaagaaaaccccaaggaaaaccccaatccaggaataaaaaccacgttgaaaccttttggaaagattaccgttcacaatgttttaagtgagagtggcgccaacgccttgcaacagcatatagccaatcagaacaccattattcgaaagatccgggactttggcatgctgggcgctgttcaaagtgccgcagccagcacaactaacaccacacccatatccagtcaacggaagaggcccctgggagaatcccaaaagcagaaccggcacaaccagcagaatcaacagcttagtaaaacatcagtgcctgctaaaaaatgcaagaccaacaagaagttggcggttgaaaggcccccaaaagcaggaactataagccaccctcataaaagccaaagcgatcagagttttgggactcctggaagaaagggtttgcctttgccacaagccgttgcccgtagaaacgctagggaaagaaatcgcgtgaagcaggttaacaatggatttgctttactccgggagaagatcccagaagaagtatctgaggcttttgaggcccagggggcgggtagaggagcaagcaagaagctatccaaagtggagaccctccgcatggccgtagagtacataagaagtttggaaaaactgctgggatttgattttccacctctcaacagtcaggggaatagttctggttccggcgatgatagctttatgtttattaaggacgaattcgattgtctggatgaacatttcgacgactcgctgagcaactacgaaatggatgagcaacagactgtccaacaaactttatccgaggatatgctaaaccctccgcaagccagtgatctcctgcctagtttgactacattaaatgggttgcaatacatcagaataccaggaaccaacacctaccaactgctgacgactgacttattgggcgatttgagtcacgagcaaaaacttgaagaaacagctgcttcgggccagttatcgcgatcgcccgtgccacaaaaggtggtaagaagtccctgctcttctccagtttcacctgtcgcctcgactgaattgctgttacagacacagacgtgtgccacaccgctgcaacagcaagtaatcaaacaggaatacgtcagtaccaacattagcagcagcagcaacgcacagacttccccgcagcagcagcagcaagttcagaacctgggatcgtcgcctattttacccgcgttctacgaccaggagcccgtgagcttctacgacaacgtagtccttcccggattcaagaaggaattcagcgatattttgcagcaagatcagcccaacaatacaaccgctggctgcctttcggacgagagcatgatcgatgccattgactggtgggaggcacatgcacctaaatctaatggtgcatgcaccaatctgtccgtttag

SEQ ID NO: 6090 - protein, 486 aa, DROSOPHILA
MAALSFSPSPPPKENPKENPNPGIKTTLKPFGKITVHNVLSESGANALQQHIANQNTIIRKIRDFGMLGAVQSAAASTTNTTPISSQRKRPLGESQKQNRHNQQNQQLSKTSVPAKKCKTNKKLAVERPPKAGTISHPHKSQSDQSFGTPGRKGLPLPQAVARRNARERNRVKQVNNGFALLREKIPEEVSEAFEAQGAGRGASKKLSKVETLRMAVEYIRSLEKLLGFDFPPLNSQGNSSGSGDDSFMFIKDEFDCLDEHFDDSLSNYEMDEQQTVQQTLSEDMLNPPQASDLLPSLTTLNGLQYIRIPGTNTYQLLTTDLLGDLSHEQKLEETAASGQLSRSPVPQKVVRSPCSSPVSPVASTELLLQTQTCATPLQQQVIKQEYVSTNISSSSNAQTSPQQQQQVQNLGSSPILPAFYDQEPVSFYDNVVLPGFKKEFSDILQQDQPNNTTAGCLSDESMIDAIDWWEAHAPKSNGACTNLSV

SEQ ID NO: 6091 - DNA, 3440 bp, DROSOPHILA
cacaaatgccgacttaagcagaaacccataggtttttccaccgtgtgataatgttttttaatgtcgaggtgaaatggatggatggatgaatggatgggctgcaaatggaaaatgcgggcaatgggcgatgggcggtgggtggatgttgcatgtgcatgttgaataatttcacctgacagggcgtgtcccgtataccgtgtatgtgtgtgtatgtgtgcgtgtttctgtgcggacaggatacgctgattttcatttcattgcgttgtgcatttgattaaccatctggcgccgtcatctctcgccaaattgagcatgttgccagctcttggcagccattttcggagtaaaagcgaagcggaatggcagggaaaaacccgtgtgtcgagggggaagaaaatgcacaacgaacaattaagtgcactaaccaattgagaggactcaattgcggccaactgatctggcaatttgcgtgccatggaattggattagttcggaatttgtttggtaaacacttacttacaagttcagagtggaaaatagtgaatggcagttagcaaataaacaatataacttaaatattactatactattagttagtcatatttctcattgtgttcatttcccagttgcaattgtttcaacccagttagcatgacaatgaacaaaccacacaagtcactgcaagtattagattttagtggtttttttttttgctgccttaccctgcatttttaattactacccatagtttttcagctttattatttccactgccgttgccttggaaaatgtaataagaaaaaaatgcgtaacatggcaacccctgccattcgttatgacaacccagcgtgtttcattttcatgcgaaaactatttctgagaaacacagactgccaggaaaattacgccagatagttgttgatcaaattgccggggctgaaaacaaccgagagtgcacacatcccagttgtacgcgcaattttacccggaaaagcctttaatgaagacccaaggaaaatacggagtgactgccacggcggctgctcagattctttgcgaggatgttagaaattttagcacacgtcgccgcaatattctctacctaatgcaccgatatctggtggagaatggatactatgcgagtgccgagtccttgaaaagcgaaggacgtctaaccgacgaatacgaactgtgcgacaatatcgatctggatgccatgtacctggaatatgccagcttttataatatgaaatttggtaaatatccgaaaattcttaaaaaagtcggagccaaaattaaggtggaaatgggtggtggaaaggcgcatgagaagacgccggctaaggaattgcccaagaaaccaccgactacggacgcttctctggccaattggcacataggtgtcggcgcagccacacaggcgttgagcaacgaacagccgttgcagataaagaaaatggaaacagcaacggaatcgaatggccaggataatgcttgtgaaatcgaacatgtccatttgggtggtgatgatgttctcttctcctccttggaatggcaatctctggcggaattggtcaagacatcgatattgcaggaaaatatcaagatcaagtggtcggatgtttgcggaaatcagcgagcaattgagttgatcaaagaggcggtactaacgcccattgagtttcctcaattattcgcacatggcctgaaaccctggagatccttgcttctgcacggaccaccgggcagtggaaaaacccttctcgccaaggctttgtattccgagacacagggtcaagtgacattctttaatataactgccagcattatggtcagcaagtggcgtggtgaatccgaaaagatactgcgagttctctttcacatggcagcaaaacgagcaccatccgtaattttcttcgatgaaatcgaaagcttgacctcgaaaagggacagggccacggatcacgaaagttccaagcgctttaagaacgaacttttgcaacttttggacggtatggagcactctctgaacggcgttttcgtcttggccagcaccaatttgccctgggacattgatgaggcctttttgcggcgtttcgaaaagaaactgcttgtccagctgcccaatgcggcggaaagaagttgcttgattaaccgacttttgggcagcagcatatcgctgaatccacgactactcgagcagctggtggagatctccgatcattttaccggcgacgaaatacgtctggcttgcaaggagattagcatgcatcgtgtgcgttgtgccaccaagattggtgatcgatcaatcggcttgcttgctaaggaatcgccggcagctatcgaagcgaatgtggagaaggccttccggcaagtgcgacctttgggccagaagctgttggccaaacacgagcagtggcagcaggaaaacggctcgtaggctggaatctcgtaatatggatatattttttaaaagcaactcaataaatatcttttttttttttaatttacaataaaacatttaagcccgtttgatgatttcaattgactttttaaatgttcgcttgcgtagccaataacttgagtaatggtaagggtaattagaatttcctttaaaacatgtctaattaattgtgtatatgtattgcacatcaatatccttcatttgttacctgcccgtggtgcgtctcctggctccggcgattgtcatccgtgagacatatctacgaatccgtccgctcgacctgcgttgcgaggtattcccggtggtcaccgacttgacgctgtattccgtggccgtggagcttcggcgatcgctggtcattagatcggagcacatagatgaggacagaatagaggcagccgatctgcgcttgccgccagtaaaggttccaccgccgctcgacgaggtggtggtggcggaactatccgatctggagaagagcgacgatctcttgctgcgactcgatgatccggtgcctgcggcatcctgtatattgctatagaactcctcggtctctcggtcgtaggtctgatcctcatcgtcctcgtccatgggatccacatcgaattcctcgccctccgcctcagtggccattgtatcgcttctctggcttagtccacgatttccacgatttccattcgatagggacgacgaatgctgttgcagttgatagtattcgtggcaatcgcctcgagagccccgggatctactgctaccactcagatatcgatacggtgccgagctggagttgcttgtggtggtgctcaaggagtgtcgtttgctggggcttacatcgaggttaccaccattgatggcctcgccgccaccatcgctgtcgccaccgccaacgctgccactgaaggtgacctcatggaatttcgatgattttcgacgagttctcggcgccattgcctcgccgttgttggccaacgaaatc

SEQ ID NO: 6092 - DNA, 1440 bp, DROSOPHILA
atgaagacccaaggaaaatacggagtgactgccacggcggctgctcagattctttgcgaggatgttagaaattttagcacacgtcgccgcaatattctctacctaatgcaccgatatctggtggagaatggatactatgcgagtgccgagtccttgaaaagcgaaggacgtctaaccgacgaatacgaactgtgcgacaatatcgatctggatgccatgtacctggaatatgccagcttttataatatgaaatttggtaaatatccgaaaattcttaaaaaagtcggagccaaaattaaggtggaaatgggtggtggaaaggcgcatgagaagacgccggctaaggaattgcccaagaaaccaccgactacggacgcttctctggccaattggcacataggtgtcggcgcagccacacaggcgttgagcaacgaacagccgttgcagataaagaaaatggaaacagcaacggaatcgaatggccaggataatgcttgtgaaatcgaacatgtccatttgggtggtgatgatgttctcttctcctccttggaatggcaatctctggcggaattggtcaagacatcgatattgcaggaaaatatcaagatcaagtggtcggatgtttgcggaaatcagcgagcaattgagttgatcaaagaggcggtactaacgcccattgagtttcctcaattattcgcacatggcctgaaaccctggagatccttgcttctgcacggaccaccgggcagtggaaaaacccttctcgccaaggctttgtattccgagacacagggtcaagtgacattctttaatataactgccagcattatggtcagcaagtggcgtggtgaatccgaaaagatactgcgagttctctttcacatggcagcaaaacgagcaccatccgtaattttcttcgatgaaatcgaaagcttgacctcgaaaagggacagggccacggatcacgaaagttccaagcgctttaagaacgaacttttgcaacttttggacggtatggagcactctctgaacggcgttttcgtcttggccagcaccaatttgccctgggacattgatgaggcctttttgcggcgtttcgaaaagaaactgcttgtccagctgcccaatgcggcggaaagaagttgcttgattaaccgacttttgggcagcagcatatcgctgaatccacgactactcgagcagctggtggagatctccgatcattttaccggcgacgaaatacgtctggcttgcaaggagattagcatgcatcgtgtgcgttgtgccaccaagattggtgatcgatcaatcggcttgcttgctaaggaatcgccggcagctatcgaagcgaatgtggagaaggccttccggcaagtgcgacctttgggccagaagctgttggccaaacacgagcagtggcagcaggaaaacggctcgtag

SEQ ID NO: 6093 - protein, 479 aa, DROSOPHILA
MKTQGKYGVTATAAAQILCEDVRNFSTRRRNILYLMHRYLVENGYYASAESLKSEGRLTDEYELCDNIDLDAMYLEYASFYNMKFGKYPKILKKVGAKIKVEMGGGKAHEKTPAKELPKKPPTTDASLANWHIGVGAATQALSNEQPLQIKKMETATESNGQDNACEIEHVHLGGDDVLFSSLEWQSLAELVKTSILQENIKIKWSDVCGNQRAIELIKEAVLTPIEFPQLFAHGLKPWRSLLLHGPPGSGKTLLAKALYSETQGQVTFFNITASIMVSKWRGESEKILRVLFHMAAKRAPSVIFFDEIESLTSKRDRATDHESSKRFKNELLQLLDGMEHSLNGVFVLASTNLPWDIDEAFLRRFEKKLLVQLPNAAERSCLINRLLGSSISLNPRLLEQLVEISDHFTGDEIRLACKEISMHRVRCATKIGDRSIGLLAKESPAAIEANVEKAFRQVRPLGQKLLAKHEQWQQENGS

SEQ ID NO: 6094 - DNA, 3026 bp, DROSOPHILA
gagaggccagcgaccgcgatcgccgcttgttgcgtaaattttgtaaccaccgacttttggcggagaatgttgttcttggaaagagtgaaagatgttccgttgccaaaagaacaaccagtttggtcataaatatgcaaagtgtgcacaaacacaggcagaaagcaggcgaaccgcacataaacctgattttgggtgctttattcatttgcaaggagtacaaaagctcttacattaaattaaatgcatctttggtgcagtttaagaatcacttgcaagtgcgacactttgagagccattgatgaccgctgtcgatcaaaaaaggagagcaagggagcccggcaaacagctgtttgagaagcattaacctgttgttgttgctcttgtgttgccgtctagatgagttttcgcttttttcgaggaaattggagcacggtaaacgacttagcataacgggtttcctaagcaagccgtgccgctgcttttttagcacagacataacggcctcacactcgcacacctaaactttttgcacttccgcctggccaattagcacttaatagtgtcatgtgtattttttgacgcgtcagaaccaagacacacacacaggtaacaatttcactggcacactcccacacccaaattggccccatgcaaatggttgctttgttttcaatttcgacgtgctttcagactcaactcaccggttcacttcgtgcacaaacaagtttacaattaaaatcactctcttcacatggttattgcttttagtttactggaaaaattgaatttttcacgaattttcactgcgttgcgatacggtttgtgtaggctagctcgataactttggccgatggcgatagtctaaacatttgtctacgtttcgatgtgaatgagaaacagctgcttgttgattgcacatgtgcttatttttttgtttacctaaacgctccagaatttctgtgcacaactttgtaaattacagataaataatataggaagaatggccagaagaccagagcattcggcgccgccagaaattgtgagtatacgccataacgtactgcccatcaagtgaaccctcaccaattttttattcctttagttctacaacgatgatgaggccaagaaatattccacaaagtgagtagattagatagatatgtatgtatatgttcgaactcataaaaaccagaactttttagcacccgcatcattgagatccaagtagaaatggccgaacgtgccttggaactattggcgctcccggatgatgatgagtctcggttgattttggacatcggctgtggttctggactctcaggtagcgttcttgaggacagcgagcacatgtggatcggcatagatatttccaagtctatgctcgatatcgccgtggaacgcgaggttgctggggatgtcattctgggagacatgggcgagggaatgccctttaagccgggcactttcgacggcgccatctcgatctctgccctccaatggctctgcaatgcggacaagtcgtatcacaatccccacaagcgcctgctgaagttctttaccaccttgttttcctgtctgacacgcaccgcgcgagctgtctttcaattttatccggagaactccgatcagatcgagatggtaacctcgcaagccatgaaggcgggattctacggaggattggttgtcgactatccaaactctgccaaggctaagaagtactacctggtgctcatgactggaggatctgctgagctgccgcaggctttgggttagttttaataataataattatagaaaactaataattactttcacatcatttttctttgcttttgtaggctcacctgaagaggaacgtcgtgtaaactatataaagaaacgtgatgcttgccgtgaggctcggggaaaagcgccaaagaaatcccgcgattggatcctagccaagaaagagcgtcgacgtcgccaggggttggaaacccgtcctgacacaaagtacactgcacgcaagcgcagcggcaaattttgaataaagttgttacatttaaaattagtgacagacctaatctctaattgcggctttgtctatatgttttagatcttgagtcagattaaggatattacaatgccgttggatgtttatatacatatgtataagtcccgctgctattcatcttaagtaaaacggacacatctttaattcacaaaattatattgtttcgaatttaattcatttaacttaagtctatgtacgctgaagactagagaattctaagattgcttcccgactagtttttgttctcgctcttcttgatcgcgtctgtatcgttccttcgctttctgcttgggagtgtcgtaggagctttcggcgaggaacatcaggtatacggccactccggcaaagataaaggccagcaggaccatgtcagtctggcctgatattctgttggtctccctttgcacttttattcgatcgtatttggcctgggcggcttgtctccggtcaaatgatttaccatagtgatttcgcgaccactcgtcgaagtcatagatgggcgtacggcccgcagaatcagatacacgcgatttctgaaatcgcgacttgtaaaacttagtctccgcatcgtcctcgactacgggttccgctacatcgtggacatcttgggcatattgggcgcctgccgtatgtacgattcccttgtcgtaaagtcgacgcagccggtaatttcccagaatctcataagcctgattgatctcccgaaatttcttggctgcgttctcacttccttggttcctgtccggatgataaagcatcgagagcttatagtaagctgccttgatctcgttctgcgtgcactgacgcctgattcccagtgcgtcgtagtggctcatctggtggcgttgactgaggtagaggccacgcagcagaagcagaggtcgccacaacattgggctgtgctggtacatcttggatgtgttctttcgcccgcttcacttgttttggtttcgttatatcacatgaaaattaa

SEQ ID NO: 6095 - DNA, 831 bp, DROSOPHILA
atggccagaagaccagagcattcggcgccgccagaaattttctacaacgatgatgaggccaagaaatattccacaaacacccgcatcattgagatccaagtagaaatggccgaacgtgccttggaactattggcgctcccggatgatgatgagtctcggttgattttggacatcggctgtggttctggactctcaggtagcgttcttgaggacagcgagcacatgtggatcggcatagatatttccaagtctatgctcgatatcgccgtggaacgcgaggttgctggggatgtcattctgggagacatgggcgagggaatgccctttaagccgggcactttcgacggcgccatctcgatctctgccctccaatggctctgcaatgcggacaagtcgtatcacaatccccacaagcgcctgctgaagttctttaccaccttgttttcctgtctgacacgcaccgcgcgagctgtctttcaattttatccggagaactccgatcagatcgagatggtaacctcgcaagccatgaaggcgggattctacggaggattggttgtcgactatccaaactctgccaaggctaagaagtactacctggtgctcatgactggaggatctgctgagctgccgcaggctttgggctcacctgaagaggaacgtcgtgtaaactatataaagaaacgtgatgcttgccgtgaggctcggggaaaagcgccaaagaaatcccgcgattggatcctagccaagaaagagcgtcgacgtcgccaggggttggaaacccgtcctgacacaaagtacactgcacgcaagcgcagcggcaaattttga

SEQ ID NO: 6096 - protein, 276 aa, DROSOPHILA
MARRPEHSAPPEIFYNDDEAKKYSTNTRIIEIQVEMAERALELLALPDDDESRLILDIGCGSGLSGSVLEDSEHMWIGIDISKSMLDIAVEREVAGDVILGDMGEGMPFKPGTFDGAISISALQWLCNADKSYHNPHKRLLKFFTTLFSCLTRTARAVFQFYPENSDQIEMVTSQAMKAGFYGGLVVDYPNSAKAKKYYLVLMTGGSAELPQALGSPEEERRVNYIKKRDACREARGKAPKKSRDWILAKKERRRRQGLETRPDTKYTARKRSGKF

SEQ ID NO: 6097 - DNA, 8164 bp, DROSOPHILA
tcgcaattgagccgcctacatttagtatatctactaacgacctatatagaaaccattgcagtttgaactaaggattaaataagtaagcgcaacgacgccatcatttattgaaaccagaccaagcaggagctctcaatcttcgggttcatcggtcagattgaggacacgcggcttataggtgagtcttttaaaacgacaaaagctcgagtgagcccgcgttggggtcgactgcaccccaacggcgtccttatgtcggcagattttgacgaaactctcgggaatccttgcgttagtggtgattgtcagcgtggctgatcccgccgaggtaatgtagcgcttctgtccctcccatcctggctgggaaagctttttctcaatctgcagcttgacctcaagtgaaggctgggctattgctcggcgcttttgttttggttttggtttattttcttgctttctttcttgtttattttcctgtttttttgcttgtttttcttgctgttcttgttctgagcgagagagaaccatggaataatgaccacacttgaggaaaagatttcttccctacctgccatttttctgtgcaacgttttgggaataacctgctcgcaatgatttagtcatgtggcaattgacgatagctgtcaaaaaaaaaatcgttcaaaattccaaattcaagaatacagtataatcacagggctagctcgatagcctccctgatctggcaattctctagctgaaggctctgcgaccgacaactagcgaaaaaactatgccaggtcagagatttcttaggaatttgcgactccttgctcacgcgacacgtgcagagtttcgatttgaattcaaaagaaaacatttgaattttaattgccaaaacaaattgatagaaatgattgaaatgatctgccttcactagattttcaaagattgtaaacaaatcacgaacgagattgctcaatacatttgaaattagccacagattgcgtggcactgacagctttattcaaaacaaaatacgtcttataggacagatccttcttaaaagctaatttacacaatgcagcttggcattctatcgagtaacaacaaaatatgggtaaagtccagtttattgaaaaaatataaagacgagtcagtctcattttagtattcacataatccgcaactctaaaaaaaaaatgatctatcgtgtgcggcaattctagtgcctcgcacagactaggagagatagaaataaggtgatataagatccaaatagcgttgcatttcttcagctaggtgggatttgaacctaaaaatacccatttgttcgctcttaagttggatgcggggagtcgggcagtatgtattccaagtcgaacttggctccgatgcgaggcactcgatgcttccttcggttgaccgcctgcaacagaagcgagtaaatggaatgagtaaattatgcagaataactatctctatctcctccattacctgggatgatgtcgttgctgtgggcgcgttcgcactgcctgttgagaccccatcagattcggactgcgacgcagccggctgctgtcggccgagaggaaagcattagttcggtaatcaaggctttgacttgtagccaatgcttaccttaatttcaagcgtttgcatcagtccaatcacctgttcgcctgctgattgtaccggaagactagaactggcctttgtgtctatagtctcgttcgtcggttgctgcaacacaggcgaacgactaggattcttggtggcatcgacgtcctgacgaccggctggttggacgcgatttaatttcttgggacggtacgcctgtatgggcacaaaatcttggatcgttgagtatcgcggtggcgcattgttgatctccgtcagctggagtggctgctgctgctgctgctgctgctgctgattcgggtaatatggttgctggaggtgcatgtgcacgttgttgttaaaggtgctctgcgcagctatattctttttgggacgcatctgatatccattgttgacgccagcgtggaatgcgttggcgtgctgcatgcgcgggtgcacccactcatgccactgcctttttgatggagcacccaatggcggctgattcaacgccgctcctgtctggccgcttctgtagaaatgctggctattgatacgttcaggctccatttgcgcatgcgcctgctgctgcttcttctgcgcctcctgctgctgcgcctcctgctgcagcgcctcctgcttctgcgcctcttgctgccagaagagcggtggcttgggtagattctgcaatgaaaagtagttatgtgaacacatggttgggtggcacatctgggctgaaagcagttacgggcatttgtccgggaaacggagctctttgctgttgaagtagtggcggacgttgctgctgcaccgcctcctggagtggcggcgagctctggtcctcacccacgcccaaaaccgacatgagcgccaaggtctgatccagaggagtcagcgttgcggacgaggctgcggtgaatgcagtggaagcagtgcttgcagctgcatcaggagtttttgtgggcggagcaacaaaaatactaccgccctgttgacgtgatgaagaccgatttatgcgccaattatttggcgcaggctgcggtttgtttgttggcgtactgacgcgttcccgccagttggtaatctgctccggcaccggcaccggttttggctccgacgatggcttgtacgaatccgtacgggctatcggatcgctacgcgtcttgacgaattcgtcgctaatttgggtcttcatcgtgatcgggaccgaggtggaccctgcggcggtcacatagcgactgctggtcgcgcggactggctcgtcctgtgcctggttcggctgaggatccctcaccggcagttcgcagtcgttctgcttctttccttcctctgcaaggagaggaagtgggagcattgctatgtatgtgcctcctccgattctgtaggctatgcagccaaatccacttaccatccgtcttgatgatcaccagggcaatttcgggcaccttgtaaactcggtcttcggcgatgccatggatgttgttgcagttcggaacggggctgtcgaacagcaccttgcagaacgtgtcgacagcatggacgcactccaggcggaccgggttggggtccgtaacgggatgaatgccaatcacggtgcccttagtgcccacgggcaccatgtaaatggtgcgtacgattacgacgcgatcgaagagacgcaccgggcgctttgatcggtagacatctggcagtgtgacattgggcttgatgagcaagtgcggcttcacctgcagtttaacgtgcttgacgggcagtgagcgcaggtcgtcgacggcggctatcagcagttcgatggtctcgcggcagaccgtcttggagccgcaagagatgcgctccactttcatgtgcggctgctggcgcacccagttggccagttcctcgacgcggcgatggccaaccgcattggggaacacgtcctgttcgaatacgaactcggcgcgatcgttggagtcgccaaagaagtcgataacgtctgggtaacgctggcaatagttgcgcatcagatccacggccaggctggagtagtaccactggttgttcgtgcggaagcagtatccggcacgctcctcgttctgccgcggatacttgagctgcaggccaatgttgtgcttggtcacgttttccatcttctgacgccgcggaccgagcaccacccacacggtgccacttaggcgtcccagggtgcggccactgattcggagcaagttgcagacctggaaggtgctcagatagtcccggtcccgctcttcctgcagctgacgtgccgcatttactttcggttccggtcgcaccatgatgctgactgcagagatgaaatgatgatggggtgtcaaggacatggcgagacgaacttaccttgaatccggccgttggtgtaggccagccgtgggtcctgcacagttccctcgctgccgtaatacggatccgtgatcaagaagatcgtgctgccaacggggaagtagtgctccacgttgaggaaattcttgcgcattctttcccacacagtcagatcggccaccacgccctgggctggatagccggtgacggagctgctccacgagtcgcgcaccatcaatgcccccttgtcgcggaactccgtcgaattgccggcaaaggtgcgcacatagacgagcacatcatagttggcaaactgtattcccatacgattgataaagctgtcgtgggaggagaaggaggaaagggaagatggagcattagcagtgtgaatgcagggccagacggcggcttcacactcaactgttcctgcagtgccttgcattccgagtcgaaacgccgcgaatcgtttagcgtgattccctcgctgtcgacgcgctgatctcgcgtggccacgcgcaccactatcgccttgacgagatgcggccagccgacgtggatcaccttcccgaggtactgggaggccaccgccgtcagtgtgtcctccagctggcgcttgcgtggttttagcacaatgttctggttgcgactgacctgttcgaacaccttgacgcggtcgttgcgcagctcgaactggaaaagaatagcaagcatattagacatggcggacatggcgagcgttatgcatgtgtcccggcgtcactcacatcgaagggcagatgctgcatggtgggaaatcccgggaagaaaacggttctcgccgcatttggtagctcgatgcacacgctgtacggcagattgactgcgatttcgtgcgaccacttggccacctccgtgcagtagagcacgggaagagccctcagcggtggatacgctggcatgggaccctgcgccaccgtactgtatttgtacacatacatgggaccgtgtcggttgcgttcgcgctcctccagcgacagctgagcctcgcatggcagcatagcggccagcagccgaccctcatcgatgaagggtatcagcacaaccgcctcccaatcgtgtttcttgccattgaggtcgctctcgaactccagtggatagaactcggccagcgggctggtcggcagcagcatgaggtcgtggtaggcgacagggagaagctttgcactggccgccggcagtaccgccagaagctttatatgaaagattggacagatggcttaagtaaatctagtatgtgtgcagatatatggatacatggataatttggttgagaagattgctttaaccaaatgatctagcaccaccattggattagagggagatagatatatgttagaaaggagatacgcaaatgatagtctaaattggtggctctggtttatgtttaagaaatggtaagcctgatgctaggaaagttatcggtgctaactaaatgtgctcagctcacctgctggaatggcagaaagggcgtgcccatgtggaaggcgatctccacctgctcgatgttcttgaggtcgctgatgaatggagtgtagtggaagggatagtaccagtcccaggactgcacgccacggtagtagtagtcgagcacccactgcagcgcattgacgtagtggtggcacagttcctcgatcagttcatcattcggatcacgcttgaacttgttgcggtagaagtttcgcttgtagttctggaactccttcagaagaaccgcgttctcgtcggagcagtcctcctcgctgtcgtcatcgtagagctgtggatgggaaggcggcattgagcggacggaaatgacgggatggcggtcagtgcagagagttcataccagcatgctcttgttgatgagggctccgagatcggagtcgaggttttgagactcggtgatctcgccgacgtccatgtcgaacgcctctgatttgttgttcatgtacttcaagtcgtcggcgtgctccttgaagtgatccagctccacctcggtgagggccgatatgaaaatctgcaagcggcgcaggttgagcttgccgttctcgttgatgttgccgccgagggtcgggtaaatgccgatgtaggtgcggtagagcagcggcagtgcatttgatgaaatgtgcaggcacggcaggtggggaatgaagtcgttgccgaccaaaaagcccatcagcacccagtcgtcgataagctgcgcaatgtccaatttgtgctcgtctgttctcagggcgtcgaactccagctcgaggtactcgcgcagcagacccaggtgcagcaggaagaagcgcgtctcctccaccgaggtgcgcttgacgttgcgcccgaacttgacctcctcgcgcagcaccacgaagtgcagctcgtgggtgcagaggcccagaatgatcagatcggcgtccaggccgtaaaggcagtgtcgtgtattgggatcatagtccggctgcgtcttcatgtaccgaatgtagtccatgatcttgtgctcgccctcgccgggcgcctcctggccacttaggattacggtgcaacgctgccacagcggatccgtcgaaatcttcgttttgagaaaggcgcgcagtccctcctgcagacgcaccatgaattcggtgcccggcgtaatgcagttgctgtcgaagcgctcgtgctctcgcaactcgcctcgctgggccgccttggcctcctgctgctccgcctcgcgcgccgtccggaatcgccggctgcgctgctggttcatcttggcccgtggagccaccccgtcaactgaaaggaagaagaggcgctgcggcttgatcaggtagaacagcttgtctacgtagttgaagatttcctggaatatctgctcctcctccaggtgaaagtgtatgttgttgtcgtccggatgcgagcagttgtggacaatgccgttcatgtccaagtacagattgtcgaactcgggtatctgcaaaggaaccgtacggtgcatggcaacatataacgtgacctagcagctttacttacgcagtgctcccgcgccaattcgctgaggcacggatatcgctcgctgatgtagcgaaagaacttgggaacgcccatgtcgctgttctggatgggactgttctgccgccgtgctgttctgcctggatcagtggcaatttagatgaactgaaaaatttgtgtctttatctgttttcaacatgtattgattgacacaaaagttgcaagtaggcgaggcgttgccacaacgtttcgctattgccatgtggtagggccggcggcattccgcagttcgatgaataactgaaagaataaggaccctgaccgattcaaatcgatattagaatcgataagcgaaacgggctcctttgccaataatcagctaatggtgaaattaagctaaaaggagctaagaacacctacatatctggcagcactgggcaaatgcaatgctcatcatttaaacagttggcttacaaatagcatagttttagttctagttacttctctagttcatcatcagtgtatttcatttcattcattttcattttaaagttcattttaccacttgaacagcatttcatagtttttgcgaagttcgaagtgaaaaagaagaaaactgtttttgaactattgtggcatcgcatccaaggcgaggggccacactgtttccaattagaataaaaacactcaccgctcgcctggtcacactggcactggcgaacagctgttttcccaatcgaaaagcgcttgtgttccaaattttacgtaattcgtattttgaagccgatttctgccgtgtagccccaaacgcctagcgaaatgtcggccctccgccaagtgatgtgcagaagcaccgcctccctgcagctgtaggtacccccgcctggccggagcaagtgcatccgacctggcaaatctgcagccctctaattatccactttcgcatcttgacaccgcaggtaccaggccaacagggcagccgctgcccgctgggcatccaccgccacggacggcggtccgctggaccccaagacggccctggcccgccccgaagagctggagcagcgcaacaagctgagtggcaagatcaccgtgccgactgccgtcaatctcagcccgatcagcggcgttccggaggagcacattcgggagcgccgtgtgcgcatccatattccgcccaagaacgcaatgcagagcggcaccgataacgtgaacacctggcaaatcgagttcg

SEQ ID NO: 6098 - DNA, 5292 bp, DROSOPHILA
cctcgcctacttgcaacttttgtgtcaatcaatacatgttgaaaacagataaagacacaaatttttcagttcatctaaattgccactgatccaggcagaacagcacggcggcagaacagtcccatccagaacagcgacatgggcgttcccaagttctttcgctacatcagcgagcgatatccgtgcctcagcgaattggcgcgggagcactgcatacccgagttcgacaatctgtacttggacatgaacggcattgtccacaactgctcgcatccggacgacaacaacatacactttcacctggaggaggagcagatattccaggaaatcttcaactacgtagacaagctgttctacctgatcaagccgcagcgcctcttcttcctttcagttgacggggtggctccacgggccaagatgaaccagcagcgcagccggcgattccggacggcgcgcgaggcggagcagcaggaggccaaggcggcccagcgaggcgagttgcgagagcacgagcgcttcgacagcaactgcattacgccgggcaccgaattcatggtgcgtctgcaggagggactgcgcgcctttctcaaaacgaagatttcgacggatccgctgtggcagcgttgcaccgtaatcctaagtggccaggaggcgcccggcgagggcgagcacaagatcatggactacattcggtacatgaagacgcagccggactatgatcccaatacacgacactgcctttacggcctggacgccgatctgatcattctgggcctctgcacccacgagctgcacttcgtggtgctgcgcgaggaggtcaagttcgggcgcaacgtcaagcgcacctcggtggaggagacgcgcttcttcctgctgcacctgggtctgctgcgcgagtacctcgagctggagttcgacgccctgagaacagacgagcacaaattggacattgcgcagcttatcgacgactgggtgctgatgggctttttggtcggcaacgacttcattccccacctgccgtgcctgcacatttcatcaaatgcactgccgctgctctaccgcacctacatcggcatttacccgaccctcggcggcaacatcaacgagaacggcaagctcaacctgcgccgcttgcagattttcatatcggccctcaccgaggtggagctggatcacttcaaggagcacgccgacgacttgaagtacatgaacaacaaatcagaggcgttcgacatggacgtcggcgagatcaccgagtctcaaaacctcgactccgatctcggagccctcatcaacaagagcatgctgctctacgatgacgacagcgaggaggactgctccgacgagaacgcggttcttctgaaggagttccagaactacaagcgaaacttctaccgcaacaagttcaagcgtgatccgaatgatgaactgatcgaggaactgtgccaccactacgtcaatgcgctgcagtgggtgctcgactactactaccgtggcgtgcagtcctgggactggtactatcccttccactacactccattcatcagcgacctcaagaacatcgagcaggtggagatcgccttccacatgggcacgccctttctgccattccagcagcttctggcggtactgccggcggccagtgcaaagcttctccctgtcgcctaccacgacctcatgctgctgccgaccagcccgctggccgagttctatccactggagttcgagagcgacctcaatggcaagaaacacgattgggaggcggttgtgctgatacccttcatcgatgagggtcggctgctggccgctatgctgccatgcgaggctcagctgtcgctggaggagcgcgaacgcaaccgacacggtcccatgtatgtgtacaaatacagtacggtggcgcagggtcccatgccagcgtatccaccgctgagggctcttcccgtgctctactgcacggaggtggccaagtggtcgcacgaaatcgcagtcaatctgccgtacagcgtgtgcatcgagctaccaaatgcggcgagaaccgttttcttcccgggatttcccaccatgcagcatctgcccttcgatttcgagctgcgcaacgaccgcgtcaaggtgttcgaacaggtcagtcgcaaccagaacattgtgctaaaaccacgcaagcgccagctggaggacacactgacggcggtggcctcccagtacctcgggaaggtgatccacgtcggctggccgcatctcgtcaaggcgatagtggtgcgcgtggccacgcgagatcagcgcgtcgacagcgagggaatcacgctaaacgattcgcggcgtttcgactcggaatgcaaggcactgcaggaacactttatcaatcgtatgggaatacagtttgccaactatgatgtgctcgtctatgtgcgcacctttgccggcaattcgacggagttccgcgacaagggggcattgatggtgcgcgactcgtggagcagctccgtcaccggctatccagcccagggcgtggtggccgatctgactgtgtgggaaagaatgcgcaagaatttcctcaacgtggagcactacttccccgttggcagcacgatcttcttgatcacggatccgtattacggcagcgagggaactgtgcaggacccacggctggcctacaccaacggccggattcaagtcagcatcatggtgcgaccggaaccgaaagtaaatgcggcacgtcagctgcaggaagagcgggaccgggactatctgagcaccttccaggtctgcaacttgctccgaatcagtggccgcaccctgggacgcctaagtggcaccgtgtgggtggtgctcggtccgcggcgtcagaagatggaaaacgtgaccaagcacaacattggcctgcagctcaagtatccgcggcagaacgaggagcgtgccggatactgcttccgcacgaacaaccagtggtactactccagcctggccgtggatctgatgcgcaactattgccagcgttacccagacgttatcgacttctttggcgactccaacgatcgcgccgagttcgtattcgaacaggacgtgttccccaatgcggttggccatcgccgcgtcgaggaactggccaactgggtgcgccagcagccgcacatgaaagtggagcgcatctcttgcggctccaagacggtctgccgcgagaccatcgaactgctgatagccgccgtcgacgacctgcgctcactgcccgtcaagcacgttaaactgcaggtgaagccgcacttgctcatcaagcccaatgtcacactgccagatgtctaccgatcaaagcgcccggtgcgtctcttcgatcgcgtcgtaatcgtacgcaccatttacatggtgcccgtgggcactaagggcaccgtgattggcattcatcccgttacggaccccaacccggtccgcctggagtgcgtccatgctgtcgacacgttctgcaaggtgctgttcgacagccccgttccgaactgcaacaacatccatggcatcgccgaagaccgagtttacaaggtgcccgaaattgccctggtgatcatcaagacggatgaggaaggaaagaagcagaacgactgcgaactgccggtgagggatcctcagccgaaccaggcacaggacgagccagtccgcgcgaccagcagtcgctatgtgaccgccgcagggtccacctcggtcccgatcacgatgaagacccaaattagcgacgaattcgtcaagacgcgtagcgatccgatagcccgtacggattcgtacaagccatcgtcggagccaaaaccggtgccggtgccggagcagattaccaactggcgggaacgcgtcagtacgccaacaaacaaaccgcagcctgcgccaaataattggcgcataaatcggtcttcatcacgtcaacagggcggtagtatttttgttgctccgcccacaaaaactcctgatgcagctgcaagcactgcttccactgcattcaccgcagcctcgtccgcaacgctgactcctctggatcagaccttggcgctcatgtcggttttgggcgtgggtgaggaccagagctcgccgccactccaggaggcggtgcagcagcaacgtccgccactacttcaacagcaaagagctccgtttcccggacaaatgcccaatctacccaagccaccgctcttctggcagcaagaggcgcagaagcaggaggcgctgcagcaggaggcgcagcagcaggaggcgcagaagaagcagcagcaggcgcatgcgcaaatggagcctgaacgtatcaatagccagcatttctacagaagcggccagacaggagcggcgttgaatcagccgccattgggtgctccatcaaaaaggcagtggcatgagtgggtgcacccgcgcatgcagcacgccaacgcattccacgctggcgtcaacaatggatatcagatgcgtcccaaaaagaatatagctgcgcagagcacctttaacaacaacgtgcacatgcacctccagcaaccatattacccgaatcagcagcagcagcagcagcagcagcagccactccagctgacggagatcaacaatgcgccaccgcgatactcaacgatccaagattttgtgcccatacaggcgtaccgtcccaagaaattaaatcgcgtccaaccagccggtcgtcaggacgtcgatgccaccaagaatcctagtcgttcgcctgtgttgcagcaaccgacgaacgagactatagacacaaaggccagttctagtcttccggtacaatcagcaggcgaacaggtgattggactgatgcaaacgcttgaaattaagccggctgcgtcgcagtccgaatctgatggggtctcaacaggcagtgcgaacgcgcccacagcaacgacatcatcccaggcggtcaaccgaaggaagcatcgagtgcctcgcatcggagccaagttcgacttggaatacatactgcccgactccccgcatccaacttaagagcgaacaaatgggtatttttaggttcaaatcccacctagctgaagaaatgcaacgctatttggatcttatatcaccttatttctatctctcctagtctgtgcgaggcactagaattgccgcacacgatagatcattttttttttagagttgcggattatgtgaatactaaaatgagactgactcgtctttatattttttcaataaactggactttacccatattttgttgttactcgatagaatgccaagctgcattgtgtaaattagcttttaagaaggatctgtcctataagacgtattttgttttgaata

SEQ ID NO: 6099 - protein, 1612 aa, DROSOPHILA
MGVPKFFRYISERYPCLSELAREHCIPEFDNLYLDMNGIVHNCSHPDDNNIHFHLEEEQIFQEIFNYVDKLFYLIKPQRLFFLSVDGVAPRAKMNQQRSRRFRTAREAEQQEAKAAQRGELREHERFDSNCITPGTEFMVRLQEGLRAFLKTKISTDPLWQRCTVILSGQEAPGEGEHKIMDYIRYMKTQPDYDPNTRHCLYGLDADLIILGLCTHELHFVVLREEVKFGRNVKRTSVEETRFFLLHLGLLREYLELEFDALRTDEHKLDIAQLIDDWVLMGFLVGNDFIPHLPCLHISSNALPLLYRTYIGIYPTLGGNINENGKLNLRRLQIFISALTEVELDHFKEHADDLKYMNNKSEAFDMDVGEITESQNLDSDLGALINKSMLLYDDDSEEDCSDENAVLLKEFQNYKRNFYRNKFKRDPNDELIEELCHHYVNALQWVLDYYYRGVQSWDWYYPFHYTPFISDLKNIEQVEIAFHMGTPFLPFQQLLAVLPAASAKLLPVAYHDLMLLPTSPLAEFYPLEFESDLNGKKHDWEAVVLIPFIDEGRLLAAMLPCEAQLSLEERERNRHGPMYVYKYSTVAQGPMPAYPPLRALPVLYCTEVAKWSHEIAVNLPYSVCIELPNAARTVFFPGFPTMQHLPFDFELRNDRVKVFEQVSRNQNIVLKPRKRQLEDTLTAVASQYLGKVIHVGWPHLVKAIVVRVATRDQRVDSEGITLNDSRRFDSECKALQEHFINRMGIQFANYDVLVYVRTFAGNSTEFRDKGALMVRDSWSSSVTGYPAQGVVADLTVWERMRKNFLNVEHYFPVGSTIFLITDPYYGSEGTVQDPRLAYTNGRIQVSIMVRPEPKVNAARQLQEERDRDYLSTFQVCNLLRISGRTLGRLSGTVWVVLGPRRQKMENVTKHNIGLQLKYPRQNEERAGYCFRTNNQWYYSSLAVDLMRNYCQRYPDVIDFFGDSNDRAEFVFEQDVFPNAVGHRRVEELANWVRQQPHMKVERISCGSKTVCRETIELLIAAVDDLRSLPVKHVKLQVKPHLLIKPNVTLPDVYRSKRPVRLFDRVVIVRTIYMVPVGTKGTVIGIHPVTDPNPVRLECVHAVDTFCKVLFDSPVPNCNNIHGIAEDRVYKVPEIALVIIKTDEEGKKQNDCELPVRDPQPNQAQDEPVRATSSRYVTAAGSTSVPITMKTQISDEFVKTRSDPIARTDSYKPSSEPKPVPVPEQITNWRERVSTPTNKPQPAPNNWRINRSSSRQQGGSIFVAPPTKTPDAAASTASTAFTAASSATLTPLDQTLALMSVLGVGEDQSSPPLQEAVQQQRPPLLQQQRAPFPGQMPNLPKPPLFWQQEAQKQEALQQEAQQQEAQKKQQQAHAQMEPERINSQHFYRSGQTGAALNQPPLGAPSKRQWHEWVHPRMQHANAFHAGVNNGYQMRPKKNIAAQSTFNNNVHMHLQQPYYPNQQQQQQQQQPLQLTEINNAPPRYSTIQDFVPIQAYRPKKLNRVQPAGRQDVDATKNPSRSPVLQQPTNETIDTKASSSLPVQSAGEQVIGLMQTLEIKPAASQSESDGVSTGSANAPTATTSSQAVNRRKHRVPRIGAKFDLEYILPDSPHPT

SEQ ID NO: 6100 - DNA, 3401 bp, DROSOPHILA
ccagtggtccgctggtggctcggctctcatttttgcatttttcttcggaaaagtccgcgcgctggaaaagtcaacacaagttcacctctccaaattcgtgcgtgggtgtgggcggaaggtggtggtaggtggatggtgggcgggagtgggtggttggcgattcgagagggggcggtgcgtgggtgggtttatttttagcgctgctgcgacggaaacgcgacaagtcggagattctgcttccgcaatgttgttgtttttgcagccgttattattaacaaatattacgctatccacgggctcttcttcttgcttgtttgcgttgacaaatctcgttgcgctttcacaatcacatcaaatcgtgggaaaactggttttccccccgtttctgagcggttcactcttcggttcgtgatcgtttgtgtccgcgggcaatggaaagtctttgtttttcacacgcgtttatcacaacagtaaataaaatatcactttagccagtttaatcaactcggagagcagaacttttaaccgtgagaaataaccgcatactgaagtggccaaaatctgggaaatcgccatggaggaactcgcggaaaataccaaatccatggcatgcaagctttattatcagtggcgtagaagaggggccttatctgattaatcctcgctctataattttgaaccgcttgccatttttaagggctcaggataatgagatttgttattcttccagattaatgtcattaaattaaaatcttatgtttcccccttatgtttataagagtaatcgcaaatattcaatgaagaaaagaatattttattttattgaactgccgaaatcaacaaattaaacgaatgtaattaatttaaattttaaattataacacccaaaaagtgtgattccccgaaaatatcagttattatacaacgttatttcggaatttgtagaggtattttctggcgctcccgctgcggtcacactgaacacgagtttcgtttcggagattgaaagaaatggagattgacttgggatttgcggaaaagagcgacaatggcgcctggctgagcaaccgctactttcccagcaagctgggaggccagcccgcatggctggaactggaggccttgccgcccacgtcgcagctgcagtgcagcaagtgcagggcacccaaatccttcctggctcagctatacgctcccttcgaagacgagtacaactttcatcggtccatctatgtgttcctgtgccggaattccgactgccaggaggcccaaaatgcaaggtaatcccttctagctctgaaaaccaacttgcaacctaatcttacccatctttccagcaatttcacagtcctcaggtcacagttgccgcgaaaaaataagttcttttcggaggaggagccgagcgacgtgggtcaacccctggtaggaacagcagccatattttcagaacatactcatcataatatgttttcttagcccgccgttccctgcctaaagaaactatgcgccgcctgcggttgccatgctcctcacgcctgcagcaaatgcaaggcaatccactactgctcaccagagcatcaaagggcccactggccacaacacaagccaaactgcggagcaccagaagtagccactgagaagcccttaacacaaatcgttttcccagaatttgagattgtaatggacagcaaccccgtggagtctggcgaggaggacaaggacgatgaggctcgcttggcggagttccaggagctggagtccagcgggaagacgggcgacttgagcaatgtttccgaggcggagatggacaagtacttcggaaactcggcggccgccgatgacaagacctttcgtcagttcaaaaagcaaacagcagccgaacccgatcagatcgtgcgctacaaacgtggaggccagcccctctggatcacgaataccgtcaaaacggtggaggaccaacttaacaagctgcccaattgcattgcttgcggaggagagcgtcagttcgaatttcagattatgccgcaagcgctgactcttctggaggacgaaaacctcgactggggcgtcctggccgtctacacttgcgccaaaagctgccccatcgacggctacgtggaggagcttctcatcaagcaggacattgtggcggaggatcagagttgacattaaaatgcgtacatttaaattttattcttgtcaattacgaaacacgtgaacatttacttcagcttgatgatggggaagtagctgtgtttggagaagtcgaactctggctgccgcttgacttccttctggtgaccgcgagccagcacattcatcaccacaaagttagtccgtgcgatttgcaggaggtccagcatctgaaattaaacgaaacgcattttaatccaggaaaaccaattcagaactaccattgacttacctcctgatctgggttttgaatgctttcgagaacattgcgggcctggtcaaagtgcttggccgcataggtatatagatcctcgacgctatgtcgcatcatgtgctcccggacgtttttgaactctgcgtacgaaactggcggaggactggtgagtgtggcgaagggcaggaagcgtcggttgtagcggatctcctcgttgtcgaacttggacagcggcagtcgcacgcgtccgtctttggtcagggcgcccattgctttatacattccgccgcagaggctgagtagcgcgtggtagaagacgatctcggcgcggtacggcctttgagtctttttgttctttttcggcttggccgccttgcggtttttagccgctccgctgccgcccgactgggtcttactttggtgctcggcgtactcctcctgggccaggaggatgttctccgtgcgcgtcagcgcggagaccaggaagccaatgaggaactcgtatggataccagtagatgtagaggaactcatgcacagcatatagttccagctcaaagccggacatcaggaagatcagcatcgcacggaaacagttgtacagcacccatgtggagaagtgggtgctgtgcttcagagcggtggccatgggctcgttgccctccatggctcgttcgttggccagttggttcatcatagagtccaatcgcgctgcatccacttggatggtgtcgaagttctctatcagacgcgccagcttatcccgctgtctggcgcgattgaagccgcagatgcgaatgaactgcgtgaaggtgttcatgttaatgcagtaacggaagaagttctccaggtgctgctgcaccttgggatcggcagccaccggatgcttggcattcaatacgggtggcgagttgaagacctgaaccgagtggcgcaggaactgcttcatgggaagctttccgtgcgccatacgcatgttggcgctgaacagggtt

SEQ ID NO: 6101 - DNA, 1290 bp, DROSOPHILA
gattgaaagaaatggagattgacttgggatttgcggaaaagagcgacaatggcgcctggctgagcaaccgctactttcccagcaagctgggaggccagcccgcatggctggaactggaggccttgccgcccacgtcgcagctgcagtgcagcaagtgcagggcacccaaatccttcctggctcagctatacgctcccttcgaagacgagtacaactttcatcggtccatctatgtgttcctgtgccggaattccgactgccaggaggcccaaaatgcaagcaatttcacagtcctcaggtcacagttgccgcgaaaaaataagttcttttcggaggaggagccgagcgacgtgggtcaacccctgcccgccgttccctgcctaaagaaactatgcgccgcctgcggttgccatgctcctcacgcctgcagcaaatgcaaggcaatccactactgctcaccagagcatcaaagggcccactggccacaacacaagccaaactgcggagcaccagaagtagccactgagaagcccttaacacaaatcgttttcccagaatttgagattgtaatggacagcaaccccgtggagtctggcgaggaggacaaggacgatgaggctcgcttggcggagttccaggagctggagtccagcgggaagacgggcgacttgagcaatgtttccgaggcggagatggacaagtacttcggaaactcggcggccgccgatgacaagacctttcgtcagttcaaaaagcaaacagcagccgaacccgatcagatcgtgcgctacaaacgtggaggccagcccctctggatcacgaataccgtcaaaacggtggaggaccaacttaacaagctgcccaattgcattgcttgcggaggagagcgtcagttcgaatttcagattatgccgcaagcgctgactcttctggaggacgaaaacctcgactggggcgtcctggccgtctacacttgcgccaaaagctgccccatcgacggctacgtggaggagcttctcatcaagcaggacattgtggcggaggatcagagttgacattaaaatgcgtacatttaaattttattcttgtcaattacgaaacacgtgaacatttacttcagcttgatgatggggaagtagctgtgtttggagaagtcgaactctggctgccgcttgacttccttctggtgaccgcgagccagcacattcatcaccacaaagttagtccgtgcgatttgcaggaggtccagcatctgaaattaaacgaaacgcattttaatccaggaaaacc

SEQ ID NO: 6102 - protein, 347 aa, DROSOPHILA
MEIDLGFAEKSDNGAWLSNRYFPSKLGGQPAWLELEALPPTSQLQCSKCRAPKSFLAQLYAPFEDEYNFHRSIYVFLCRNSDCQEAQNASNFTVLRSQLPRKNKFFSEEEPSDVGQPLPAVPCLKKLCAACGCHAPHACSKCKAIHYCSPEHQRAHWPQHKPNCGAPEVATEKPLTQIVFPEFEIVMDSNPVESGEEDKDDEARLAEFQELESSGKTGDLSNVSEAEMDKYFGNSAAADDKTFRQFKKQTAAEPDQIVRYKRGGQPLWITNTVKTVEDQLNKLPNCIACGGERQFEFQIMPQALTLLEDENLDWGVLAVYTCAKSCPIDGYVEELLIKQDIVAEDQS

SEQ ID NO: 6103 - DNA, 3955 bp, DROSOPHILA
gcagcaggacgacttctttgagttgtagcgtccgtctgcgggacgcaatctagcctaattacgcagagagttaattttacaattcgtttttaattgccgcgcattggggagatgactttggtcagcatgttacatcacacggaaatgccgcactctaaatgtaatataaataatgatatctatcgacaaatatgcgcgataccttacctatacgataaaacattaatgtaactgagctaaaacctaaactaaactatatacctaaactaagcgctgcgctatgtaaacctgtagtacgatgacaaggcagttctgtaaacccattttgatcttgtgtcagccctgtataattgccgccaatttgcttgcaagatccgatctgaaccgcatcgaacagatacggaagccttctgtcctcctgtccgccctcctgccccccattatgtttactttttgtatgactctagctttaatcacactgtgtataatttagttatgagaattattaatgttaattgtatatagtcgccagaaaacacaacaatccaactggactgctctgaccgctaaaacacgaaattggccaactgttgacgtgtaattttaatttattttttagctttccaaagtattaaacccgaaacgttctatataaaaccgtaacctcaattgttaaacaagcatccaccacaaaacaatatatacaccaatatatattatgtatatcccagaaacctcaatatcgaactgcactcatatcgagccaagtcatgttgtacgtgagaatgttttttaaaataaagtgagaattgtgttggaacaaatgctgtgggttttagttatgaatgaacctgccactagcttcgaactgcccatggaagcgatggttggtcactgtagggaagttcacctgtttggttgccaggacaacgtagccgggccaaacaaagaaaaccgaaaggatagttagccacatttcaattgagaacgtgtgacgaagatgtcggaaaaagatctggatgcgattattttggagacccaaaaggttttgggcaagtacatcaaaaagccaccgctcacggagaagctgctgaagaagccgccattccgatttctaatggatgtctttagtaacgtaagtggttggaaatccctcacccctataaaaagattgaaagttgagcctcatttgtggacagtttatcaagcaaagtggcacatttgatggattatacacgccggaagagcagatgttcgagaacataaccagtcgggaggataagattcgatttctgcagaagatgatcgatgcaaccagtgagtttggcttacaatgctggtgctctgaattagctacaaggtgtttgctttcgcagaactaacaaccaaactggatctcaaagtacgcacttcaaaaatagttgctggccaggaaccggagctcaccaatgagctcctccaggcgatggccagtgttgcggaaaagaacttggagtgggacagcattgtggatcaggtggtgatttcccacagcaaaacaccactgacgcttaccaagccaccgaaggaaactaaaaattcaagcaaaaatccctcacccgccggcaaggatgaggatgcaaagcgacgcaaggagaaacgtatatcgcctcaagagcagaagctgcgcaaggtcaaagaacaggtgtcccgttctactccccccaccgagaaggataaagcatcccagaagaagtccaaggcacccaaggatgagacgaagttaagtcgacaaaactcgaagcaaaagagtccgtcaccagttaagcagaagtccaaagccaaactgcagccttcaacagagagcgataatcttagccagtctatgtcgccagtggaagaaggatcaaccaagcctgctgcaagcgaaagtgctccaagcaaaccagagccggaaatggtaagaaaaataagttaatttgctttaaaattagaaatccataagttatgcgtatacccaaacaggttcctccattaaaagagaaggaggcagtggtgagacctgtccaggaaactccaactgctccaccagctgagcctgagagtcgcaaatcctctagcagaagtcgccgttctagtggcagccacaggcaaccggaacctaatcccattcccaatgagagccaatcccagccagcggtgcagtcgtcagaaaccagctctccaccggagaccaacagcggcgaagcgaagcgggaggttcccctcaccagagagaactctaaggaagtgaatcaacggcccagaacctcacttagacctccatccgctcgacccgcctccgcacgtcccggagctccacgacgtcgcaatgtggagatcgtgctccagccaaacgatcagatcaaaatgtcgggcataaatgtaaagcttgaaacctttggcgacttggacgacgacggagagaacctggtgatcatagaagattccgccgcccatgatattgtcgaaggtggcggtgacgaaccggcattggaaggacagctcgatgcccagggacgattggtgcagcagatcttggaaacgcaaaaggaactggtcaatcaaggcgccgaagtggaaccgcctccagcacaggcaggccgacaaacttctgcgcgccaggtgaacgacgtacgcgacgtagtccaaaagctcaccaagtcgataggtccgctgggtaaactactggactgcatacccgaggattttgatgcaatgcagctggagcttacgatgtggcgcgacacctacacgcaggcatccacggaactaaaaagggagcagactctcacggcatctgccacggagcccctgcagcatcagttgcagcaaatccaagccagcattgcggagtaccgggagctaatcgacgagagtcgccacaagatcttgcaaaacaacgcacgtattctgaagttgatgatggaacagtaagcattgaggattaataagcattgttaaaaattcaagagagttttatcgaaaatattgaatttgtatattttataattaataagagtactataaaaatagccatgcatatattgcttggtaacatcattcaattcaaaaatatataaaatctatataataatatcaaaatatctttgatatgtaatatgttggtttgtttgtttttgggtaatttgtcaatgcgcaagatgtctgaatattcaagcaacagacggtaagtttctcttttaaggtcacttggtgtttgtaccaaaaccaacgatcttaaaaatacaaatgttgtaaaaatcatcaacgatcaattcctagaatatggtttttgtgcggtaattgtacgcatgcatcaagggctggaaaatcaagctttctcttgttcgcctacaggttttttcttattttcccggaccacctcctctgagttatccttatccacagctttccccacgatctccttcttttcagatttcgccgaaacttccttcttttccggtttctctctgatttcatttgttttagtttcgcctgtgaccgacaccgcttcttcatcacctgaatgtgactcattgtctttgtccaatccaccttcgtcctgatcctcatctcccagtacatattcgatcacatcgtcgatggggaaattattgagcagcgacttgatggaatcgttgtgaatgaccacggtaaagagcagtttgcagtactctcgcatgcggctaccgtagtcaagctcagcgtagttttcgccacctttggttaggtcgtggccacagttctcgatcactttgcagagcaccgtctcctcgggggcattgggccagccgtatttctttaggatcggtggatccactagcatatcaataagtttacccacattctctttgagctttatgtcctcctcagttagaatttcgccactgaagtcatcctcgctacatgattcttccaaattatctgcgatggc

SEQ ID NO: 6104 - DNA, 1767 bp, DROSOPHILA
atgtcggaaaaagatctggatgcgattattttggagacccaaaaggttttgggcaagtacatcaaaaagccaccgctcacggagaagctgctgaagaagccgccattccgatttctaatggatgtctttagtaactttatcaagcaaagtggcacatttgatggattatacacgccggaagagcagatgttcgagaacataaccagtcgggaggataagattcgatttctgcagaagatgatcgatgcaaccaaactaacaaccaaactggatctcaaagtacgcacttcaaaaatagttgctggccaggaaccggagctcaccaatgagctcctccaggcgatggccagtgttgcggaaaagaacttggagtgggacagcattgtggatcaggtggtgatttcccacagcaaaacaccactgacgcttaccaagccaccgaaggaaactaaaaattcaagcaaaaatccctcacccgccggcaaggatgaggatgcaaagcgacgcaaggagaaacgtatatcgcctcaagagcagaagctgcgcaaggtcaaagaacaggtgtcccgttctactccccccaccgagaaggataaagcatcccagaagaagtccaaggcacccaaggatgagacgaagttaagtcgacaaaactcgaagcaaaagagtccgtcaccagttaagcagaagtccaaagccaaactgcagccttcaacagagagcgataatcttagccagtctatgtcgccagtggaagaaggatcaaccaagcctgctgcaagcgaaagtgctccaagcaaaccagagccggaaatggttcctccattaaaagagaaggaggcagtggtgagacctgtccaggaaactccaactgctccaccagctgagcctgagagtcgcaaatcctctagcagaagtcgccgttctagtggcagccacaggcaaccggaacctaatcccattcccaatgagagccaatcccagccagcggtgcagtcgtcagaaaccagctctccaccggagaccaacagcggcgaagcgaagcgggaggttcccctcaccagagagaactctaaggaagtgaatcaacggcccagaacctcacttagacctccatccgctcgacccgcctccgcacgtcccggagctccacgacgtcgcaatgtggagatcgtgctccagccaaacgatcagatcaaaatgtcgggcataaatgtaaagcttgaaacctttggcgacttggacgacgacggagagaacctggtgatcatagaagattccgccgcccatgatattgtcgaaggtggcggtgacgaaccggcattggaaggacagctcgatgcccagggacgattggtgcagcagatcttggaaacgcaaaaggaactggtcaatcaaggcgccgaagtggaaccgcctccagcacaggcaggccgacaaacttctgcgcgccaggtgaacgacgtacgcgacgtagtccaaaagctcaccaagtcgataggtccgctgggtaaactactggactgcatacccgaggattttgatgcaatgcagctggagcttacgatgtggcgcgacacctacacgcaggcatccacggaactaaaaagggagcagactctcacggcatctgccacggagcccctgcagcatcagttgcagcaaatccaagccagcattgcggagtaccgggagctaatcgacgagagtcgccacaagatcttgcaaaacaacgcacgtattctgaagttgatgatggaacagtaa

SEQ ID NO: 6105 - protein, 588 aa, DROSOPHILA
MSEKDLDAIILETQKVLGKYIKKPPLTEKLLKKPPFRFLMDVFSNFIKQSGTFDGLYTPEEQMFENITSREDKIRFLQKMIDATKLTTKLDLKVRTSKIVAGQEPELTNELLQAMASVAEKNLEWDSIVDQVVISHSKTPLTLTKPPKETKNSSKNPSPAGKDEDAKRRKEKRISPQEQKLRKVKEQVSRSTPPTEKDKASQKKSKAPKDETKLSRQNSKQKSPSPVKQKSKAKLQPSTESDNLSQSMSPVEEGSTKPAASESAPSKPEPEMVPPLKEKEAVVRPVQETPTAPPAEPESRKSSSRSRRSSGSHRQPEPNPIPNESQSQPAVQSSETSSPPETNSGEAKREVPLTRENSKEVNQRPRTSLRPPSARPASARPGAPRRRNVEIVLQPNDQIKMSGINVKLETFGDLDDDGENLVIIEDSAAHDIVEGGGDEPALEGQLDAQGRLVQQILETQKELVNQGAEVEPPPAQAGRQTSARQVNDVRDVVQKLTKSIGPLGKLLDCIPEDFDAMQLELTMWRDTYTQASTELKREQTLTASATEPLQHQLQQIQASIAEYRELIDESRHKILQNNARILKLMMEQ

SEQ ID NO: 6106 - DNA, 8806 bp, DROSOPHILA
gatggtaacggccgtggcctgcgctaatgtgcccaagttcacggtgataatcggcggttcctacggtgcgggcaattacggcatgtgcggtcgggcctattcgcctcgtttcctatacatgtggccaaattcgcgcatctcagtgatgggcggaactcaggcagccaatgttatggctcagatcaccgaagatcaacgcaagcgagctggcaaggagttcagcgaggaagaagcccaaaagctgaaggctcccattgtggaaatgtttgaggcggagggttcgccctactacagtacggctcgtctgtgggacgacggcatcattgatccggccaacacccgtcagatcctgggccttagcttgaaagcagccttgaacaacgccggtcaggagaccaagtttggagtcttccgcatgtaaatccaatttgtatgctggagaaatttaatcggagcgcatttacaggcatttaatgcctttatttcgaaactgttgcatttattagcgttaaggcaattgttaactgtgtaatgtacaactgattgtttattaggaacaggcgtgtgaaatcgttcaaagcttacgaaacaacttttaagttgctaaaatattttaattcctgtgcaatagaacaaatgtttatgtcaaaaagttacagctatttaagaaatacggaaaacacaaaacacacacatttaaatgtataatgtataacaaaacaatttattttattagtattaagggttgtaagagtaaaaccagtaagattgacacagctgggatcaaacaaagccgcctatctagtgcataccactgttacacttttagtggtgttcaatataaatattttcttctgaaaataaatacgttttattgctaaatttcatgctgtcgtacatttataattgtattttttaaaaataacagtcgatatcgctatatagtggaccacggactatcgttcatctctagcgcctatcgatagacctccatgcggacctgcgctgggcggccgatgcatcagtgtacattttacatccctagcgctcgctcgtttagcagaagacggtttttcatagaattaacatttccttgtttaaagccaggaatcatttagttctccgtcgccccgaaggataacgaccaactgattaggtgagtttatcacaggatcccacgattgaccggttgaatgtccactgcatccacagtgtgagtgagtcagtgagtgagtctctctccgtttacatatatgtgtgtgtgtgtgtgcggctcctcaacttattcgcaaaaaagaaaagaagaaatcgcaaacctagaagtagcgtcagcagaaaagaaagttcatcggtatgtggcgatttaaaataactctgccgaaaacttcaagtgcacacttggccgaataaatagctgtacatcgcggagcctgcgtgcgcctgtgtgcgtgcctgtgcgtgtgcattgtatatttaaatgtcgcctgctgctgcttcgcttcctcctccaaaaataaaattccctatcctggttccttgcaagtgtgagtgactatcatctcggcgagtgtgtgtgtgtgtgcgtgcgtttgtttgttcttgccacagccgcagaaagaggccgcaaaaattccggtgcagtgtacatatatatggtggaaggtgcccaacccctactacctcgtttccgatgctcgcgacgtctggaaaagcgtggaaaacatattgcctgagtttaagccatcgtttcgatgacgtcattcttctgcggcttatctgtcaagcccccgcatttcttcagatggcatgtctgtgtgtgtgagctgtccagttaccaatgattctcggacttgttttgttttcctttagctcaagttactatttttattggcttaattaaaatgggctccgccgacgcagctttttggccttcccgatgctgctctactagaatgccggtttcttttcgatttccactcaaaaacactgggagcactcactcacagtttcgagcggatttggctcaatagcatcggaatgtttatttgttgctcaaacagcttattgttgttgccgcacttccactctcagcagattgtatcacacctggggatgtggactaacacatgtccaaatatgattcaaatatggaagtctctccaagtgggctagaaatgaaaacccctgctagtggccctgcttcgctcctcttttctgtttccctggttctgcttaattagttcgctttcaacttccgctgcacgcgcccacatccacactgacttatcgacagccacaacaaactacactggccaaaaaaaaaaaaaaccatcgcctgggtcatcaattccgcagtttctcgtctccaaatgtcacacatcagcgacttaccaactaggaattttgtggatataatgatctccgatgagttatcaagcatatgactcaatagcactcaaaatacgaatctaaactgcaactcatttgttttccccatcttatggatgcaaataagcattcgtatcagttgactttaatgcaaggaactttttgaaacagtcactgatttaagagggatttgactggaaaaatatagcgcatttgtttgaaatttctttagtagttagttttaaactacaaggtttatttgaaatgataagtttttactataaaaattgtatttcaaatagaatcttgattttataaatagctttactttccagaaacttaaatgtattatgattattgactaatgttatttatttagagttttttgagtcatcgaatttcagtcttatccacttattggaaaataacaaaccggacagtctaaaagacgactgataaaaatgcgactaatatagtaatatagtaataataaatagtgcaaactaatatagtgtaatatattacatgcaggggaaatatgcaattggaatgcgtagttttttgagatagaacagaaagcatatgatttcttcatagaaaacattattcctctgtgtagtaatcccaacttgtatttgggacactgctattgttgtgccttctctggcgggggcacttaaatcaataaacgagcagcaaatcgctccgcatttgaattgaagtttcgccctttcgggtcaatgcaccgtacactcgcgcagcgaaaaggtggagagtcggagttttacggaaacaccgaaaggcccacggccgacgtgagtcagtgtatttataggccggctcccaaatgccggctaattctttatctcatctggcccacgtcagatggcccatgcccatgctctatgttcctgctggccaggctgacattgataatgccaatgacgcgctccatgagtaatctccatcttcgcgtcgcaacgaagcggatcgatatcgccgcattgtagcggcgaacagtccaagttcattgttcgcccgttccagtatccgcggagcattttctttcgttcgatcgccttttatgctctcgtaagtgtagagatgggtctgaagaggatttatcttctgaagttcagaaaaagtgctcttgcgacatatccaaatccatatcttgaacattgactaaagcaaagatactggttacttgtaaggataaaattgtttggggtcatgaaacgcagtaaatcagtgcatatgtacatatggcactctgccactctgtgtctttacgaatagttatgagtgattttaaatatggaatttgtccagtgtgcgattttggtttccgcattacgtatattttgaaaaataacaggatggcgactaagtggtcaaaaaacaggccttgagaatgttgcttttcagtagagatttcagaggtagattagtttgtataagtcctgccagttggtcacagagcgtaaaacgaagtaaaagaaaaacgaaagtaatttgtacagttcgatttcgttttgcaaattgagttttatcaagaaaggttagtttatcggaaatccagccagaagtacgtcggatatacagaggtggtaagtgcatcgggcagattggtatgctgaatccgggaagtaagacaattagcttttggtgtggaaatgcctatttgtggttcggtctgttcggtccagagctaactagccaaactactttcgaggaacaaattctgcagattgtggaatgagtgagcaacggtaacatgtccaataacaatcatttggcgttccctgttgccgtttgctttgctgatgactatcgtgatcttgatattgagcacgcacatgggacacgcttcaatgcaccccgagctaaaacaattattagccgccgcaattaagagccgttcatggcgctagcactcccacacggactgcatgtggagccgccactgtgcagttaccaactaaccagccttttgcatcttcgtttcagtgccgctaactaaaccagaggacaccaccaacatggctgtaaacgtctactccacaaatgtgacgtcagagaatctctcgcgccacgatatgctagcttgggttaacgattgcctccagtcgcaattctcaaaaatcgaggagctctgcacaggtaagtgggcttgactcgtctacaaagtgctgggatcaacctacgcttccacttctaggtgcagcttactgtcagttcatggacatgctgtttcccaattcagtgccagtaaagcgtgtcaaatttcgtaccaatctggagcacgagtacatacagaacttcaagatattgcaggcgggcttcaagaagatgtctgtggataaggtacatatgcccgcttgcttacattacttttctatttttcgaacctttatttaattttgacacacaaatccacccgatccgaagaatgtagagtggacatgggcacggtacagtggaagcgcttaaagcgtcgctaaaagcatatgtccactgtaccaatatactcttgtatgttgtgactaactacgatttccgttacaaatcaacttcacgactacgcaaccaccgacaaccacagatcattccagttgataaactgattaagggacgctttcaagacaactttgagttccttcaatggtttaaaaaattcttcgacgccaattacgacggtcgcgagtacgaccccgtggctcagcggggcggagtcaagctgggcaatggcaacggacacggcagcaacggaggcagtggcgtgggcagcagcaacaacgatctccatctgatgcaccggcgaccattgcaggctccagcttctggcggacgaatgccagcacgggtcatcgcttcaactggtacggttctgtcgaagctacgaactccggtgtggaagagccatttgcttgccatttcatttgagttgcgaagcgaacgaacgtgaagcacgcagcggaactaggcaaaactgggatgccacacaacaccacacaaaacttcaccaaccccactggccttgagctgctggcgcaccaagtaatacacaaaatgcacacacattcagtcgcatcaaagcacacagcacacatgttggaggatctgttgttgtcccacatccaacccactaactcctcttcatccccgtacagtgatgggaaatacccaaatatttgtatttatatagatccgcgacatggacaatacttttgaagccataattacttaggcatatgtgggcggatttccaactgcaaagtgtacaagatttctttattacaaggttaaacgcaaataatagtttagatcttatctttggaagtggctaagtctgcgatcaatttaactgaaaatccatccccatcattgcaaagttattatttatacacatcttttttatctggtgctttggctggccaaagagttctgttttccaaattcatactgtatgtttgtttaatctttgttcccattgcatttggattcaccacacgctctctcacctgtttgcatatctctcgcccattttacttttagattatacccattgacaaattagtcaagggtcgcttccaagacaatttcgagtttttgcaatggtttaaaaagttcttcgatgccaattacgatggcagggattacgatgccagcgcggtgcgcgagggagccccaatgggcttcggatcgggagcggtaaagtcactgcccggcacggcggcaagcggcgtgtccagcagctatcgacgtggcccatcggcaacgacacgcccagcaatgacgtctgcagtgaagcccagtatgttttggtttggttcccaattgaatccttctatcgctatctcttctttcattatcgtacgcactatccacatgatcagacaattgtacatatcgcatgcccaggtccatgtagatgttgcacatcctccaagtaaacacaaaagcacgaatagaagacaaatgctgtctgtgcttcacgtttgttgattccttatgcttttatacatacctccgacctggatgttcgcatactaaactcaatcgccttgcccattccagcagtatccaaggtgctgccgcgcacgaacaacgcagccccagcgagcagaataaacgcctgtgccaacagcacgggcacggtcaagaagaacgacgtgagcaattcggtcaacaatcaacaaatagaagagatgtcaaatcaggtgggtcaagatcaagaaaatgagaaaaaaaccggtactaatattatggatcaggtgatggatatgcgcataaacctggagggattggaaaaggagcgagacttttacttctctaagttgcgggatattgaaattctgtaagtaatgaaatcaacaggttgaattaagaacgccatgcctacctgctattatatttctagttgccaagaagccgatgacgccgaggcgcatccgatcatacaaaagattttggacatcttatatgcgactgaggtaggacaagtctgtactctttttacccggccctgcaatcgcttagacttatattttctatttgcaggatggttttgcgccgcctgacgatgcaccaccagaggacgaggagtattaatttgaaacgtgaacgaaaacccactaaattcatttgctgcatacatattcaaaacataagtcaagaagcatgatgaaggggacagagtttattatttagacagaatccaagaagacgttaagcaaaaacgagaagactaacaaatgaagagtgtttgatttcctaggccgaggctgacagcaggatcgccacgtgattaaatagttattcttcaaacatttatttgatacgaacgcgtcgtcgcttaacagatagagacgggatttttttcgattcaaaattgtacccacgataattttgctgatgttgccgatgtgtgtgaaccatcaaccatttcatatttaaattgtttgtatattagcggaataaacgaaccaaatctcgatatctaatggaaagccagcctacccttttcaaaattcttttttgaaaggttcacagactcgtaactaagaaaatttagaatgctcagcttgcaaatttactttgatttagattagctctttgtatcacatggtttacatggttgatttatatcctattaagcacatttataatttttgtttaagtaaaacttttcactagctgacttttgtcgttttgagtgttgtatgtagtggatcacaagagccgaaccaacggtattttgtactttcgatttctatttttaaataattggcttcataacaaaatgattgtataaaataagtgatttttgctctcaattttttaagttctatatttatgtgtaaaacaggcagaactcgttaaaaagtttgaataaaagcgaacgtctaaacacaactttttgatttccggctttcacattacatcactacgcacggacaagttactccaagcggaaactttcacccctccatttctcttctctgatcattgtaaataatttgttaacacaccacaccactcacatgatagtcaacctgtcctttcgacagacacaagtaaatgtatgattatgctcacacaccacagcatcgagtgtgccacccacgccatgatctataacctaattctagaataaaaacatgtgttgcttgattcaaaattaatgcatttctcttttcgcacacgggcagggccctacaaccaatcctaaatctatttgacggcgctctggatgtgtggctgcttgtgggtgccgtcacagaagggtctgtgggtggtctgtttgcagttgcagagccagtagtctcccgacttctccaccttgaaccgaatgggcctggaaagcacaggggtattacttcgtcgcatagctctggctcgagcacctatgtacatacctctgcttgatcttcaggaactcgttcttgtgcattccatcgcagaggggctgagacttggacttgccgcacaggcaccagctgtatgttttatctgttggaatcgcgagttgtggttatgtaaatacttgttctctgcgcaccgatacgatgcgatttctcaataatacctttgtccaggtggatcttgaaggggcgcttgtcgaagatcgtaccgttctccttttgcagaacggccgtttgcttatcctcgagcaggttactgggaattgttttggccgagtccaccggttttgcgctggaactgtagcatgcctgcatgggagtaatgccttgaaatcagggggtgatctatcttggctatgggggatgcctaccttgagcaaccaggatgcccccaggttccgtcttagtatcattgacattctaacgctaatttatttttgttctctttatttaagctgatgattgcagtgtcgaaagtatcgatatgttgt

SEQ ID NO: 6107 - DNA, 1868 bp, DROSOPHILA
ctgcgctgggcggccgatgcatcagtgtacattttacatccctagcgctcgctcgtttagcagaagacggtttttcatagaattaacatttccttgtttaaagccaggaatcatttagttctccgtcgccccgaaggataacgaccaactgattagtgccgctaactaaaccagaggacaccaccaacatggctgtaaacgtctactccacaaatgtgacgtcagagaatctctcgcgccacgatatgctagcttgggttaacgattgcctccagtcgcaattctcaaaaatcgaggagctctgcacaggtgcagcttactgtcagttcatggacatgctgtttcccaattcagtgccagtaaagcgtgtcaaatttcgtaccaatctggagcacgagtacatacagaacttcaagatattgcaggcgggcttcaagaagatgtctgtggataagattatacccattgacaaattagtcaagggtcgcttccaagacaatttcgagtttttgcaatggtttaaaaagttcttcgatgccaattacgatggcagggattacgatgccagcgcggtgcgcgagggagccccaatgggcttcggatcgggagcggtaaagtcactgcccggcacggcggcaagcggcgtgtccagcagctatcgacgtggcccatcggcaacgacacgcccagcaatgacgtctgcagtgaagcccacagtatccaaggtgctgccgcgcacgaacaacgcagccccagcgagcagaataaacgcctgtgccaacagcacgggcacggtcaagaagaacgacgtgagcaattcggtcaacaatcaacaaatagaagagatgtcaaatcaggtgatggatatgcgcataaacctggagggattggaaaaggagcgagacttttacttctctaagttgcgggatattgaaattctttgccaagaagccgatgacgccgaggcgcatccgatcatacaaaagattttggacatcttatatgcgactgaggatggttttgcgccgcctgacgatgcaccaccagaggacgaggagtattaatttgaaacgtgaacgaaaacccactaaattcatttgctgcatacatattcaaaacataagtcaagaagcatgatgaaggggacagagtttattatttagacagaatccaagaagacgttaagcaaaaacgagaagactaacaaatgaagagtgtttgatttcctaggccgaggctgacagcaggatcgccacgtgattaaatagttattcttcaaacatttatttgatacgaacgcgtcgtcgcttaacagatagagacgggatttttttcgattcaaaattgtacccacgataattttgctgatgttgccgatgtgtgtgaaccatcaaccatttcatatttaaattgtttgtatattagcggaataaacgaaccaaatctcgatatctaatggaaagccagcctacccttttcaaaattcttttttgaaaggttcacagactcgtaactaagaaaatttagaatgctcagcttgcaaatttactttgatttagattagctctttgtatcacatggtttacatggttgatttatatcctattaagcacatttataatttttgtttaagtaaaacttttcactagctgacttttgtcgttttgagtgttgtatgtagtggatcacaagagccgaaccaacggtattttgtactttcgatttctatttttaaataattggcttcataacaaaatgattgtataaaataagtgatttttgctctcaattttttaagttctatatttatgtgtaaaacaggcagaactcgttaaaaagtttgaataaaagcgaacgtctaaacacaa

SEQ ID NO: 6108 - protein, 291 aa, DROSOPHILA
MAVNVYSTNVTSENLSRHDMLAWVNDCLQSQFSKIEELCTGAAYCQFMDMLFPNSVPVKRVKFRTNLEHEYIQNFKILQAGFKKMSVDKIIPIDKLVKGRFQDNFEFLQWFKKFFDANYDGRDYDASAVREGAPMGFGSGAVKSLPGTAASGVSSSYRRGPSATTRPAMTSAVKPTVSKVLPRTNNAAPASRINACANSTGTVKKNDVSNSVNNQQIEEMSNQVMDMRINLEGLEKERDFYFSKLRDIEILCQEADDAEAHPIIQKILDILYATEDGFAPPDDAPPEDEEY

SEQ ID NO: 6109 - DNA, 8696 bp, DROSOPHILA
atttaaagaggcgaaaacataagcgactatctcttccaccagaagtcattcaaatgttagcttgcgaatttgaaccttataaaaattcttcagactctgctgattgtgaagaggaagacggttatgaattatacaatattgaaatttaaaataaactttaaaaatatattattaaaaaaaaaaaaaaaaaattggggcggcgttggggcacgcccacttttccaaaatattcctggaggcatgtgtaacgcataaaaaaaaattcatccaaatatctccaatagtttacgaggtattaatttttgtaaaaaaaacaggccaaatgccccatagtgcgcattgtaaatttggcttagtgtgtggcattagtcttaagaatgtgttgcatacgtttcggtggcactgtagtagcactttaacatgaatgcccaaaaacatgcttcaaatcaaaaaaaaattcaaatcataatgcctaattcgttttttatttgttcgattcacatacgtgaacatgttttatgtgtgtgtgtgtgtgtgtgtgtgtgtgtgtgtgtgtcgtttccgttccgtttcgttccgttccgttccttttcgtttcgcatccgtttcggccgctccttatcggctctaactgctctcaaatatcacaactgttaataataagcgactacaaaagttgcgcacaaaaaaaaaaaatatgtcttcgatatagatagaaaaaaaaagcactatagctagaaaaaagctttgtagcgttttcctcagcaattcgggcatttaatcagcccgacttcatcgcaattcatgcattttagtgccacaaactccgccgtaaagtgattccggtgcattgacttcttggaaccgttgcacgcggggcacggcagcatgcgatatccgccgcaagtttggcacgtatacgccgtggcaatcgactgtaaaagcggtaaaacatttgattaaacccacattagagcgatcatatttgataacttactttatacggtctcaacagctgtcgcagctcaccactttcattcagacgctcaacgatattggcatcctgcagataatgaatttgttaaatatttagatattcattgaagaatattcgcttattagttaccccgatgagctgaccctcgacgaagagctgtggcacccggatggtctcgtcctgcatcctttcgcgcatttcctgctgatactccacgctcataaaaatgtccctctcctcgaatttaattagcagtgtgcgcagaatctttttaacattggcacacttggcatatgtgtccctgatgatgcccatgctggtggtgtacaaaaccactttgcccacatccttctccatatagttctgaaattggacaagtttcaatgtttggatgttaatggattgagaattttagtagaaaatttaggcaaagtgctccccacaccaaactaaaaattcgaatgtttatgattgaaataataatatataataatataattcgtttttgtcatgagctcgatttgctggattcatacaccccaaatacgatgtctgttacaaaagccaacttgtagctaggccaatagatcgagggcatcttcggtttgctccatcgccttttgtctttaaccttcaccccacggagccgcaaaatggtaacagccttggccaaaacacttgagccacatggtgttgtattgtgattacaaaacgcccgctaattgccaagcaaaaatacttgttaaacgaaacgaaagacaatttcattgccatactaattagcggataccatttaaagcctggactagagagttctttcagattctttcagtgccatccattgtaattcgttgatactaattcaactgacggcaatcacaacggattcaattgaaaattacgcatagccaatttgtgtaaatggcaaatgaatgtccgaagtgaaaacttggcacaatgcgaaacatttttctcgatttggccaacaagttttttttcattcgcctttagtgagtggcaggggggaggggaggggggtttctcttccgttagacagcctgattaactagattttcatcggcgaagacagtcgataccttgaacacgatcgaatttcccaaggcgactattttgcaatgatttattggtataagaaaaataaattaatagagcaggacatttggcaaacaaaacacagagagttatgatggtgaaatgatatgaaatgatttgaacatgagaaatggtatcaaattaattgcaaatgtcgcttttaaaacactctcacaagggaattggaattaattaataaataatgaaggctatttatttcactatttgcgatatgaaatttcagaggcaagctggtgcacatttcaaatttgagcaaaactttagtgtgagccttgattaaatgaaatatgattatggatatgagaatatatctaaaaatggaaatattaaaatctgcacggtacctaacctgtcgatcacttttctacctttttcgcactgcatcggcgcattgcacttgcataagttgcaagtcgagtcgaattgccagccccccctttgatcgaggatcccatggatcccagtcgcaaaatcgcctcaggtggcggttatttaatatatggcatattatatccaaacataacgccgctcggcggaggcatatacaaaatgttaagctggtaaactggtacattaatgatggccatttgctattaagcgtcattttgtcgctccttcgccgacgagagttcaaagccattgagtgtaatgaacatgttcgcgagaatacccaacggaatgggaatgaatatgaatgaggctgtgaaccgcaggccaaatcacttcaaaatctggccattcaatctaattgtaatgtaaataaacatagcgcacaagcatgaatgtgattgtgcaaatgaaaacaaggctgtgaactgtgaaccgcaggccaaatgacaactcaaaaatctggccatcttctgcagaactccaagcacaaaaaaaacaatatcttcaactgtttttttaagagcagcgaaagagaaagcaggtcacttgttcgacaaggcagtttttttttttttttttttttttttggcaatctctagcttttgatctgggactcaaaggagcaccgaaagttgtgcacacccaaaaaaaaaaaaaaaaaaaaaaaaaaatctcaattaatacgtcacacactgcgttgcataacccataacccgtatgcgtatttccgatggcaatcgatggatttttgtgcaaaacgcatgggaaatttttcgcttttgcacagcatcgatctattcaaatatatatatatatttgaccaaatttcaacaaagttcaacttgttttatggcattgaattgaatagtggtaccgccatgatctgtctaccaatcggttctcacacccaactctaccgatatatatgtacatatatatatatataaatatatgctgtcatcccccgcaccaaagcccatttctttttgcataaatttacacacgtacgcgaatcgagtggaaacatttcactttcgtttggttacgaattgagattttttttttttgtattcagtttccagactgtgttttttttttttttttttttttttggagttattttaccgacgagcttcaatttggcaataattgtatggataccttaataagcccatttcgagtgactctcgtggctttctttcttttggccctgaatgcaaattgaaattgaaatgcagctaacgccccgcacaagttttagctgcctaattgtgcgaagtgtatctttatatattttactctcgtacggcgtaaaagatcgtcaaaaatatgctttaaatctgaaattcagtcacgtagagtacattttcgttttcattttcactttcgtttgaaggcgcatagaaaaatatgcattgttactcaaatgaaaaagtttttctacacgggattatattgttttcaagtgaatcttcaatacgaaatatttgtcggaacaaaaaatggtgggattacttattctgataaattgttactttttatctaatttttaagcttgctatttatgacataaaattactccattgtctctttattcgtttactcaattgggagcaggttaaaaggttttcctgcaatttaaactatacaacaaacaacttaaataggaaaattagtagttagggccagcaaattttaaatactttctcattttgttgaaagggtctttttgccaccttttctgtagtgctgtaaaatgctatatataatatagtgaaattactatagcaatttttggttaaaatattcaatttcaatctttggaaggggactttcgtgtgcaagtgggcttgttatcgggtcattacacacataaactttcgtttttttttttttggccaaaccgattagtgcttaaacttagacatgattgttcacaaaattatattggtagatgtgtgtatgtatgtatgtatgtatgtatgtatgtatgtgtgtgctcaaactcaaattagctaaatgatattttaatgacaccactccaaatgcaaaaaaactcgtatctgaaacaaaaggcaaaaggaatcggctgcggcccataaaatataattcgatctgtctgctcagtatatccgattgttgttactgttgttgttgttgttgttgcataattaacgcattagtggctctttattatgataatttgtgtgtttcttgaacaaattatgcaagctgtttttagccaaataatttttggtatctttcatttttttttattttagcaataattatacattgattttggtttcaaggttggctttgctaatttgactaagaaaaatcaccaaacaaaaacgtgtgagtcgccaaagaagttgacatttaattcgttgagaaggcagtcaaatatatttgattgagtcttggatgaaatattgatgaactcccttgaagttcatgggggtgacagccctatgatagagttgtcgtcgtattttatataaattcacgaaggttgcttaatgccacagaggttttggaatctacacaaatggtaataaatgtaatgtaagataatagaaaatgtaccgatacttgaaattattgaactaccatcaaagttttaactgcccgcgtggcacttagccaatcagatcgaacaccaattattaggtagatgttgtaatagttgctcaatgtccagggttaactcgataccgcctgtctggtaaattgatttcgcaaaactcacattaaaaaggcgtttaaaagcgatatacaataggccagagatcaacccgatgacagggcaaaaaaaaaaaatcgagggtatttcagaagtgcgagcgtggccaattctggcacaataaaactgcgattcgacgcgcttcccctccaccaaaaaataggtcaattaattttggttttcgttttgttttttttttttggaaccccccctcgtttagaagagaactttccacaaaagagaaaaccgaaatcaaaaggtttgagaaataagacaacgagacaaaaagacacttgcaattagtcaggtggcggatcatttaaggcaaactttatatgtataacttatctagccgactatctggctttgtacttccgtcagcattttagctttcttttgccttttcggatttgatatccatatagaaatgaagggcgtatgcgacatattaagccgcttaatggcgaatcaagcaacaacaagctccgcaaatagacagcggcagtcaggtgttaattgtctttcgtgaaagaaatttctcaataataatcgtaatgaaataaaaaaaaaaaatatatataaaaaaaaggcggcaatgaatcaccgaaatgtctggattcactttcacacaggccaacaaacgatccctcacatgcaatatatatgtatgtatttaaatatacatataaatcagcattgcataatgacgcccaactgcaatactatacttgtatctttagtttcgaatgcatctccagtgtaggtgtgaaaaagtcagcgacccaaaggcaaaagttaaacaacaaatacgaaaatgttcaaaaatacacacacacaaaaaaaaaaagaaatccataccgaaaaaactttctcaatgaataacccccacatgcaattgaatgagtgtttgtgtgaatcatattcaaagttggcgcataatattgtagttttgtggtattcaaatatttattcgaatttctcatgcgctaatttaatacaaacgaaactgaaaatatttttaaattcgataaataatttgattttgatttaaggcggaattgacattctgacattcttacatttttttttttttttaaattttgagtgccaatggtgaatgcaatgactttcattgctgaaattgttcacttaaattgcaattgcaattaatgaattcgcttaatgtatccattcaacgaatacattgcacattttccatgccttttttttattgttgaatgggctttgtttcgctgtttttctcattggaaaagactatctcaaacaaagtattcaacctgatttcgttgcttactcttattagcaaatctcaccttgacattgggctgttgcagttgcaagaaggtggctactccattgcgcacacgattcttgacgccccgtacggttcccttggcggatttaattgtagaattgccggcgagcttgcccgccgttcgaatgtcacgaaagccaacaaaatcctcacccggctgctcatccgtaaagtgctgcgcttcgtattccgtcgaggaattggaaccaaaactccggaaattctcgtgttcgcgcacatggaatgtgtaatagccatccgtttcgaattgcaatggtctgccattgattttggtgaccagaggaccggacgctcgttccctgaatcgaatatcccgcagcagggtagtgggcagcaggccaccagagtgcagggaatcgcagcttagcgatgagttgctgctctcatcgcattcctcgctgtcatcggtgaggctatatgctcgcttcggaacgggactcggcgtctccagcgggctgtgcttatggtccgcctcctcgttgaccatcagccgcgtggtctgcagatgaagctccagttgcggtgatctcacctgttgcggctgctgctgctgctgcggatgattctccagatcgctgcccgtgccactgtccaaggtctcgcagggcgagtactggccactggtgtccaccaaatagcacatgtgctgctgcatctcctccacgccctcgttcagcttcaccacacttatctgcttgcccagtgttcgctgctgaccctggctttcgatttgaatcttcaccgtattgttgtgttgcaatgttgccgctgtgtccgctgctgttgctgctgcttgactggcggcaatttcaccattgcagctgattatggtcggtgatgttgctgttgctgctgctgctgttgctgctgatgctgctgcttctgctgatgctgttgcaccggcaatttctccgccaatgcgcaacagtaactgcggatagattttgttggtctctggtgctgctgtcgactttgctgcagtgtcgtaactagtttccaaattatctttggctgttgctgctgtgtcgccaaatgccagcaacatgccagcagcctgtgacttgagcgacatttcagtgttgctgttgctcttggcagttggtgctacttgttttgttgcggcttctgcttcggcagttgcggttgttgttgctggtggtggtgttgccgttgccacttctggcgattcaatgattatggaaataccgcgcattggctccaatcgcgacacattgctagtaattgccgccatggttctgcagcatctggttgtcgatatccgatttcagatatccagtgcctagatctcgtgcctccaagctgatgcaatcaagtgccggctaatgatgttgctcctgtgcgttccacttgcagctgcctctgcctctgcctctgtctctgccgttgaccgttgccaagtgctttacagttagaatgccgcctgcatacgattgaagtaattgccgcagttgcctctgcaagaaatgtatttatgccaatgaaataaagttttatttattttcgactgaaattttgacgagccgttgagattctaatagtctaaaaaatgtctaaatatgaccccaaagctaaccaagataggtattttcaatttctccaagtgtgttagacgccgccacacgagcttgacatttaagttgaagatgatgctgaataaatgttaaaggctttaccagcatactaaaaatacagatgggaaaccagacaaaaaaaaaaataataataatcataataatgataaacacgaaacaccgcaaaaagcagaaagaactggctaaagaatgtcgtaagcaaaaggaatataaaattctgaataccctgtaatttttgcagctaatcatttcttttctatacatatttgtaaactaagcaattaattgaaacaatttaaatataaacaaaagatagttattgtaacgaaatcaacttcagatatcatttcgttattaatgtagctacatatgtatgtatgtagcaagccgtatcgattagtgcagcaactttttcgattccgacagtgaatgttcttcaaacttaagaacgagtcggaa

SEQ ID NO: 6110 - DNA, 1446 bp, DROSOPHILA
atgtcgctcaagtcacaggctgctggcatgttgctggcatttggcgacacagcagcaacagccaaagataatttggaaactagttacgacactgcagcaaagtcgacagcagcaccagagaccaacaaaatctatccgcagttactgttgcgcattggcggagaaattgccggtgcaacagcatcagcagaagcagcagcatcagcagcaacagcagcagcagcaacagcaacatcaccgaccataatcagctgcaatggtgaaattgccgccagtcaagcagcagcaacagcagcggacacagcggcaacattgcaacacaacaatacggtgaagattcaaatcgaaagccagggtcagcagcgaacactgggcaagcagataagtgtggtgaagctgaacgagggcgtggaggagatgcagcagcacatgtgctatttggtggacaccagtggccagtactcgccctgcgagaccttggacagtggcacgggcagcgatctggagaatcatccgcagcagcagcagcagccgcaacaggtgagatcaccgcaactggagcttcatctgcagaccacgcggctgatggtcaacgaggaggcggaccataagcacagcccgctggagacgccgagtcccgttccgaagcgagcatatagcctcaccgatgacagcgaggaatgcgatgagagcagcaactcatcgctaagctgcgattccctgcactctggtggcctgctgcccactaccctgctgcgggatattcgattcagggaacgagcgtccggtcctctggtcaccaaaatcaatggcagaccattgcaattcgaaacggatggctattacacattccatgtgcgcgaacacgagaatttccggagttttggttccaattcctcgacggaatacgaagcgcagcactttacggatgagcagccgggtgaggattttgttggctttcgtgacattcgaacggcgggcaagctcgccggcaattctacaattaaatccgccaagggaaccgtacggggcgtcaagaatcgtgtgcgcaatggagtagccaccttcttgcaactgcaacagcccaatgtcaaggagaaggatgtgggcaaagtggttttgtacaccaccagcatgggcatcatcagggacacatatgccaagtgtgccaatgttaaaaagattctgcgcacactgctaattaaattcgaggagagggacatttttatgagcgtggagtatcagcaggaaatgcgcgaaaggatgcaggacgagaccatccgggtgccacagctcttcgtcgagggtcagctcatcggggtaactaataagcgaatattcttcaatgaatatctaaatatttaacaaattcattatctgcaggatgccaatatcgttgagcgtctgaatgaaagtggtgagctgcgacagctgttgagaccgtat

SEQ ID NO: 6111 - protein, 454 aa, DROSOPHILA
MSLKSQAAGMLLAFGDTAATAKDNLETSYDTAAKSTAAPETNKIYPQLLLRIGGEIAGATASAEAAASAATAAAATATSPTIISCNGEIAASQAAATAADTAATLQHNNTVKIQIESQGQQRTLGKQISVVKLNEGVEEMQQHMCYLVDTSGQYSPCETLDSGTGSDLENHPQQQQQPQQVRSPQLELHLQTTRLMVNEEADHKHSPLETPSPVPKRAYSLTDDSEECDESSNSSLSCDSLHSGGLLPTTLLRDIRFRERASGPLVTKINGRPLQFETDGYYTFHVREHENFRSFGSNSSTEYEAQHFTDEQPGEDFVGFRDIRTAGKLAGNSTIKSAKGTVRGVKNRVRNGVATFLQLQQPNVKEKDVGKVVLYTTSMGIIRDTYAKCANVKKILRTLLIKFEERDIFMSVEYQQEMRERMQDETIRVPQLFVEGQLIGVTNKRIFFNEYLNI

SEQ ID NO: 6112 - DNA, 5236 bp, DROSOPHILA
aagatttgagccagataaaccatttcatttttggacaacttgaatcattgtgcttcttactggtttgaaaaaaggtaaaaacacaaacagaggaagtaacaccgctgaaaggcaaataaaatggcgcaaaagacgtacaagccacatttgaacaaaaaagcatggtaatctgtactaacagcttgttgttgaccttaaacgcggccggttccacgtcgattatggccaaagccagcaatgcaaatatgcggtagttattgtggcggggcaatgcaataatgcagcaatattgcgcatacaatgttcagctaccattaatgaataaagtcacatgttaattatcaggcagtggtggcacgtcgtccaccggcaccgcattaatttcaatatttgcagcagctgttgctgctgggataaaataccgaaaaataacaaacccactggcgacctgctttgttcaaacaggttcgaaccgactgactgactaaatatatgcaatacatttaaagacgtttacgctgacgatcacgtgaaaaaattatccaccgcaggcggagaaacaccaacaaactgaaaaattaacaacgtctggatgtttgagacaaagcaaaagcaaataaaagtgcgccaactgttctccatttcaaatgcgcgccaatttgttgagtcagggcggcagcgccctttaatatttattatcatactttatactttatactttattaaaggagcccaataaagtaagccattttataaaggagcccaatgtagagtgtataaggtgcgaatatacaattactaatatattaaaaatcgtttaagcggtaactggttactatttgaatacatttaagattcgcatctcaaactagttgataattttaaatttcccgccaagctaagacaatctggcaacgcgtaatgaaggtgaaagtgttcccattggcttagtcaatgggaacaggagctcacatcgcattgagagcaattccccatctggtaacattgcagcacgtagtaaacagaaaatcacaattggatcgaaaaatcgcaaattgccataaaacagagcactcgcgtgtgcaaatattagcgcaattcgttggcaggctgagcagtgggcggtagagacgccaacccacccgctcccactctctccgtcgcgccgtttcgctcgctctgttttgaaaggcctgccatgggtgtgtgcgtgcgtgtgtgagtttggggctctgcggcggagtaactgtaacagttgcagctgcagttgcagttaccgttgcaaaggagcggcgttcgggtgagtgcgccgcataattaattattgcggaaattagtcgcttttcactatagtcgccccaacactgcgtttaaaatcagtttttgtgtaacaaaattacaattacatacatacatatatgtgttcgtattgggactgtgcctgtgtgcgttgcgtgttggccatgacatcactacaataaatataatacattaatacaacaaccaaacaactgaatcgaatcattctgaaatccattgcagtttcaagagatcgtccccgacatggatgactcggaattcatgttcaacgagaagcaatcgatccgggactccgggcgcaccctcaagcgctacgggagcacctgctgcaacagcctccggaacaatgagaccctcatccggcacatcgtcgagaagacggacacgctgcagggcatcgccctcaagtacggctgcacggtgagtcaatctttgcgagaagtcatcatcaaccgcagtccacattccacaacagtgcaccataacgacattattgggaagctccaagagtgcatgaggcggttaccacttcctggtagatgcttgtgtacatatctactccagggcatcctaacaactaatcttatatggtagttgtacggaattcccatacaatgactattgttgcatatttaatggtcgtattgacacgtggggcagaagctccaacagtgcacaagttctgtttctagtgtcaactcacggatgctcatacctccctttattattgacatctaatcttcatggaataatcagctctcatagaaaatgacaatcaattttacagcccttcaaagccagtttatggcttttcatcttccaaatgtatctttctatcgatttttaaatgtcaaatatgcaaatttaccatttatccccattgaaacaaacctttagccatgtactatatacttaattgcaactcaaaataggtttatcagcaaaaaaaaaggcactgctgacatgctaaccctttgaatgttaaatgtcagctgcttcatttgaatttattgatcttagaattcagcctttgaacttttgtaattcagataatgcaacccagaatggtttctcgcagttactgctattcccccaacccattcaagtcaccaagtcgttccccactatatagtttctttgaaactttgaatcttgaccaaatcatttcaccacatccattgatttcttacccccttgaggaagctttacgagtgccgccagcacgcgagccattttcattttaaatgtcaactccatgggatttgaatgtatcgattcaataatgaccatgttgccccgggtaacttccatctgccccaacaccatgccacttggtgccttcttggaatttacgaccgtacccacaccttttcaaagttgcgggggatgtgataagtcgtctagtgacttggacaaacactagatagcgagatgtgagaagggacgtgtatctagcatttagtctggatctttatcagtctcgttatcgcagtggaactgtggaaaatgctgcagccccatatttagacaccctcttgcgacttgacagattgctgcatatgatttatgtccacaacgagagctcgactgttcagttagcactggactaatatttgcctaaagccagattaagtttattgactcgacagatctgagacgtcgcagtaagagctaagccaaaacagaaaaaaaatcgttgcatgccacttgacccgattggccataaatgcgtctaagccggctcatccatccgtcgatcaatctcatccatcaatcatgtgtcagcgcttcaattgcgcgtaattgatgagctccaccagcttataaatatatcccgtgcattgtatttcagacggagcaaataagacgggccaaccgcctcttcgcctcggacagcctgttcctgcgtcagtttctcctcgttccagtggagaagaactcaccgtactatccccaggtgcctggcgattcgatagccgctttcgacgccgtgctggccacgccaccgggcactccggatgccaatggacagcgggaggcgcacaacaatgccaataatctgagccagagcaacaagagcttcatgaagagcaacgacatcagcagcagcagtagcagcagcagcagtgggagcagcagcagctgcaacacaagtggcaccggccccatttccggaggatcgcgttccggcggcaaccaacagcagcagcagcaacagcccccacaacgtccctactccattgccggggagctgctggtggtgcaggccggcgacgaggatccatcgatgatgcacggccacggtggttgcagcggcaagcagagcaagagcctggactcggtggccgcaatgacgcccgaggaggagaacaggaaatgcatgaacgacttccttaacaagatagacaacaccatttctgagtcgcgcaaatatgtggagcgctctaaggagtaagtatttccaccactcaaaagagacccaatcaatcaacatttaagatcattcagctgtcaatattggtatttaaatcaattaatcataatttgataagctgacagaaccaatagaaactggaagtgataggtgatgaagtgatgaacgagtcgctagcttgtagaattctatctacatcaactaatcatttgcttattccttccagcctggtcagcagtcagagtgatgcggacatctgcatcagtgccaccgccgacgttttcccgcagcgccgccatccgctgaacaactcctacaagaccaacaacaacgaccgtccgtcgcagtatcagcgccacagctcgacgggcagcgggaactcctcggatacggcgcacctgctgaacacgacgcagacgcgacgagtccagaattcgctgaagcggctggagaagcagcaggacgacttctttgagttgtagcgtccgtctgcgggacgcaatctagcctaattacgcagagagttaattttacaattcgtttttaattgccgcgcattggggagatgactttggtcagcatgttacatcacacggaaatgccgcactctaaatgtaatataaataatgatatctatcgacaaatatgcgcgataccttacctatacgataaaacattaatgtaactgagctaaaacctaaactaaactatatacctaaactaagcgctgcgctatgtaaacctgtagtacgatgacaaggcagttctgtaaacccattttgatcttgtgtcagccctgtataattgccgccaatttgcttgcaagatccgatctgaaccgcatcgaacagatacggaagccttctgtcctcctgtccgccctcctgccccccattatgtttactttttgtatgactctagctttaatcacactgtgtataatttagttatgagaattattaatgttaattgtatatagtcgccagaaaacacaacaatccaactggactgctctgaccgctaaaacacgaaattggccaactgttgacgtgtaattttaatttattttttagctttccaaagtattaaacccgaaacgttctatataaaaccgtaacctcaattgttaaacaagcatccaccacaaaacaatatatacaccaatatatattatgtatatcccagaaacctcaatatcgaactgcactcatatcgagccaagtcatgttgtacgtgagaatgttttttaaaataaagtgagaattgtgttggaacaaatgctgtgggttttagttatgaatgaacctgccactagcttcgaactgcccatggaagcgatggttggtcactgtagggaagttcacctgtttggttgccaggacaacgtagccgggccaaacaaagaaaaccgaaaggatagttagccacatttcaattgagaacgtgtgacgaagatgtcggaaaaagatctggatgcgatta

SEQ ID NO: 6113 - DNA, 1353 bp, DROSOPHILA
taacattgcagcacgtagtaaacagaaaatcacaattggatcgaaaaatcgcaaattgccataaaacagagcactcgcgtgtgcaaatattagcgcaattcgttggcaggctgagcagtgggcggtagagacgccaacccacccgctcccactctctccgtcgcgccgtttcgctcgctctgttttgaaaggcctgccatgggtgtgtgcgtgcgtgtgtgagtttggggctctgcggcggagtaactgtaacagttgcagctgcagttgcagttaccgttgcaaaggagcggcgttcggtttcaagagatcgtccccgacatggatgactcggaattcatgttcaacgagaagcaatcgatccgggactccgggcgcaccctcaagcgctacgggagcacctgctgcaacagcctccggaacaatgagaccctcatccggcacatcgtcgagaagacggacacgctgcagggcatcgccctcaagtacggctgcacgacggagcaaataagacgggccaaccgcctcttcgcctcggacagcctgttcctgcgtcagtttctcctcgttccagtggagaagaactcaccgtactatccccaggtgcctggcgattcgatagccgctttcgacgccgtgctggccacgccaccgggcactccggatgccaatggacagcgggaggcgcacaacaatgccaataatctgagccagagcaacaagagcttcatgaagagcaacgacatcagcagcagcagtagcagcagcagcagtgggagcagcagcagctgcaacacaagtggcaccggccccatttccggaggatcgcgttccggcggcaaccaacagcagcagcagcaacagcccccacaacgtccctactccattgccggggagctgctggtggtgcaggccggcgacgaggatccatcgatgatgcacggccacggtggttgcagcggcaagcagagcaagagcctggactcggtggccgcaatgacgcccgaggaggagaacaggaaatgcatgaacgacttccttaacaagatagacaacaccatttctgagtcgcgcaaatatgtggagcgctctaaggacctggtcagcagtcagagtgatgcggacatctgcatcagtgccaccgccgacgttttcccgcagcgccgccatccgctgaacaactcctacaagaccaacaacaacgaccgtccgtcgcagtatcagcgccacagctcgacgggcagcgggaactcctcggatacggcgcacctgctgaacacgacgcagacgcgacgagtccagaattcgctgaagcggctggagaagcagcaggacgacttctttgagttgtag

SEQ ID NO: 6114 - protein, 343 aa, DROSOPHILA
MDDSEFMFNEKQSIRDSGRTLKRYGSTCCNSLRNNETLIRHIVEKTDTLQGIALKYGCTTEQIRRANRLFASDSLFLRQFLLVPVEKNSPYYPQVPGDSIAAFDAVLATPPGTPDANGQREAHNNANNLSQSNKSFMKSNDISSSSSSSSSGSSSSCNTSGTGPISGGSRSGGNQQQQQQQPPQRPYSIAGELLVVQAGDEDPSMMHGHGGCSGKQSKSLDSVAAMTPEEENRKCMNDFLNKIDNTISESRKYVERSKDLVSSQSDADICISATADVFPQRRHPLNNSYKTNNNDRPSQYQRHSSTGSGNSSDTAHLLNTTQTRRVQNSLKRLEKQQDDFFEL

SEQ ID NO: 6115 - DNA, 5740 bp, DROSOPHILA
atgaataaatatttattaaatattttattaaatattttccaatgatacgcatcgcttaactatggaaatggctttctttgatgtattgaatttaagctttaaattagcagagttgtaagccccctaattattttacaaaagtccagcaaatattgtgaaatgtatacaatcgagaaaatcgatattagttgaaacccatctggaaatggaggtggcggtcaacttgtaaagttttccaattgtccggtcccttaaatgtcatttgcccagcgaaaagaggtttacatatcgctgtttatggacaaaatggtaattgataagaaagtgggtgcacgtgctcccttaacgtgcaatcacctgaagaggtatcgctttttgctgtttagtaaacaaccttttctgagtgccgccgactattttaagcattattcttacttttttagctgctattttgcttagaacaagaggcagttactggtgcaaacgtttggccgggggaaaaactctgtataattagtttggcttcgaattgtgggtgtaattatagcgcaatttcaagtagttcttgccgttctgcaaatttcgacgaaaaaattaaatgtatacgaccctaatttggatccatttgtttagctccatcgccccacctgtgcactttccattcctgtttacagaggtattaggtaacctaatttgtgtgcgcatttcggagttcatgggaggacaacatggcaaaggtcacgttgtgcgaaaaaataagctccaaatggatcgtgtgtgtcatcacaaatcgattaattagagggaaaatgaaacatgtatcctgtgaatggcttggttagtgcaattaattataatctttttacagaaagcgactcaaaaaccgaaaggattttccaatcgatggtttcttataaaaaaaagatagacaaatagataacatagtatttcattctgttgcagtgaacgccgtcaactatgaggaaacttggccagcagaatgcatcattcgaccaaagtaccgagtaggattgtgctgattctcctgctggtgctagtacgcaatgccgttggtcaggctcccagggaaaacgccaccaatcccactctgatatccctggtccggagctcggaaaaggaaccggagcagatggagtcgcatcggtatgttaccggcttgtcggaacctatagcaatggaacccttaacaaggatgcgtctaaacgtgagtacaaccgaaggtttcagacatgtcagagaatattatacaaatcaccttgagagatttattccagaccgagcattttgaattactaactgtgctcttaagtagctggtatctactatttctaaatttgtacaattttttagcccaatcctgatggcgaaatcacagagctgaccacaaatgtcacgctctacatggagaaaataccacgcctacaggtgcgatggcaggataatttgccacaaggtgagtctatgtccttaatgctacttgtatttagtgagtagcctgtaagttctgaaagtatttaggtgttcaacttaaatactggtaccaaatatagtggaagcaaaggtaattctttctaaaactgggaactactatgcttttaggcacttcgtacaatgttcttgtaagcgcggtgaacaacagtcgttgtccggatgcgccgtgcagcgagtacggaatcaaagaaaagaatgcatctgcggagacccactccgtcaacctgcccgttaatcccaatctgaacgtggagtccgtggactgcaactacatgttcggctgccagtaccaggtcattgtggagacatccaacgcgatggtcagaagatctgctcgcgtctacattccacgtaagtgccctccttaagggtgtgagttccttccttgtgatgacttctatccgtaattccaacagagtgcttagagggcaagtgctcttgccaactggcgcccactccgccaaaggtcctggccgtggccaaaatgcttagcaacgagaccatcagcatcaatctctcgattctggccagcgagctgttgcgcaaggaacaggactcccatctgcacgagacattgaggacatataaaatgcagctgaagtgagtaatctcagcggggttgtaatttaatcaaaaatccaatctatcataatcccaattaacacgagttattgaaattactgcgctaaatgcaatgacgttttccactgaagctcgaaaattaaattttaaattttacatgattacaaagtacacaaaatcagtcaatcaattctatgcaaattgcaacaacatatcaatacatcgcttttgcttcaatttcaatagaatcctgaaattgcattgccgtcctgtatggaatgccatgcatttttgaacttacatggcatttaattaaatgacaactgcagggaaatacctggcgtcaacagtttgtccacttaaaaatgtactcccaataagagattaaattgtgaaataatagctataactaagctaatagcattcaaattacagaatcaatgaggagacaaacccatcgcttccctggggcggggtactgaagcatctgatgacccgcgtctacaaactcagcgaacttaacttcagggcaactcccaaaggattcgagggcgtaatgaagttgggactgggcacgcaactcaaggagaaggcttccctcagcctgcaggctgtgattatcgatcctacgggctgcgagggaccacgcagtgtaaccaaggtgccaggtgagtaaatttcacaccggaaggtaattttctttacctaaaatgttaattttccatatgaaaagtgcctgcaaatcctgtgctgctaacagaaggcgatagtgtggtaagccaggatttaatgtccgtatacgctccgactattccctattgtttcatgtccagagcaactccataattgtgatgagcgccatgctgattgccattatcctagctggcctgattatgctgcttcttcgtcgccgaagagccaggacaacggccaagctgcgcaagcaggagcagatctacatccagaccttcgccacctccgccatagagtaagtagagggagctatgcttgatgaagctgttagtagatgtactccttcatttcagaatggaggacaatgtcaactacgtcgacaagtatgtagaggtaagtcactagaaaatcttaaaaatctgaatcctagccaactatccaactatccattcagaagtcacaggtcctgggactggcagacattttcgaagttccccactcggccatccaaattggccggatgttgggcgagggagcctttggccaggtgcacgaggccactgccatcaacttgcgccggatgaggggcaccaccatcgtagcagtgaagcaactgaaacgtgagcaaaactcgatagttcaattggatgaatccagagcgaaaacgtttttttttagccaatcccaaggcggatgaagtggctgagtacctggcagagatcgagatgctcaagggcgtgggcactcaccacaatgtggtctcttttctgggctgctgcaccattaagccgccatatctgatgataatggaatacgtaaacaagggaaacctggtaatttgaatgatatttatacattcaaagtcataacaatcaatgaaaactgactttgctttccctttagctaagctatttgcgaactgtgcgtaaggaggccagcaaactgaggaacagaaacgccaactacacttcctgcaggccgattatgaccaggaccaacagcacgtcctcgcccaagtcacaaagcgtgaactacatcgaattgaaggcgtccagccagaccattgaaatgccacaggaggactccactgctcacatgaatggcattcggcagcctcatccctcctttgccgaaagtaagcttgtagcactgggactaactagttgggcaaagtcagtgaatgagaatctaatttcagccacttacaccattgtcgaggacgaagatgcattcgagtacatattggataacaaggaattgcacaatttcgccctgcaaattgccaatgggatgcgtttcctggaagagcaggaaataacgcaccggtatgatccactaccagcaactctgtgataactaatatataacttataacttatcatcccatttaaagcgacttggctgcacgcaacgtgcttattgacagcaataagacccttaaaatttcagatttcggcctttccaggcacggaatttacacgaacacaaggacccgaaaggtaagctagttagatacattactctaggtatttcctcaacgtaagaacttgaagtaaatagttcaggacttacattgtttatctcttcgcttagctccctcttcgatggctgtccattgaggcgattcgcgaaaatgtctattccagcaagagcgacatctgggcctatggcgtagtgctctgggagatcggcacccttggcgcctcgccatatccgacgatcagcaacgacgagctaataccattcctgatggctggcaatcgcctcgagcgtccagagatctgcactccgcaggtgtacaccatcatgctgcagtgctggcttgaggagcccgaggagcgacccaccttcgacgccctgtacaaggtgctcagtccaaagactacctacgtggacatcaacagtctgagtgatgattacgtctttccgccgatcagtgaaaatagggaataagctcgcgtagacctcctcctactgagaatatactttatatgtcctcaatcgttagttgctagttatggaacgtccttgttcgttaattgttatacgattatccgaagtgtacaaatatctccgtctgtgtgtgcataatgcagagtttaaaatgtgccggaacaaagtttgaattaagtacaacttgagttagtgtttagtcagtaggctttagattgtcggcacagtgtcggtataactttacgtgcgaagttttccaagctgtgtacacattaaggtagttaaggacattaaacggacttcacagtctgtcacaatccgtatacgaacgtaattttgatgtgctgtgagatttaaacgatggaaatatattgaaattaattgtatttcatattttattgttagtctttattaagcgtttattcgttacttcagagtattaataaaattcaaaagattaccgtttctctgtctgtttttaatgccggacgccgtatatttcattccaggcttcaaattgtttgcagtcctccgaggagacgcttttagatataacacgcaaagcctgcttgaaatcatccatagttacggcaggcagctaaaaacataacaataataaacaagacataaatatccccactatttaaagtcgctttggctcaacgaagcgataattttgttattggatgtgcagattcacggaatttaataagtatccttattccgcctgaaaaattcccagcacggtccaggtactttctttgtattcaattttgagcgactagtgcacgacataatttacaagcaagtaaacaacagtgcatacctgatgcgtttctatgacctccatttggtcaggtgtcaaggagcgaaggggagccatggatgcatagcggcaaagcgtatccacatcagctccagaatagccatcggtaagctctgccagctcgattacttgcctaacatctaggttgtgcttcacctgatgaattaacttttc

SEQ ID NO: 6116 - DNA, 2274 bp, DROSOPHILA
atgcatcattcgaccaaagtaccgagtaggattgtgctgattctcctgctggtgctagtacgcaatgccgttggtcaggctcccagggaaaacgccaccaatcccactctgatatccctggtccggagctcggaaaaggaaccggagcagatggagtcgcatcggtatgttaccggcttgtcggaacctatagcaatggaacccttaacaaggatgcgtctaaaccccaatcctgatggcgaaatcacagagctgaccacaaatgtcacgctctacatggagaaaataccacgcctacaggtgcgatggcaggataatttgccacaaggcacttcgtacaatgttcttgtaagcgcggtgaacaacagtcgttgtccggatgcgccgtgcagcgagtacggaatcaaagaaaagaatgcatctgcggagacccactccgtcaacctgcccgttaatcccaatctgaacgtggagtccgtggactgcaactacatgttcggctgccagtaccaggtcattgtggagacatccaacgcgatggtcagaagatctgctcgcgtctacattccacagtgcttagagggcaagtgctcttgccaactggcgcccactccgccaaaggtcctggccgtggccaaaatgcttagcaacgagaccatcagcatcaatctctcgattctggccagcgagctgttgcgcaaggaacaggactcccatctgcacgagacattgaggacatataaaatgcagctgaacgaacttaacttcagggcaactcccaaaggattcgagggcgtaatgaagttgggactgggcacgcaactcaaggagaaggcttccctcagcctgcaggctgtgattatcgatcctacgggctgcgagggaccacgcagtgtaaccaaggtgccagagcaactccataattgtgatgagcgccatgctgattgccattatcctagctggcctgattatgctgcttcttcgtcgccgaagagccaggacaacggccaagctgcgcaagcaggagcagatctacatccagaccttcgccacctccgccatagaaagtcacaggtcctgggactggcagacattttcgaagttccccactcggccatccaaattggccggatgttgggcgagggagcctttggccaggtgcacgaggccactgccatcaacttgcgccggatgaggggcaccaccatcgtagcagtgaagcaactgaaacccaatcccaaggcggatgaagtggctgagtacctggcagagatcgagatgctcaagggcgtgggcactcaccacaatgtggtctcttttctgggctgctgcaccattaagccgccatatctgatgataatggaatacgtaaacaagggaaacctgctaagctatttgcgaactgtgcgtaaggaggccagcaaactgaggaacagaaacgccaactacacttcctgcaggccgattatgaccaggaccaacagcacgtcctcgcccaagtcacaaagcgtgaactacatcgaattgaaggcgtccagccagaccattgaaatgccacaggaggactccactgctcacatgaatggcattcggcagcctcatccctcctttgccgaaagtaagcttgtagcactgggactaactagttgggcaaagtcagtgaatgagaatctaatttcagccacttacaccattgtcgaggacgaagatgcattcgagtacatattggataacaaggaattgcacaatttcgccctgcaaattgccaatgggatgcgtttcctggaagagcaggaaataacgcaccgcgacttggctgcacgcaacgtgcttattgacagcaataagacccttaaaatttcagatttcggcctttccaggcacggaatttacacgaacacaaggacccgaaagctccctcttcgatggctgtccattgaggcgattcgcgaaaatgtctattccagcaagagcgacatctgggcctatggcgtagtgctctgggagatcggcacccttggcgcctcgccatatccgacgatcagcaacgacgagctaataccattcctgatggctggcaatcgcctcgagcgtccagagatctgcactccgcaggtgtacaccatcatgctgcagtgctggcttgaggagcccgaggagcgacccaccttcgacgccctgtacaaggtgctcagtccaaagactacctacgtggacatcaacagtctgagtgatgattacgtctttccgccgatcagtgaaaatagggaataa

SEQ ID NO: 6117 - protein, 757 aa, DROSOPHILA
MHHSTKVPSRIVLILLLVLVRNAVGQAPRENATNPTLISLVRSSEKEPEQMESHRYVTGLSEPIAMEPLTRMRLNPNPDGEITELTTNVTLYMEKIPRLQVRWQDNLPQGTSYNVLVSAVNNSRCPDAPCSEYGIKEKNASAETHSVNLPVNPNLNVESVDCNYMFGCQYQVIVETSNAMVRRSARVYIPQCLEGKCSCQLAPTPPKVLAVAKMLSNETISINLSILASELLRKEQDSHLHETLRTYKMQLNELNFRATPKGFEGVMKLGLGTQLKEKASLSLQAVIIDPTGCEGPRSVTKVPEQLHNCDERHADCHYPSWPDYAASSSPKSQDNGQAAQAGADLHPDLRHLRHRKSQVLGLADIFEVPHSAIQIGRMLGEGAFGQVHEATAINLRRMRGTTIVAVKQLKPNPKADEVAEYLAEIEMLKGVGTHHNVVSFLGCCTIKPPYLMIMEYVNKGNLLSYLRTVRKEASKLRNRNANYTSCRPIMTRTNSTSSPKSQSVNYIELKASSQTIEMPQEDSTAHMNGIRQPHPSFAESKLVALGLTSWAKSVNENLISATYTIVEDEDAFEYILDNKELHNFALQIANGMRFLEEQEITHRDLAARNVLIDSNKTLKISDFGLSRHGIYTNTRTRKLPLRWLSIEAIRENVYSSKSDIWAYGVVLWEIGTLGASPYPTISNDELIPFLMAGNRLERPEICTPQVYTIMLQCWLEEPEERPTFDALYKVLSPKTTYVDINSLSDDYVFPPISENRE

SEQ ID NO: 6118 - DNA, 6102 bp, DROSOPHILA
aacatttaccatacgagttatgaacgcaacgcagcagcaaccacaaatacaaatacgcgtgcgtttatgtataatcaaaacaatccaacattatgtatatccgtacatacgatatctatgtaaagctcgagagagagacgcccaagttgtagatgagatgattgattttaatcgcaaacaaatcgcatcacaaacggagacgaaagatagatagaaaacaaaagtacacgacgctttgaccacacaaagttgtaaccatatcatgaggcctctttccccgtataattaattgtattttcgatagtgcttgttattttctatttagttaacgaattgattatacttacgaagcctttctgctgattaccgccagccacacttttgttagattagtgcctaagtctagttgatatcccaatgtataccccgacattttgtggctttttacacccaaaccttgtatagctactctatagcatttccgatttaattgaagctcccccattctaccattctagatgtacatctacatacatatgtgtacatccggtttaatcaatatatctcgatgaatttccttatattcaagacacaggcccccaaaacatttaagttaatcacagcgttgttcttgttttacacattattaaaattcagcaacataagaattttacatttaagtgaaagtttaaaacgttaactgtgtaagcatacttttatgaacaaaacaaaagcaacaaaaaaaaaagtaagaaaagaaaagaaaagagaacgaaaaatgaaatcaacaaacttcactaaaattaggtttgtattctggatacaaaaaaaaaaaaagagagaagcaaaatggcaattaaaagaaagaacacaatataaataaaatttgtatatttaataaaaatagcaaaataaaaataaacttcttttaaaaaatttacaaaaccatctttgtccatttaccagtttatttttaacaaacagccataaaaaagttacattagttaacaccccccatcaagttaaccacccggttcttgtaccgcttggatatatccttctcgatgtgagactgcagcgtgcgagtctgagcaatcagctcctccagcacgggattcaggtcctgccgctgctcccgcagctcgatggtcaactgcttgagcgcctctcgcgtggcgcgcagcttctccacggcctttgtcatttgctgcagcttggtggccagcatattggcatactttggggagtgcttcagctggaagaggtgctgcgtctgcttgtcggatgtctgctggattattttctccacggacacgagtatcttccagatgctctcaccgtcgtgggtggcaatgttgtccatcagcgagaacatgatgtcgctggaggattcaagctgcttgagctcgtagatacgcatgcgtagaaaggattccagttcgtagatttcgtccaggaagcgatcgcgatagttgggtgagtccagcaaagtgtaggcctgatcgcctggaacaacaaaccattaaccatcataaaatcgagtataataaaagaacttacccttggcagtgccgccatccatgccggtgccctccaccacgatgccgtactcctcgacgggaatgtcaaaattgatttccaccgcatcggtgggtgcactctcaatgccccagtcgatgttgccgccgtcgctttccggcaaatccccgctgccgaagtccccgtagtcgataatctcagccgaaacggtcgacgaagttccgccgttgtcatccgttccgaagtcaatctcggccacagcattgtcatccttgctggcgttgccctcgctgagatttagccgaatgggcggctcctcgacggccaagggtgcttccttgtggatgtactggtacacggtggtgttgccaaactccaccaggtggttcaggataggcagcacttgcttgttgccgctgacctccgcatacaggtcgatgcccggctgaatattggcaatgcccaccagcgacttatcgtatagttccggtagaccagatagaacctggacgaactcggcatgcagattgtcgcccttgacgcccagttgctccagcaaagccgagtggtcggccaggatttggctctcgggcttgttcagatcgtgcgctcgcttctgggtctcgtccgcctgctgctccagcctggccatctgctttcgcactccgggaatctcgtagttcacattgcgcacgaaaatctgagccgtttcggccaggtaggtggcattcttttcgtacaggcggctaatctcttgccagtccttcatgcgctggctgccgtaggtgccgaacacgctcttggtgtccttctccgtctgcttgaggatctcaatgatctccttcacatggtagtagttgatatctgcaagtgggacacattagtgggatggcattctgggcactgggcacctacttgtccgggccaacagcttgatcagctgctcattggagggcatgtcctgcagggcgttgctaatcttcctgtggatctccctaagctcctgctgcacattcttgggcacaattctgcggctgatcagccagtcctgcagcttcagcgtgtgtatgtcgatggggatctcggactcctgctcaaataaaatgctgatgagcgaaatattcccaaagatttcgttaataaagtgcttacattcattttaattaaatgtttgtccacgcagactgttttctattattttagcagctggcagtgtgaccagtctactgtaataaacaaagcggatacttcaaccatcataccttttttttccaattgaaaaattcaagacattcacactgtaaattttttaaattcaaaaacaatatttctgaatgtagctaaatgaaacatttaaattcaaaaaacttaattaaaatgtaaatagccaaaaatcccaccaatatgacaacaaaccgctcgtactttcaaataattcctattatacatatattttgttttcaaacaaaggtcaatcaaaaactaagcaatggtttccgcaaatcgatttccttaagcatttccgggcctaacccgaatagtcattggcaatagctgcgacatcggcatcgtcccggaacatttgcgccacttgggcgctgggcaggaccttctgtgagctaccggtcttcgtctttcgccagatgtcccactccaccggatgcattttcttcttgtgggagtgcatgttggcgttggagttgaaggtgcggggacagaagggacacttgtagagtggctcgccagtgtgctgcgccatatgctcctgcaaacatcaatcgctttaatacaacacataaataaataagggtaatatgtattatccaaccttaaggctgatgtccttcttgaaggttttgccacactgctcgcaggtgtagatcacattcgagtgggagtagcgcttatgaccaatcagcgcgcgggagttcttgcagctcttgccacactctgagcagataaacagcttgccctcgtcgttgtggcgcctcaaatgctgcttaagattgtcctcgtccttcagccagctctcgcagtcaggacgcgggcacttgatccgtggtccgctctcctcgaagtgcaggcgaacgtgcttttcgaagacagccttgtccttgatcttcttgccgcacacatggcagatattggccgccttgcggtgctgcatgctgatatggacctgcatgtggtactccgtggcaaaactgtggtgtgaaaggagaacgataagcattggaaacactgccgtttagctggcgaggctcacgcattgtgtttggggcactgcgggcagatgaacttgcgctcatttacgggcacatgggagcccttgtgcagttcgagcaggttgcgtcgcgagaagcgtttgccgcagtcctcgcactggaagtcgcactcctcgtctggaacatggtggaccagccagtgggcacgcaatacgctggaattggcgaacacctttccgcagtccttgcatctgtcggaaaggaaagctaattatcaaatcgcttcgaattggtttgggtaagagagacccacttgatgtactcgggattctcatgcctcctcgcatgctcctggatgaggcagcgcttgttgagcttgcgtccgcagcacttgatgtagggccgctcgtccggatgcttgtccttgaagtgctcgcggatgccgtcgaagtcctcggccaagaatatgcacagctcgcagcccatgactatgtagcgcttgatcagttcctcgtcctctttgcaaaacggcggcaggcgttccatcttgaatatcctcttgggcggtccccgcttgaccaccatcttctccttcccctttctgcccaccgacaccgttcctcttttcgttttagccggcttggccacgtcccgtttacgtttgcgtccactccgggtcacgatcaggtcgtcggtgtcatcatcctcgtcgtcctcgtagtcctcatcctgttcattgttggcatcctcaaagaggagttccatgtcgggtgactgtcgctctgttttgatgcccaccttgctgtcttccggggacatgggttggctaaggtctaactcgtccaggggattcacatttatctgcgcaccgacatcgttgtcgacggcaaggacgtcggccggcatgagcacctcctccggccaggaggtgttcaccatctccggatcctgcttgaacttggaggtggtggcgtatatcacctgggcctcctgtatggacacgtagaactgatggaactcggacacctgcgtccagcagacgttgcaaataaccttggatatctcgtcgttgggcagtacctgtacgcgttccggagacgagatggtggtaaaaaaagattcccaggcacaaaagtgggtggagggcagcagcttacctcgaaccagaaatgttggcgcagcacctccgccaccttgctctcgcccgagtccacatcgaagatctgtagacacatctgggcgccgctcactccgcgtaaacagaggcggcagatatccatttcgcatttatttgataaaactataataaaaagtagtcatttacatagctctgtcgataactcccatcgcaactatcggctgcatcgtgatttgttcgctgttcattctgtgcactggttgtacgacgtcggtcacactggcaaattgttggttttcctattttcgtatttgctgataatgtgcatattgtgtggaaaagatgagtaaacaagggaataaaagcaaggattcggctgccgcatccgccactttaaaagtaaaggtgtcctgtgtagccggaaaaacgagcctaacatttttcggtcttgttttcagcggataagcgaaaagaagttggaggccttcacggtgggcaccttctccaaacgacaattgtccaaaaaagagctcgaggaccagaaaaaaaaggaggatgcagctgctgcggcacatgtaggcgcctctagcaaatccctcctccacgcattataatccaatacgatttttaggccttcaaagagttcgtagagactttccaagatgcacccaccccctcctcgaaagtttgggtcaaagccggcacctatgatgcaggatcccggcgggaggacaagtcggagaagggcaagctatacaagccggtctccaagctgatggaaaagagctcctcggacaaggtcgaggattacgccaagaccctggcctcggatctcaaaaaggactcgggtccattgaagaagaaaaaccaggagaagaaaaagagcaacttggagctgttcaaggaggaattgagacagtaggcccacttggttgtgcatgtgtgtattccatactaattgtttcatgcccacaggattcaagaggagcgtgaggagcgccacaagtacaagcacatggcctcaagccattccgcaccagcacagcaaccggctgcatcagctgctcctgtgcccagcagcagtgtctccaccacctcccagaactcaagcagctcaaaggagtctggttcgtttgacacgggcgatccaaataccacaaacctgtacctgggcaacctgaaccccaagatatccgagca

SEQ ID NO: 6119 - DNA, 3439 bp, DROSOPHILA
atcgacagagctatgtaaatgactactttttattatagttttatcaaataaatgcgaaatggatatctgccgcctctgtttacgcggagtgagcggcgcccagatgtgtctacagatcttcgatgtggactcgggcgagagcaaggtggcggaggtgctgcgccaacatttctggttcgaggtactgcccaacgacgagatatccaaggttatttgcaacgtctgctggacgcaggtgtccgagttccatcagttctacgtgtccatacaggaggcccaggtgatatacgccaccacctccaagttcaagcaggatccggagatggtgaacacctcctggccggaggaggtgctcatgccggccgacgtccttgccgtcgacaacgatgtcggtgcgcagataaatgtgaatcccctggacgagttagaccttagccaacccatgtccccggaagacagcaaggtgggcatcaaaacagagcgacagtcacccgacatggaactcctctttgaggatgccaacaatgaacaggatgaggactacgaggacgacgaggatgatgacaccgacgacctgatcgtgacccggagtggacgcaaacgtaaacgggacgtggccaagccggctaaaacgaaaagaggaacggtgtcggtgggcagaaaggggaaggagaagatggtggtcaagcggggaccgcccaagaggatattcaagatggaacgcctgccgccgttttgcaaagaggacgaggaactgatcaagcgctacatagtcatgggctgcgagctgtgcatattcttggccgaggacttcgacggcatccgcgagcacttcaaggacaagcatccggacgagcggccctacatcaagtgctgcggacgcaagctcaacaagcgctgcctcatccaggagcatgcgaggaggcatgagaatcccgagtacatcaaatgcaaggactgcggaaaggtgttcgccaattccagcgtattgcgtgcccactggctggtccaccatgttccagacgaggagtgcgacttccagtgcgaggactgcggcaaacgcttctcgcgacgcaacctgctcgaactgcacaagggctcccatgtgcccgtaaatgagcgcaagttcatctgcccgcagtgccccaaacacaatgcttttgccacggagtaccacatgcaggtccatatcagcatgcagcaccgcaaggcggccaatatctgccatgtgtgcggcaagaagatcaaggacaaggctgtcttcgaaaagcacgttcgcctgcacttcgaggagagcggaccacggatcaagtgcccgcgtcctgactgcgagagctggctgaaggacgaggacaatcttaagcagcatttgaggcgccacaacgacgagggcaagctgtttatctgctcagagtgtggcaagagctgcaagaactcccgcgcgctgattggtcataagcgctactcccactcgaatgtgatctacacctgcgagcagtgtggcaaaaccttcaagaaggacatcagccttaaggagcatatggcgcagcacactggcgagccactctacaagtgtcccttctgtccccgcaccttcaactccaacgccaacatgcactcccacaagaagaaaatgcatccggtggagtgggacatctggcgaaagacgaagaccggtagctcacagaaggtcctgcccagcgcccaagtggcgcaaatgttccgggacgatgccgatgtcgcagctattgccaatgactattcgggttaggcccggaaatgcttaaggaaatcgatttgcggaaaccattgcttagtttttgattgacctttgtttgaaaacaaaatatatgtataataggaattatttgaaagtaaaacagtctgcgtggacaaacatttaattaaaatgaatgagtccgagatccccatcgacatacacacgctgaagctgcaggactggctgatcagccgcagaattgtgcccaagaatgtgcagcaggagcttagggagatccacaggaagattagcaacgccctgcaggacatgccctccaatgagcagctgatcaagctgttggcccggacaaatatcaactactaccatgtgaaggagatcattgagatcctcaagcagacggagaaggacaccaagagcgtgttcggcacctacggcagccagcgcatgaaggactggcaagagattagccgcctgtacgaaaagaatgccacctacctggccgaaacggctcagattttcgtgcgcaatgtgaactacgagattcccggagtgcgaaagcagatggccaggctggagcagcaggcggacgagacccagaagcgagcgcacgatctgaacaagcccgagagccaaatcctggccgaccactcggctttgctggagcaactgggcgtcaagggcgacaatctgcatgccgagttcgtccaggttctatctggtctaccggaactatacgataagtcgctggtgggcattgccaatattcagccgggcatcgacctgtatgcggaggtcagcggcaacaagcaagtgctgcctatcctgaaccacctggtggagtttggcaacaccaccgtgtaccagtacatccacaaggaagcacccttggccgtcgaggagccgcccattcggctaaatctcagcgagggcaacgccagcaaggatgacaatgctgtggccgagattgacttcggaacggatgacaacggcggaacttcgtcgaccgtttcggctgagattatcgactacggggacttcggcagcggggatttgccggaaagcgacggcggcaacatcgactggggcattgagagtgcacccaccgatgcggtggaaatcaattttgacattcccgtcgaggagtacggcatcgtggtggagggcaccggcatggatggcggcactgccaagggcgatcaggcctacactttgctggactcacccaactatcgcgatcgcttcctggacgaaatctacgaactggaatcctttctacgcatgcgtatctacgagctcaagcagcttgaatcctccagcgacatcatgttctcgctgatggacaacattgccacccacgacggtgagagcatctggaagatactcgtgtccgtggagaaaataatccagcagacatccgacaagcagacgcagcacctcttccagctgaagcactccccaaagtatgccaatatgctggccaccaagctgcagcaaatgacaaaggccgtggagaagctgcgcgccacgcgagaggcgctcaagcagttgaccatcgagctgcgggagcagcggcaggacctgaatcccgtgctggaggagctgattgctcagactcgcacgctgcagtctcacatcgagaaggatatatccaagcggtacaagaaccgggtggttaacttgatggggggtgttaactaa

SEQ ID NO: 6120 - protein, 570 aa, DROSOPHILA
MDICRLCLRGVSGAQMCLQIFDVDSGESKVAEVLRQHFWFEVLPNDEISKVICNVCWTQVSEFHQFYVSIQEAQVIYATTSKFKQDPEMVNTSWPEEVLMPADVLAVDNDVGAQINVNPLDELDLSQPMSPEDSKVGIKTERQSPDMELLFEDANNEQDEDYEDDEDDDTDDLIVTRSGRKRKRDVAKPAKTKRGTVSVGRKGKEKMVVKRGPPKRIFKMERLPPFCKEDEELIKRYIVMGCELCIFLAEDFDGIREHFKDKHPDERPYIKCCGRKLNKRCLIQEHARRHENPEYIKCKDCGKVFANSSVLRAHWLVHHVPDEECDFQCEDCGKRFSRRNLLELHKGSHVPVNERKFICPQCPKHNAFATEYHMQVHISMQHRKAANICHVCGKKIKDKAVFEKHVRLHFEESGPRIKCPRPDCESWLKDEDNLKQHLRRHNDEGKLFICSECGKSCKNSRALIGHKRYSHSNVIYTCEQCGKTFKKDISLKEHMAQHTGEPLYKCPFCPRTFNSNANMHSHKKKMHPVEWDIWRKTKTGSSQKVLPSAQVAQMFRDDADVAAIANDYSG

SEQ ID NO: 6121 - DNA, 5972 bp, DROSOPHILA
tgtggcgatgataacgattaccaacaagtaattttattcgtataactttcgattagagcaaaacataactcatttccaatatacatacatatctccgccatcaaatatctaaaacactgagactttaaagtagtttttttaggttttaagcatagtttcgaatgtgatatgatttcgtgattcacacagaaagccgtcgagctgagatcacaacagagaatgaactgtgcttgatatagtcactgtatagttatagttatatatcttctatataggtggtgccctccccgatgtcccttgcatgatatggtcaaattaaagaattaagtctagaatatagcatagttagtcgaatatagttatcatacatatatatatcgtatatagtcagcaaattgtgtttgtggcaaattgtacgttttctctttgatagcgaaatcggatatgtagaccctataagggtggccatataacaaactctaaactctctctgccctttttcgacaaaaaaaaaaaaaaaaaccaaaaccaaaccaaagaagaaaggcaatggaaaacaataatcgcgtatatatgtatatggccacatgctaatgaagttatgcggaaatatttccattgatttcgcccattttttttaatgcatttctatagctttctgcttgaatgaaaccgcgcatccagcgtcgagttttacctagtattgctattttcctattttcattttccttgttgtggttgctttgcattatagtttttcggttttgtttttttttttttttgttttatcttcaaacagtctttgggacgaccatataggagtgttttgatatcgacgccgcatctaacatcggtgagtgcttacttattgtccatatttacatcgagattcaattatatatatttcatcattcgtatcatattcggtttgggttcggtcaagaattcatttggttttattgtcgttgttgtcaacttatcattggtatcctgtgcgtgtctactcctcctcttccagcgacttttcgggtagtccgtactttgggcaacacatgccctccgtaccgtccatgttgaagcagaaaatgctgcgctccagttcggttggttcgtgtggcacgatgccgtggacttcccttagctccgcttcgggaaaccaggcgggatccgagtcttccaccaccttgattccgcacagactgaaatacgaaatatgtgtgtgtgaaatcataagacataagtcataggctggctaattaccgcagcaccgccacaattggtatccacagaatggatgagagtataaggaagaaggcaacgacaatgcaccagtgcggccactccatgccctcagtggctcccttcgatccaatccaggcaggatagctactgccctcggtcaaaagttgatagaaggaggccagcagaatggtgaccattgcacagggcgataggtacttccagcagaacatccagtagaaattcggacgcgaaccggtcatcatctcaatatcgtccgagaaacggcgtaccccatagatgtagctaatcgaaaggcattcgaagagcgcaatgatcagcagcgggaaattgcctgcaaagctgtccatcaattgaaatatatagctcccggctccattggcaaagcacatggagattgtgcagcaggaaaagcagagtgcctgcaaaagaaatgaaatttcaattgattattaaattcactaggaaaaacatcaataaatcagagtaaagaagttgagaaataagaatggctcacccccactatatattccttgggcaggttgggaaaaagtttcatgtccaccagggatgtgaccacgccctccagcgtaccgaattgcgagtcgattcccagggtaaagagcatcagaaaaaataggacagcccagagttgtgcacccggaaactgattgatcgcctccgtgaagatgatgaaggccagacctgttccggaagcactctgaaatggtaaatatatatatgtatatattccgtgtaagcatatagcaagtgaactcacattggccaattccgtttgaagatcgcagacaggcaggttgtgcgtcttgttctgggccacaagcccattacgctcctcagtgcagcgatcaaaggtcgccgtggccttaaacccaatgacagagaataccaccactccggcaaacatggatgtgccacaattggtgagcgatacgagtatggcgtccctgtagcaattattattcgccggattgtacgaactgaaggctatcagaccgccaaaggccaatcccagcgagaagaagatctgtgtgccggcctccagccaaacgactggatccaatagagtttcccatcgtggggtaaacaagtgtgccaccccatctgcagcacccttcaaggtgatgccccgaaaaaaaaatattataagcaccacataggggaatatggccgtcatatagacgatcttgccggatgacgtgatgccctggaccatgcagatgtagaccaaaaaccaggagacaattagcgcaatggccatgtggtaattgaagttctccggcatatccacactctccgagcactgcaatgtggtgcgataccaatagaactgcgtcggagatgaggccacacactccggttcgtggtcgtaggtaaaattcttatacaacctcgtcggacagtccgcccagggtaatggcgattcgaaactgtgtagcagatagatcaggcaccaggcaatgatagtgttatagtacaacgccactatatagctgaccaccgccgatgagataccaatgccgcctagatacggcgatacttggctccaaacgccgatggctccttttcgcagtcgctggccaattgccagttccagatagaagatcggtatgccctggatgcacagcattatgaagtagggcaccaggaaggcaccgccgccattcttctgcgccaaatagggaaaacgccacacatttcccaggccaacggcatagctgtgcaaaaatttagaaaaatttacgaattaaatggttattaacgttggcctatttggctatgaaacatacccgatggtggccagcaagaacataatcttgctgtcccaactctctcgctcctcgccctccttctcgccctcgacgatatcctgctgatccgcagaggcagtcgcaatggccaccagttcggccttggccttcgaagtgctagcctcggatccgaagggcggcggatcctgttccagttccgaggactcgtcgaaggcgtcggacatgaagccctgattggtggccccatagagcggctggtggtgtaatgatgtgtggtgatggtggctgacgccatgctcctttgacaccaggcgacctcggagttcctagaaaatttaactgatttcagtaatctcgccgaaaagattagtcgaaatacccaaagtgaatacattttattaataggttattttgttattaacttcatttttacgcttcctgtcctgtggacttacccgcaattccagctgatcgatgctcttctggcttttgaggattatatcccgggagctttggcgtcgcaatagctgagctgtgttggccatgattgtgttttattattatttcaatttattacagggtatttttagatgtacgagtgggtgctgttgggtgcgggtatgtgtgtgggtgcctaaaagtgctctaagtccgtgcttccgcttctcgaattgtcctttgatttcactttcctcggcgccacctagtgttgcgttggtgtaactagcaactcattggacatttttcgtagcatacttttttggttggatgtataaatcgcgcattattattatccccttgctgcgcgttcagttaacttttagcttattgtttttttcttttcttttctatggcttggtggtgcttttgttagtgcttaattgcaggtgataacggtgcattagtagtagacgccatcgcagtgccgctggctgctttttctagtggaatacgtattactaataactgtacttagcatgcatgcacagaggaaaatgggaatggaaaatgaattcagttaaaaaaaaatatatatatatatatattttgaaaagtaatatatataaaatctatttcaaaaacaaatttagaatttttaattacttaatcgctgaaatgattgttgacaaccgtttataacgaaaatgtgctatttaattgatttcttaaacataatcaataaagagaacaacagttctctgaatttagatacggatatttgaacatatgtctattgccgcttataaacaattttaaatagctggttttttttttgaccgtgtgctttccatcaatcaaatcatgcaaaaggaaaaacccacaccacagcaggacatgtgcgtggtttgcgtgtctaggtccacacaataaatcaatcaaaatgagtcctgcccaacaaacccaccgcccactgaacactttccgcccacttactaatgcagcttaatggaattcactttctttttggccctgcaattagtgtaggctgtgtttcccagggcgatggatgtacgggaaaataactttacaacgctgccatggagacctacaattattactctatatgagcatgctatttgggttactgattttgggaaacttcgacgtgcagagagcattacttttgtatgtggccttctgaaagacgatttatattcgtttagactggcttttttatttgctcactgaaatctcacttatataaccgaagcaaacactcgcgaaaaattgaagtcgcacttaaacaaacagcaaggtaaggaagggagtccaacaaaggggagcgatgggcgcgagggctattgttcgattatccttggattaacagttgcaggtggttgcattaaaacctatttaaaggacgattccgtcgctcctttcgctatcccgtgattctgattgggataacgtaacgctgtgtcgtaacgggacgttggcaggaaactgttgagcagcaaaaggacgtaatagccgaatggcaggacgaaaaggatagcggttaacgggggaggcgacagcgggagagcaaggaagcaaaaagaaaagagtagcgcagacgcggcacgcggcacgcgaatccaaaagagagggaagatggtaaacaaaagagggagaaacataatgcgaaaaaaaattcacattttcgacgaaatcagctattttgtattttaccatctctaaggcccaaaatcaagtaactcaattttaagatatatcgaattattcatttgattgattacgccaattgcaacattcaattcaagtgccgttagaaaaaaaagcgttagtgatttttcaaaaaatgaactggtcatcagaaagtgttatcgatgttgaacttcgtgttagcagtgattgcaattcacatagtgacaaaaactaatggaaaaaatattcaaaaccacaaaccatacaaacttttaattgggaaatgtgtgtgtcagtaaaatgatttaattgccacaatgaaattaatataatgaaagccatactgtgactgcctcaatgcgaatttgtgttcatctctgaaatgaactagcggtgaactagccgtcctaatgaacacttgccgacataccctctcataaattgtttatgatttcgatacgtgaacggggaattgcgtggattcatagaaacgatggtgttcaagtgccaggaggacagtttcctgaaggaggtgagccctcaaatgaagcgcaaagtaccaaattacataatttgtgatataatttgcggcagttcaagacaaaaatcgttagcagcgagtttgccaccttggattggacagatcccagtggaaaggtggagaaactcaagggcttcaatgtgatctgcgaggacacgatactatttcccgagggcggtggtcagccctgcgattacggaaccttaggcggatttccagttaagaatgtc

SEQ ID NO: 6122 - DNA, 2465 bp, DROSOPHILA
acagcgttacgttatcccaatcagaatcacgggatagcgaaaggagcgacggaatcgtcctttaaataggttttaatgcaaccacctgcaactgttaatccaaggataatcgaacaatagccctcgcgcccatcgctcccctttgttggactcccttccttaccttgctgtttgtttaagtgcgacttcaatttttcgcgagtgtttgcttcggttatataagtgagatttcagtgagcaaataaaaaagccagtctaaacgaatataaatcgtctttcagaaggccacatacaaaactcagctattgcgacgccaaagctcccgggatataatcctcaaaagccagaagagcatcgatcagctggaattgcgggaactccgaggtcgcctggtgtcaaaggagcatggcgtcagccaccatcaccacacatcattacaccaccagccgctctatggggccaccaatcagggcttcatgtccgacgccttcgacgagtcctcggaactggaacaggatccgccgcccttcggatccgaggctagcacttcgaaggccaaggccgaactggtggccattgcgactgcctctgcggatcagcaggatatcgtcgagggcgagaaggagggcgaggagcgagagagttgggacagcaagattatgttcttgctggccaccatcggctatgccgttggcctgggaaatgtgtggcgttttccctatttggcgcagaagaatggcggcggtgccttcctggtgccctacttcataatgctgtgcatccagggcataccgatcttctatctggaactggcaattggccagcgactgcgaaaaggagccatcggcgtttggagccaagtatcgccgtatctaggcggcattggtatctcatcggcggtggtcagctatatagtggcgttgtactataacactatcattgcctggtgcctgatctatctgctacacagtttcgaatcgccattaccctgggcggactgtccgacgaggttgtataagaattttacctacgaccacgaaccggagtgtgtggcctcatctccgacgcagttctattggtatcgcaccacattgcagtgctcggagagtgtggatatgccggagaacttcaattaccacatggccattgcgctaattgtctcctggtttttggtctacatctgcatggtccagggcatcacgtcatccggcaagatcgtctatatgacggccatattcccctatgtggtgcttataatatttttttttcggggcatcaccttgaagggtgctgcagatggggtggcacacttgtttaccccacgatgggaaactctattggatccagtcgtttggctggaggccggcacacagatcttcttctcgctgggattggcctttggcggtctgatagccttcagttcgtacaatccggcgaataataattgctacagggacgccatactcgtatcgctcaccaattgtggcacatccatgtttgccggagtggtggtattctctgtcattgggtttaaggccacggcgacctttgatcgctgcactgaggagcgtaatgggcttgtggcccagaacaagacgcacaacctgcctgtctgcgatcttcaaacggaattggccaatagtgcttccggaacaggtctggccttcatcatcttcacggaggcgatcaatcagtttccgggtgcacaactctgggctgtcctattttttctgatgctctttaccctgggaatcgactcgcaattcggtacgctggagggcgtggtcacatccctggtggacatgaaactttttcccaacctgcccaaggaatatatagtgggggcactctgcttttcctgctgcacaatctccatgtgctttgccaatggagccgggagctatatatttcaattgatggacagctttgcaggcaatttcccgctgctgatcattgcgctcttcgaatgcctttcgattagctacatctatggggtacgccgtttctcggacgatattgagatgatgaccggttcgcgtccgaatttctactggatgttctgctggaagtacctatcgccctgtgcaatggtcaccattctgctggcctccttctatcaacttttgaccgagggcagtagctatcctgcctggattggatcgaagggagccactgagggcatggagtggccgcactggtgcattgtcgttgccttcttccttatactctcatccattctgtggataccaattgtggcggtgctgcgtctgtgcggaatcaaggtggtggaagactcggatcccgcctggtttcccgaagcggagctaagggaagtccacggcatcgtgccacacgaaccaaccgaactggagcgcagcattttctgcttcaacatggacggtacggagggcatgtgttgcccaaagtacggactacccgaaaagtcgctggaagaggaggagtag

SEQ ID NO: 6123 - protein, 662 aa, DROSOPHILA
MSDAFDESSELEQDPPPFGSEASTSKAKAELVAIATASADQQDIVEGEKEGEERESWDSKIMFLLATIGYAVGLGNVWRFPYLAQKNGGGAFLVPYFIMLCIQGIPIFYLELAIGQRLRKGAIGVWSQVSPYLGGIGISSAVVSYIVALYYNTIIAWCLIYLLHSFESPLPWADCPTRLYKNFTYDHEPECVASSPTQFYWYRTTLQCSESVDMPENFNYHMAIALIVSWFLVYICMVQGITSSGKIVYMTAIFPYVVLIIFFFRGITLKGAADGVAHLFTPRWETLLDPVVWLEAGTQIFFSLGLAFGGLIAFSSYNPANNNCYRDAILVSLTNCGTSMFAGVVVFSVIGFKATATFDRCTEERNGLVAQNKTHNLPVCDLQTELANSASGTGLAFIIFTEAINQFPGAQLWAVLFFLMLFTLGIDSQFGTLEGVVTSLVDMKLFPNLPKEYIVGALCFSCCTISMCFANGAGSYIFQLMDSFAGNFPLLIIALFECLSISYIYGVRRFSDDIEMMTGSRPNFYWMFCWKYLSPCAMVTILLASFYQLLTEGSSYPAWIGSKGATEGMEWPHWCIVVAFFLILSSILWIPIVAVLRLCGIKVVEDSDPAWFPEAELREVHGIVPHEPTELERSIFCFNMDGTEGMCCPKYGLPEKSLEEEE

SEQ ID NO: 6124 - DNA, 3361 bp, DROSOPHILA
ccggaatccagccttcggtggcaactttagtggctgccagtgtttgctctaacattgaaaaagttttttccaccgctttcttcgcaggcatcggctcataaaacgaactgcagacccacttgcctttcacttcacctgggctttccatttctaggtgcgaatgacaaaggggcgaggctgggcggtgcggaagagcccgcaaacttttcccaacaacaaaaggtcactgaacaattgacaaaggcggcgtgctgctgtctcaggacttgccaaacgccatttaaaaagttttgcataatagttggcccacgatctcgcgaagtacccgccagggcagaatttctccaatgccagaacaatatagccattaaaatcataaaaaaaaaacaaagacaatgttatagtcgagttcaccggctatcagatacccgttactcagtgatatttttcggcatatgtatagaaatcgcaaagataattagtgaagtaggtaaaatctacctgtttaacttttaagcattagcaataactcaacgttcgtgcggagcacggctagatatccttcctaaggagacgattccttctacctgtatactttttagagaatctagtaccctatgaaaaccctcttaccgttatagtatgttctaacatcaactttactgactggccattatttcactgaaatcattcgattatttttaagtcttagtaccttatgttgggaatataatcatattgtggttaagttgatttttatacaaagtgattaggcacgattaagccaactccaacaatgtttattgttttaacttactttcggaagaagctgtagcataataataataattaattgttataataatttgttagttttatcaaacaagtgttttcctagtttaaatagaaattaaattcaaaggtgcaaatacgttacaggctgtgtgaccagtgcgcgcatggtatattttagtgcgttccccaacactcgaagccgccacggccacactgcaccctcagtttcgtgcaactttttgtacgcaaataagaaaaacattaaatttgctctcagcaaatcgataattgcaaacgcagtgccgtttcaattgcagcacaaaccgcaacgaaaatgttggcgaccgaggcgagacagatcctgagccgcgtgggatccctggtggccaggaaccaggtgagtggagtgcgcggtggcccagggctcttctggccaagatttcaggggcgtggtggggcgggggcgcaggcggcttttgtgtagtgcaattatataaggtggaagtggggaagtagggggtccgggatagaaacgccacagataagcacgcgaaatgcactccgtaattgggggaactgccaactggcagaggctgttatgtaaacctttttttcagcggcacctgaattggataaaatgggtaatggcgtgattctccgaacttgcagatgcgcgccatcagcaatggcaccgcccagctggagcagcaggcgcagcccaaggaggcccaggagccgcagatcaagaagttcgagatctaccgctggaacccggacaacgccggcgagaagccgtacatgcagacctacgaggtggacctgcgcgagtgcggccccatggtgctggacgcgctgatcaagatcaagaacgagatggaccccacgctcacctttaggcgctcctgtcgcgagggcatctgcggctcctgcgccatgaacatcggcggcaccaacacgctggcctgcatcagcaagatcgacatcaacacctccaagtcgctgaaggtgtacccgctgccccatatgtacgtggtgcgcgacctggtcccggacatgaacaacttctacgagcagtaccgcaacatccagccctggctgcagcgcaagtgagtgggagcaatccctacgagctggaacgttactaataccacgccctttgcaggaacgaagcgggcgagaagaagggcaaggcccagtacctgcagtccgtcgaggatcgctccaagttggacggcctgtacgagtgcatcctgtgcgcctgctgctccacctcgtgcccctcgtactggtggaacgccgagaagtacctgggccccgccgtgctgatgcaggcctaccgctggatcatcgactcgcgtgacgagaactccgccgagcgtctgaacaagttgaaggaccccttcagcgtctaccggtgccacacgatcatgaactgcacgcgcacctgccccaaggggctcaatcccggccgtgccatcgccgagatcaagaagctgctctcgggcctggcctccaagccggctccgaagctggagacggcggcgctgcacaagtagggcccaagtcctctactcccagttcgtcccctgctgtccttaaccagtgagctaagcctccgaaaatgtgtattggagactcctccagccaacatgcttactatgttataatttatttaagcctaaagtatccgacacttgttattacagtttgtaaagggaacaagacgcgaaaataaataattgtgtatccaccagccgggcgacattgtgatgggcaatcagggcactcccattcatttagggggctgtgggtgaggtctcgtcgttcatctgaatgtcgtcggcggagtaaaagtcctgggttaccgggatgacgcggtcgttggtctcgtcatcctcctcatcgtgactgtccgtgtcctcgctgtcgtcgttggctgcacaagggcaattggacgtaaaaacgataatggtaatccgaatgcagtgtcctgccgtactcaccatcctcgtcgtcggtctcaattccgggtatggtgagcattttgcccagcggctgcagatctgtgccggccgtcttaagggactctcgctgtacggtttaagtttataacaatttatacagaaagcggtgtctggagagaactcacccagttgctcctttcatcctcataacgccgcgtctgcgattcttcgtttacggaggcaggagccatgtccaaccagtagcgattggccacggagactttgagcgtgggaaagaatggaatcattgacattttcgacggaatcttgaatgcgctgttttcaatatttgttgttctttctctggaagcctttgatgcgatctggcaacgccgcaacatacgctgtaaataataccaattttacaggggcgtagtcgtaggggcgcattaaacgcaaattacaatattaattgtaattgtaattcatcaatctaactatgtattttgttattgtcaagggaagtccgataaccaagggcttaatacagcttactcaaaaatatatatcttcactattacaaattgaccttaagaatcaga

SEQ ID NO: 6125 - DNA, 1033 bp, DROSOPHILA
cggccacactgcaccctcagtttcgtgcaactttttgtacgcaaataagaaaaacattaaatttgctctcagcaaatcgataattgcaaacgcagtgccgtttcaattgcagcacaaaccgcaacgaaaatgttggcgaccgaggcgagacagatcctgagccgcgtgggatccctggtggccaggaaccagatgcgcgccatcagcaatggcaccgcccagctggagcagcaggcgcagcccaaggaggcccaggagccgcagatcaagaagttcgagatctaccgctggaacccggacaacgccggcgagaagccgtacatgcagacctacgaggtggacctgcgcgagtgcggccccatggtgctggacgcgctgatcaagatcaagaacgagatggaccccacgctcacctttaggcgctcctgtcgcgagggcatctgcggctcctgcgccatgaacatcggcggcaccaacacgctggcctgcatcagcaagatcgacatcaacacctccaagtcgctgaaggtgtacccgctgccccatatgtacgtggtgcgcgacctggtcccggacatgaacaacttctacgagcagtaccgcaacatccagccctggctgcagcgcaagaacgaagcgggcgagaagaagggcaaggcccagtacctgcagtccgtcgaggatcgctccaagttggacggcctgtacgagtgcatcctgtgcgcctgctgctccacctcgtgcccctcgtactggtggaacgccgagaagtacctgggccccgccgtgctgatgcaggcctaccgctggatcatcgactcgcgtgacgagaactccgccgagcgtctgaacaagttgaaggaccccttcagcgtctaccggtgccacacgatcatgaactgcacgcgcacctgccccaaggggctcaatcccggccgtgccatcgccgagatcaagaagctgctctcgggcctggcctccaagccggctccgaagctggagacggcggcgctgcacaagtagggcccaagtc

SEQ ID NO: 6126 - protein, 297 aa, DROSOPHILA
MLATEARQILSRVGSLVARNQMRAISNGTAQLEQQAQPKEAQEPQIKKFEIYRWNPDNAGEKPYMQTYEVDLRECGPMVLDALIKIKNEMDPTLTFRRSCREGICGSCAMNIGGTNTLACISKIDINTSKSLKVYPLPHMYVVRDLVPDMNNFYEQYRNIQPWLQRKNEAGEKKGKAQYLQSVEDRSKLDGLYECILCACCSTSCPSYWWNAEKYLGPAVLMQAYRWIIDSRDENSAERLNKLKDPFSVYRCHTIMNCTRTCPKGLNPGRAIAEIKKLLSGLASKPAPKLETAALHK

SEQ ID NO: 6127 - DNA, 3729 bp, DROSOPHILA
aacgataaaggtgctgcttgttttgttaatgtcattatttataaacatgatggtccactgttaatgatatctggcacgttctcaggtggtttcctcctccgcagggattcatatgatatgtaagatatattcaagtgttacaatacaactaaaaatatattcaactaacaaaaatttctcttgaaaagagagaaaatgtgtaggcttatgactgtctttatttatgtagacactccgggattatccgactagacagtgttattttcattcagacatcaaattaagaactttttttaatcagtgaatatcaaaaccttttgtaactgctcgtatgaatcctggataagatccttggtgagcaggggaagtaaattgtattagccatgtttggttatgtttgatgctgcctttacttacatggcaagataagttaaaagataagtgtcaactatttcatcacggaattcgacgtaatctaagatgatttgatgcacgacttacttcgttccgtgttccgtgttaagtatatgtgattgtagactttttaccttcatgtctctgctgacagttggccctggagtccttatgggtaacccagtctcctatagctaccactggaagccaccgactatttttacctttccggtctgttacattattgagtttcctgtttctggagactccgcattacctcactccaaggaaaaagctaagcaatccttttggtcctaaacaaaaaaacagttgcagtgtctgtaggaaactaggaatttattattcgtttattccaacctaaaagagactaacattgtattccagaatattttcattacaaaatgaaataaatagaaaaatatctatgatagaaagtcttttcgagtgtattcactcaaggcaggcgtcataaaagtcaatggcttatcaggtttagataaaccggtcacgaaatatttaaggggaagttaagagcgtagatgaatctcgttcagtctggagaaagcatctcgaccatgacgttcaaattgcgcttagcctcggtcttcgccaatccgaattgtctattgggacgcaggattcgccaccagtttctggtcaccctgctgcgtaaggaaccaaatgcttcagagctgcatgattccagattcaagatcattacactccacagtgaacatagctaccttctcccatggcctgggcgtgggttggatgtcgccggtgatgagggacctgcagaccgatgagtcgccccttgattttcccgtcctcgtgagccaggtgtcctggatcggatcgctcgtgggcattggcagtgtgatgggcaatctgatcgccggattactcatggatcgcattggtcgcaagatggtccttttcttcattgcgattccctatacggtaagatgagccggcatttttggcgcaactatttcacaactctcgtattcgttgggtttcgtctagaccttttggtgcctgatttacttcgtccaaagtgtggagttcctgtacatcggacgactgatggccggcataactggtggtgcctgctacgtcgtccttccgaccttcataagcgaaatcgccgacaccaagtaagtctcaaagtgatgtgtgctatgattatactacgattaactaattgctcataaatctttgcagtgttcgcggtcgcctaggctccattatcttactatcggtgaacacgggtgttttggcgggctatatagtgtccacgagagtggattactttacgtctcccccgttcatcatcgggctgcccgtctgttattttatctgcaacttcctcattccggaaaccccacatcacctagttcgcaagggaaaattcgaagcggccaagaggtcgttcatgttctacaaaaacatcaggaaaaatgacatcaaggctgaggacgagttcgaagagatgaagtatctccttattaaggagcagacggagaaggccaagtccttcgactacagagatttcagtgagtagataaggcatcccattttatatatcaatttcactaatttccataatccttagtaaccagacctgcatttaaggcctacgcttctgccgctgtcctgcttattagcaatcaattcagtgccagtttttgtgtgaccacctacttggcggacgtctttgccgcatcccacacaactctgaatctgggcatgtgcaccatcatcatcggagtgctccagatcgtgggcaactacgtgaccactctgttgtgcgataagtacggaaggaggatactcatgctgacctccaccttgggagcctccgtttgcctaactgccttcggcaccttcaccttcttcgccgaggcggctgatctctcttcggttgactggttaccccttgtgatcttgtcctgcttcgtattcctctgcaacatcggcttggtgggatgcctattcgttgtgctcgtcgagctctttccggccaaggtaagtttggattactgtccccaaaaatgtaccctaaatataccgctatcgtttattttttctagattcgatctgtgagcgtctccacctttgtggtgatcctaagcagtacagtatttctcacactgaaaatctttcccatctgtatggctgtttggggcacctcggttaccatgtggagctgtagcggaattacgtttttctcgtttctctacttctgcttttttctggaggagaccaacggaaaatcgctactggcggcttagtttgtttactggaaagataatgggttatcacacttgtagcacctgtccgattagcctaagtcagtagttatctttacggtcagaggataccagccggatacttaagccgactcctcagcggaaaacccttttagtggtcagagatacgtggccagaggtagactgaataaagatcggggtggtattcttattcatatgtgaagtgaacaatcgaatttacgggtacataatgctgatgcgcttatttcaaaggccgaactgcctgcttaatcgcaggaatcgatatcagctgctaaccacgctgctgagtaagtattccattctcaccataaaggactcacattgaatgacatttatttcggactatatccagttaatgtcatatccatttcacacggcatcggtatcggatggctatcccccacgctgaggaaacttcagtccgactcacccgcgggtttcgaggtgaagtccgagttcgagatctcctgggtgggctccatgctgggcatgggctcggtgactggcaatatactgattgggtgcctgctggggcgcctgggcagcaaaaggtgtctgctgttaattgccataccacattcggtaatttgtcaaaatcgaacaaagggtattgcaaatgctgataatgtgtgtgcttttagtgcttttggatcctggtctactttgcccagagtgtggagtacctgtacgtgggaagactgttggctggcatctgtggcggcggcatgtacattgttcatcccattttactcagtgaaatcgcagatgccaagtaagtggataatttatggctgtcgcaaggggattttcacgatagctcgctggcaagagattagaatgaacctgaacgttacgacaggaaaagagctgaaatgtttatcacatgttagttatcacttactcatagcatcataaatcggtttactttcccccacagcatcagaggaaccttctctgccatggttatgctatcggtcaa

SEQ ID NO: 6128 - DNA, 1411 bp, DROSOPHILA
catctcgaccatgacgttcaaattgcgcttagcctcggtcttcgccaatccgaattgtctattgggacgcaggattcgccaccagtttctggtcaccctgctgctgaacatagctaccttctcccatggcctgggcgtgggttggatgtcgccggtgatgagggacctgcagaccgatgagtcgccccttgattttcccgtcctcgtgagccaggtgtcctggatcggatcgctcgtgggcattggcagtgtgatgggcaatctgatcgccggattactcatggatcgcattggtcgcaagatggtccttttcttcattgcgattccctatacgaccttttggtgcctgatttacttcgtccaaagtgtggagttcctgtacatcggacgactgatggccggcataactggtggtgcctgctacgtcgtccttccgaccttcataagcgaaatcgccgacaccaatgttcgcggtcgcctaggctccattatcttactatcggtgaacacgggtgttttggcgggctatatagtgtccacgagagtggattactttacgtctcccccgttcatcatcgggctgcccgtctgttattttatctgcaacttcctcattccggaaaccccacatcacctagttcgcaagggaaaattcgaagcggccaagaggtcgttcatgttctacaaaaacatcaggaaaaatgacatcaaggctgaggacgagttcgaagagatgaagtatctccttattaaggagcagacggagaaggccaagtccttcgactacagagatttcataaccagacctgcatttaaggcctacgcttctgccgctgtcctgcttattagcaatcaattcagtgccagtttttgtgtgaccacctacttggcggacgtctttgccgcatcccacacaactctgaatctgggcatgtgcaccatcatcatcggagtgctccagatcgtgggcaactacgtgaccactctgttgtgcgataagtacggaaggaggatactcatgctgacctccaccttgggagcctccgtttgcctaactgccttcggcaccttcaccttcttcgccgaggcggctgatctctcttcggttgactggttaccccttgtgatcttgtcctgcttcgtattcctctgcaacatcggcttggtgggatgcctattcgttgtgctcgtcgagctctttccggccaagattcgatctgtgagcgtctccacctttgtggtgatcctaagcagtacagtatttctcacactgaaaatctttcccatctgtatggctgtttggggcacctcggttaccatgtggagctgtagcggaattacgtttttctcgtttctctacttctgcttttttctggaggagaccaacggaaaatcgctactggcggcttag

SEQ ID NO: 6129 - protein, 466 aa, DROSOPHILA
MTFKLRLASVFANPNCLLGRRIRHQFLVTLLLNIATFSHGLGVGWMSPVMRDLQTDESPLDFPVLVSQVSWIGSLVGIGSVMGNLIAGLLMDRIGRKMVLFFIAIPYTTFWCLIYFVQSVEFLYIGRLMAGITGGACYVVLPTFISEIADTNVRGRLGSIILLSVNTGVLAGYIVSTRVDYFTSPPFIIGLPVCYFICNFLIPETPHHLVRKGKFEAAKRSFMFYKNIRKNDIKAEDEFEEMKYLLIKEQTEKAKSFDYRDFITRPAFKAYASAAVLLISNQFSASFCVTTYLADVFAASHTTLNLGMCTIIIGVLQIVGNYVTTLLCDKYGRRILMLTSTLGASVCLTAFGTFTFFAEAADLSSVDWLPLVILSCFVFLCNIGLVGCLFVVLVELFPAKIRSVSVSTFVVILSSTVFLTLKIFPICMAVWGTSVTMWSCSGITFFSFLYFCFFLEETNGKSLLAA

SEQ ID NO: 6130 - DNA, 2753 bp, DROSOPHILA
aaaagctgctaagaaaaaatggcgtcgcgctgttcgatctttacgatcgatcggccttggtgtgagcgagacaacactacctgcgcctgacgcacagaaaacgcaacaagttttcttctgaaataaaattgtatttcaaaggggtagcaaataattctaatacactcgcaaatccgtagcatacttttcaaatatttaatgtgattttgtgccggcgaaggacgtggaggatcggttttaaccacttattttgctgattagaagtgcacttttctgctccgcagcgaaagaaagtgactgccatcgccgataaagagcgtgaaattatcaagtcactggctaaggtatttgcttcacaaacatgtcctcatatcacgggatgcgttccttaaagggttttgaccgcatttccgataataaatcacaatttacctaattttatgctttaaattccaacacgacaagcgtttgtgtatgaaaattcagtgtgaccgttgcatgtaggttggaaaataccattaattacaacaacccgtgaaaaaataatctgaacatgccgccatgaaaagtacaaagaaatttcctctgttttgaatcttctgggttgtaaatttgtaataattccaacataaatttaaaataaatagccggtgtctggcttaatattatattaactttttattggttaactttgtaagcatagattaatgatccgaacaataaagcttatatggaacatttcactatttatatataatttcagtcgaaggccaccgcagccgttgctcggtaagataattatcaggtttaacattttatacaaaaagtaattgaataaaatacaaataaatgcattctttaatatgcattttgataaaataaaaaacaaaatatataagcatataattaaaatagcagtgctcacaagggttaaaggctagtatgttaatgaggtatacctatcccatgatctcggtatatttaagccgccttgccacggtcacactttcgccaattgcaacgataaaaaggtaaataaaagccgcattaactcacaaattgcaattaactagcaataattgtaagccaatagccatgacgactgcctttgatgccgcacacactgaggggccgggattcgtgggcattcggttctgccaggagtgcaacaacatgctgtaccccaaggaggacaaggagaacaagatcctgctgtacgcctgccggaattgcgattacaaacaggaggcggactccaactgcatctacgtgaacaagattatgcacgagatcgacgagctgacccacattgtgcccgacgtgatttccgatcccacgctgccgcgcaccgaagaccacgcttgtcccaagtgctcccatcgggaggcggtcttcttccaggcgcaaactcgtcgcgccgaagaggagatgcgactgtactacgtgtgcaccaaccagaactgcacccaccgttggacggagtagaaactgacgacccatctgcctctaattgtagccctaagtaatcgaaggcactttgcaatcgtacaattggaattcccccatggctatgccgcaaaaacatcccacgtgcagctccattctcggttgtcgcctaatgtaataacattcgcactgaaaaaaaatgcatgtgatccgcatgactttgaatcacttgcaagaacttcgatttggtttgtataaatgtttaaatagctcagtcttaaaaataaatatataagttcattgcgagaaaactgctgtatcatcttactatatgttttggcaaaactacttaatttcaatgatcaaatgttcaagtgcagttgagaaaacaacgaaagtgttccgggtttatgataaaatttagcaggttaagctgcatatttaggcaacataaactgcaaaaccagatttcatagttataaacttaatcaagtcagcccgcttgtattcaaatgtcttcattatttatttataaatgaatgtgtactatgactgacaatctatgaatgtaaaactgagcgagcaacgaatctccccgaggcatgtgcgaattccacagttcacggcccggtgacaattcttcatatttatcattgttctgctctaatcgaagctgacaacaaacaaaataaataaaaaaaataagaaccgaaagcgacgaagaaatgattgaacaagtttcttgtgcgtatcaaacgactgcccatttgagtatttgagtagtagacctggcttggcttggcccgatccccggaatcgtcgcttagtttagtctgagcttagaacctggcgcgacgtgttgatcaaatcgcttaaaatgtgctgctagagcaacctgccgagccagagacgtatcgaatcgaatagaatcgtataaaaaataagagttttgaggaattcagcaagtgctataaaaaaatggcaaagccaaggtcatcggcagatgcggctggaaatggcagtggagcagtggatgcagagcccaagctcaactatttccagaaactgtggcgctatcgccactatctggtcatcgagcccttcttctttttctacttcatggcctccgtgttcaatgcggtggccatgcagaatttcccactggacaaggcgtgtcgcgtgaatctcggctacaacaagatcgtctgcgacacaatgctggacaaatcggagctgggcatcgagtgcgatgactttgatttcgagaacaccacacagggcgcgacgccggatctcgctgaccttgt

SEQ ID NO: 6131 - DNA, 698 bp, DROSOPHILA
tcacactttcgccaattgcaacgataaaaagccaatagccatgacgactgcctttgatgccgcacacactgaggggccgggattcgtgggcattcggttctgccaggagtgcaacaacatgctgtaccccaaggaggacaaggagaacaagatcctgctgtacgcctgccggaattgcgattacaaacaggaggcggactccaactgcatctacgtgaacaagattatgcacgagatcgacgagctgacccacattgtgcccgacgtgatttccgatcccacgctgccgcgcaccgaagaccacgcttgtcccaagtgctcccatcgggaggcggtcttcttccaggcgcaaactcgtcgcgccgaagaggagatgcgactgtactacgtgtgcaccaaccagaactgcacccaccgttggacggagtagaaactgacgacccatctgcctctaattgtagccctaagtaatcgaaggcactttgcaatcgtacaattggaattcccccatggctatgccgcaaaaacatcccacgtgcagctccattctcggttgtcgcctaatgtaataacattcgcactgaaaaaaaatgcatgtgatccgcatgactttgaatcacttgcaagaacttcgatttggtttgtataaatgtttaaatagctcagtcttaaaaataaatatataagttcattgcgag

SEQ ID NO: 6132 - protein, 129 aa, DROSOPHILA
MTTAFDAAHTEGPGFVGIRFCQECNNMLYPKEDKENKILLYACRNCDYKQEADSNCIYVNKIMHEIDELTHIVPDVISDPTLPRTEDHACPKCSHREAVFFQAQTRRAEEEMRLYYVCTNQNCTHRWTE

SEQ ID NO: 6133 - DNA, 11296 bp, DROSOPHILA
atcgcaagaacagctcggagtccattgaactgatgttctacgccccatccatgctatccggcggtagccaacaggatcaacaatcgctggctggttccgccagcgttagcaagtccattcggagtacaggaccgggcggaaactcgtccaccagcgccgccgctcaagcagacatgttcaacaagtacctcactgtctatccggaggttgtcgaggcggctggaagcagtgcgggtagcgcagatggaggaagtagtggtggcgacagtagatcaggcgcagcagtgagtacactgggacatacaggagcgggaacagcaccagcccagcacgtacgcactggacatctgtcgcgcaagtgttctgaggtgtttagccgccgccatcgacgacgtctcgaacggcagagcagcttggacacagcggcggcagctgcaaactccaacgcggaaaacaagttgatgcgcaatcagtcggatacgatagccacagcggcaccctcgttcctgcactctcagccaacgaacaaggcgcgcggtcagaccaatccgcgtcagcactttataaccagcgccccatcaacaggaataggcggaggagatgctcccacttcatctaccgccgtcgttgtcattgcccccgcctcgaactcattggttaatcctggacgttcctcacgtctgcagcgccacagaagttcggagacgcatgacgagcggctgaagcaccagagccgtggtggactcttccagcccattcttcaacttccgcaccacagtgcagccagcagcatcggcgcactggcagtgctcggtggaggaggcaatgttgccgcaaatgatgtggaagacatggaactgggcctggttaggaatgcgggcagcggcggagtggcggatgcttgtagccgggcactacagtcctggatattaggtaagctgatacaatatcagaactcttcattgtcgtagtttagaaatctcaataaattagttttaatatgtactatgttgcccatttagatccctttccggatgggtacctggaggacgatagctacaccaaatctgatctgggcattgaacagccacaccagccaactttccgcacccagcatcgtcatcaccatcaccaccaccacctgcatcatcacctaggaggtgcaatcattcgtaaggatccaaccagcacaatgtctgcacttcaattggctgcagtcacccagccaggaacgggaggatcggtaacaggcggtggtggagcagcaggtggaggtggatctgctgctggtatgaagcgacgcagacattccaacgctacgagctacaagcacggctcgagccagagcaacaaatcgtctctggtgggcggcggaggttccaggggtccgtctggagaagcaggcacttccggaggggccggaggaactggtggagtgaggcgcattaagagcgcagccctggaggttctgtgcccgcagccctctgtatccaatcttagtccacaccccaacagcgtggaggccatctcgggtcaacaacagatgcggaaccctctaccacctcctagcaaaagtctggtgcgaaaccagcaccttaacctttatcctacgcaaggctatggcgacggaactccctccgctggaggaggagggcctggtaacagcagcacatgcagcagtctctttttcggcagctccagcgcctgcggttccacaacagcattgattgaacctccagtataccccatagtggagcactctgacgagaagacggcgcacgaagaacacggtgatgattgcttgggaataggacaaggcaacgccgacgatgacgatgaggtggacgacgtcccgatccgaagaagaacgcgggcgttaggctgcagccaaacgcactacagtgttgaatcggatgtaggtggcttcttggcagacgaagtcggtgctgacgaggatgtgtttaaagatttcgacgacaaccttgagcacattcttagtgagctgcagcagacgcataatcagctggatgacgtcctaaagacccacgatctccatcaccactcgcatttgcaccatcataaagcagcatcagtggagggcgctgggccgtcgggaggatccgtggcagtaggggtaagtgccggaaatgatgacgaagacgaggaaacggaggataataacacggggtcgagatctccattgctcaacgatcgcaatcgccagccggcaacactgcgagagattcaagctgacaagcaactccgtcaggagctatcacaccagtccggggcagtaattcctgcccctaatcctcccgtccccatacgcagcgaggcggactcaggctgcccttcaagtgattgcgagcaagtgagcgccagctccaaggaccaactcctgtcgggaatagagttggagctgcagcagtatcagatcctgcaaaggtgtcaactagacgaagagcaaccatgcacctcgaaaatggctgccaaaagcctgggagccattccaaaagtggtaaagtaccgagaagtggatgaactaagaagaagacgcagaggaggctccccggcagatgcggctgaggctggaaacgagtttgccctagtcaaacagaccaagcaggcctcgcggaattcctcctcctcgaattcgacgcacagcatcagcttgaccgatagcctgacggctgacattcacaagatgctctggctgatgcacggcggagccgtcgatgaccggggccgtccaatcaccggcacctcggcggacggcactccaatcccggcaagcagcagcctggtcccgccgaacatgtccaacgcacacttccagttctaccaggatgctattcaagcgcttcagggcacccatcccacttccggttccagtgtggaacacatgaccaacattgagttggctagggataagttgcgcctggatgccaaattgatgtgcgagcagctggttgcggcggcggaggccaactcaggagtccgaggaaacacactcgcaactcagcaaatgacgcagcagcaggtgggcatgttaatgcgcggaggctctagctcccggcacccatccagtgctccgttctcggtccaaggattaatcaatgtgatccgaagtgagcgcccggcagcgcgcagtcaattggacgccttgcagcaactaagtgatgcagcagcagcattggccgctaatgccagtgaggctgcctccgtttcagcctccggtgcaggaggaggagcatcgagtggcgggggaggagttttaagcgccctaggactggcgaatcaccccagcaaccagatcagccaaatcagtcagctcagtcagatgagccaacccatgctgaatgtggacgggcattttgcaccctactgcgactactggagacccgcgtgccttctatccgcgacagaaaagccagcggctccaaagagtttctacaagtaccgattcaagtggtgcggccaagagcatgagttcaagattgccatggaccggctagagcttcttgccctgttcgaccgtgatctccactggatgcacgtccttctggccagtctgctgtgcaccctggtagcctgcttgggagcggcgatcttgcagcacgatcactacaaggatctatgtgccctgctcttctgcgcagtgatcgcgggagctcagtactcgctagtaaaaagtgtgcaaccggacgcagcttcgccagtgcacggattcaacaagacagtcgcctactcgcgggctatatacttctgccttgccgggggcatgctgttgctactaaagcgcctagatacggactacggggaacggacaccggaccctgtggtattctttggcatgcgctactctcctgctgatgtggttgccctccttctgcaggcgctctacatcttgctgctgtgcttccccatcatattctcggtgggattgtgtccccagataaacacgtttcttatgtacctgctcgagcagatcgacatgcatgtctttggcggaaatgctgctagcagtcttctaggtgagaactctttaatccctattttgcttcttagactaattcctaatactgtacaggttcctttttgtgcgtcgtccggtcggtgctagctgtaatgctgctttacggacctctgtacggagcattggacgagcagcgcgggacgcagtacattctgttctccatcttctgcgctatgctggtacccctgggctaccatctgtctcgatgtgccagcgacttcagccacctgtggcggctgatcaagacgtgcattgtgagcacgtatcgggacgatgaggatgaagatctcagccagatgcaacatatagcaaccggaacagttactggatcagggactgccaatagcactgcccttcaattgaccaccagtactccaaagcagcacaggcaaacagacgtaaaaacggaacatgagcagatcgagctgagttcgctagaaaagctaacagtcaacgaagaacatcacgagaaagatcacggagcagatgatcaactagagacggatcaagatctgcctctgcaacaaaagcacagcaaatcaaaaacttcgtccttgggcagcagtcagcaaaccctgggtaagacgatcagcagtagcaagagggccataaccgcctccagttcgtgtacctccattggaacgggagaaccagcggtggaagctggagctttgaccgaggaggcggtggaaggcgaggagcaacgtaggaatacactggctggcgaggtggggagcaagcacgaattagcggagaactatgaccaagccgccaaaattgatgagtgtgaagacaagatctccagctcatctgccacaaaccccggggacatgtctacgttgacagcgggggcgggcacagccaccactgatgccacacccgcttgcctggaggcagatcctgacgccgaagctgaggcacctgctgacgaaaagcaacatcaggggattctgggaacgggaactggaactggaactggaactaccgaagccagtgaaaatggcagcggtggcggcgctaacggaaataccaatagcaatgggactggcaacgaccttcccgatccactaccacgaaagctgcaggctacagtaacaactcggctgaagaacgacttggtggtgatgaccctgctggcggtcagtgtactggggttgcactgtagcactgtattcaccgccctgcagccggatctcaacgtggttctctactcgttcatcggcgtacttggacttctcctgcactacatagtgccgcagatgagaaagcatatgccctggctttgtttctcccgtccgttgctccggcagcgtgagttcggccagtttgaggtgctcaacgcccccaagatcatgtggttcgaaaagctctacatttacctcagtgtcctggagcggaatgtgctctttcccctgctggccatttcctctctaacggcggactcgcagttgattgtggctaagtttggattgccctggggcacgctcatcgtggcgatctgcgccctaaagtgtgagtcatccgatcatagaaatcgatcatttgaaatcgttattaaatgtatattaatatatctaaagactgaacggcaaaccctatatgcagatcttccatctccctcacttttaagctaatcccaatccatctatctctttttatcagttgtaaggaacgcttactcggatccgaccaaccagtacctgataataatttttacggttctgctattccgcatcgactttgccatggccacagagacattcattatagattatttctttgtgtcgctggcctttcgcaagtgctgtgacttcctgcttaaggtgagaacttggcctggccattatactattctaataaatgctaatgcatgttctttcttagctgcaatttattgtgacgtacatcgctccgtggcaaattacttggggatcggccttccacgccttcgcccagccatttagtgtaccgcactcggcaatgctgttcctgcaggcggccatctccgcagtgctctccactcccctcaatccgtttttgggcagcgccatctttctcacttcgtatgtgcgtcctattaagttctgggagcgggactacaacacgcgccggatagaccactccaatacaaggctaagctcccagctcgagcgggacttgggtgcggacgataacaacctcaacagcatcttctacgagcacttaacccgctctctgcagcactccctgtgcggcgatctcctgatgggtcgctggggaaatgtcaaccaaggagactgctttggtaacaacataattttatacctttcctacaaagaggctgagaccctgtttatcctttcagttcttgcctcagacgatcttaactgtttggttcacatcattgagctaggcaatggcttatgcacgtttcaaatgcgcggcttggagttccgcggcacctattgccagcaacgcgaggtggaggccatcaccgaggacgtagaggacaacgacggatgctgttgctgcgatccaggccacctgccccaattgctcagcgccaacgccatgttctccacccgctggctggcctggcaggtggtcgcagcccagtatgtcatcgagggctactcaatatcagacaacttagccagcgccacgctacaggtgtttgaatatcgcaaggtgctcataacctactacattaaggtgagccctctggatttgctcgtaataacttttgctaatcaaaaaccattttatagagcatcatctactatgttgtaaagaatcccaagcttgagcagtggcttgcctccggtcccatacaagatgccctccagcatactctaagccgacagttcgttgacctagatcccatttttaatttcaatttagacgaggactttgattttcgggcagtaggcatcacgcgttccagtttttgctacgtgtacctcaaatggatcaattactgtgtggatatgcgccgagatgccaactctatgggaggcgcaccacctgcccaagcaccagcagctgctggaggagcttcgtccgctccggcaacagcgggtgttgctccaccagcgccggttacgcccgcccacaatgactccaagagcactcccaatctctcggcgcacggtggacaggctggtccgtcttcaggtcaatccaagtcacagtcacagcagcagctgcgccgtccacaaaagagtgttgcccaggaaaccagcgtaggcggaggaggtgtagttgtcggagggactactgtccctggcacaggaggagtgaccggtggtggtggagatccgcagctgagcagctcccatagctttgccaatatctcccggcaaacatcggagagtgctcccggactgggtggctacgtagcgtatatggatcaaaatgttttcgtgaagctggctaagagtagcaccaccacaggagcaggagccggagcaccaactagccggaaagaaagtcaggaaaaaccagcacttcgtctgaaactagccagcgtgggaaaagatgcaccgctcgtgtccctgtgcctggccctgggccttttggccaggcgatcactggccacggcctcgcacagcgcgttgaccggtgtggagttctttctgcatggtttacatgctttgttcaagggagattttcggatcacatcgccgcgcgacgaatgggtctttgcggacatggagctacttcattccgttgtggcaccggcggttaagatggcacttaagctgcagcaggaccacattaccaatcccgatgagttcctggatcctcatgccctgtacgatgccattgacaactgctctaacgagttggtaatttcgcatgaggctgatcccgtttggcgaagtgccgtactacgaggagcacccaatctacttgccctgaggcacgtaatggaggatggctcggatgagtaccgcattattcggctgacaaagaggtgtctgagcttccgggtaatcaaacttaacagagagtgcgttcgtggcctgtgggcaggacagcagcaggaactgatctacctgaggaatagaaacccggagcgcggaagtatccagaatgccaagcaggcgctgcgcaacatcatcaactccagctgcgatcaacctattgggtatcccatctacgtgtctccactcacaacgtcatatgcggatacaaatgcccaactgtgcgaagtgattggcggcgccatcacattagacaccatccggcatacagtgctggggtggtggcaccgtatacgagagcgctgtcgccagggatgcagttcgggatctgctctagaaccgcatccgggatcgggacccgtccaactgggtgcctgcaattttggcagcggtggcagcgtcgttggtgccgcatccactgctaccggagttggtgcctcgacaggatctggcttgggagtagctgctcccggcaccgctggcagcacgggaggcgagtccggggatctagctcctgtttttatttctgctcctctctacaacactcttacggttaacagttactacagcgtgcgtccgggaaatgttcccggaggacccattcccggaaatctgggcggtaactatgtgagcgacagtttggcggtggtgcgtggaggtctggcagtgatgcctgtgaaacccacatccactacacttattgcgggtctgctgaacagagaacgcgatgaaacatctggatctggaattatgggagcaggagccagtggacccaccagagcaacgagtagtggcggagtgcgcagtcgaagacctgaagtcggcagcagtcgaggtagagatcatgaacgcagagccactttgcccatagcgagcggtggagccggcggtgagccaggaaaggatcttaccgcgcctcaaacccaagtggagcatgaaccaagcccacgcagcacaaagctctcctcttcttctggcagtctgggtcttggaatgggcgtgggccttggcaacattatcaccacgccgggagattatccacggaaaaccaagggacccatttgcctcaccgccgtggacacaggaactagtagttcagcggcagagggaaagcccgcaggatcgggaacagtggctggaactggagtaggtggcgttatcaggaagccgcgcattgagatcttcaagaaagtcataattgttgatgacactggggtgagtagaaataattatagaccctttacattaaggtagtaaaactaaacccaaattgaacagatttacgactgcctggatatcatcgatgctgttgtgtggccaactgaacgaatgcgcaacaatggtggcaggctgtcctggaaagactgggagccgagtgccggcatggtgggccatgtggtccactgctggacgcctaaccataaggacattcgcttccgttcgcatgtcaaccgctatgtttacctcgtggagatcggtgaccactatgtgcccgtagaggagttgggtctaagggaatataatcagattatgggcagcaccgaggagatggccaattcgcgacgaagctccatccagcgtgattttcacgagtacaacattcagctaaagctggctggtcttgctccaattattggaggcggcgaatcctcaacggcaacgactagtgatgcttctaaatcacacaaggcgaaaatccgagcggtaagcagcagcagttccgaggacgaggatacgtcgtccactcgctccattccattaccacagggcgatgatggcgacttgacgaacttcaccaggctggtgagcatgtggaaggaaatcattttggacaataacaagagaagactctacgatatgggtgagttgtccccagagctgctacaaaaactggatgatgccgttcagcagcagcagcaactggaagatgcactagcggaggaatcgaaggaaaagggcacagccacagtcactgccaacgaaggtgaagagggggtaggagaaatggaaattgagccagaacaggaacagaaagaagtggtgtatctcgaggagcagtcaccgctggaagaggtgaccgtttcgaagcccgacgagcagccagctcagccaacaattccggctagtcccgttcctgctgagaccagctctacttccagtgccaaatccacaagttccccttcattatgccaggaggaagaggatgcagtcgatccggaggagacccctgaactggcctccgaggagtcaccaagcgatgagaatggcgagagcgaggcgggaacaacggtctaagtagatcacatatatttgcatttgtttgccaagcaaacaccccaatggcagggactgacaccaaggcggacatggacacaaccttgtaatacatatcagcaaagagcagaaatatggatattgaaatcgcagaggagacaaccttgccccgggcttccgcactgtacgccttttccatgggtgtggcccatatccgagcaccgttcctggtcagaaaaacaaacaaacaaacaaacaacaacaaatgagaacacttccaagaaatcaaagtaatgtttataaaacgactgcgtttagtgtatgcataggaattaggagcaaactacaataattcagacaaaaacaaacaaaaaaacaaagaattcaattttagtattaataaaagttataggttatactcggtatataggaaaaagagcgcaaatcgagagcaggatattggaaagatcataaaaaatatatttaactaattgttgtaacttgcgaattgtataatatggaaacggaaaaccaaatgcttctcaaacattacctattttgttctttctcctctcgctagccaatacagaaatattaagcaaacctaaagaatttataaatgtatatttaacggaaattagtttaaagttaaagttaatgaaccccacacacagacacaaaacataccaaattcgattgttaaagagtacacaaatgaaacaaatcccgcattacataagcctaagcgataagcgaacttcggacaggattcaagttacaaaactaagatattacacacaattcctagatgattaagaggatgaggatgaggacgaggatcaagtggaatgacgacatgtaaagctctcacgttgccttaatatattagactgattttttctacacacatttgtagacgtatggtggatgacatttgagaagtcccagccaattgcctggggggggaggagttgcagcaaacggagtcctaatcccaatcccaactagcgatttacatgta

SEQ ID NO: 6134 - DNA, 7440 bp, DROSOPHILA
atgtactatgttgcccatttagatccctttccggatgggtacctggaggacgatagctacaccaaatctgatctgggcattgaacagccacaccagccaactttccgcacccagcatcgtcatcaccatcaccaccaccacctgcatcatcacctaggaggtgcaatcattcgtaaggatccaaccagcacaatgtctgcacttcaattggctgcagtcacccagccaggaacgggaggatcggtaacaggcggtggtggagcagcaggtggaggtggatctgctgctggtatgaagcgacgcagacattccaacgctacgagctacaagcacggctcgagccagagcaacaaatcgtctctggtgggcggcggaggttccaggggtccgtctggagaagcaggcacttccggaggggccggaggaactggtggagtgaggcgcattaagagcgcagccctggaggttctgtgcccgcagccctctgtatccaatcttagtccacaccccaacagcgtggaggccatctcgggtcaacaacagatgcggaaccctctaccacctcctagcaaaagtctggtgcgaaaccagcaccttaacctttatcctacgcaaggctatggcgacggaactccctccgctggaggaggagggcctggtaacagcagcacatgcagcagtctctttttcggcagctccagcgcctgcggttccacaacagcattgattgaacctccagtataccccatagtggagcactctgacgagaagacggcgcacgaagaacacggtgatgattgcttgggaataggacaaggcaacgccgacgatgacgatgaggtggacgacgtcccgatccgaagaagaacgcgggcgttaggctgcagccaaacgcactacagtgttgaatcggatgtaggtggcttcttggcagacgaagtcggtgctgacgaggatgtgtttaaagatttcgacgacaaccttgagcacattcttagtgagctgcagcagacgcataatcagctggatgacgtcctaaagacccacgatctccatcaccactcgcatttgcaccatcataaagcagcatcagtggagggcgctgggccgtcgggaggatccgtggcagtaggggtaagtgccggaaatgatgacgaagacgaggaaacggaggataataacacggggtcgagatctccattgctcaacgatcgcaatcgccagccggcaacactgcgagagattcaagctgacaagcaactccgtcaggagctatcacaccagtccggggcagtaattcctgcccctaatcctcccgtccccatacgcagcgaggcggactcaggctgcccttcaagtgattgcgagcaagtgagcgccagctccaaggaccaactcctgtcgggaatagagttggagctgcagcagtatcagatcctgcaaaggtgtcaactagacgaagagcaaccatgcacctcgaaaatggctgccaaaagcctgggagccattccaaaagtggtaaagtaccgagaagtggatgaactaagaagaagacgcagaggaggctccccggcagatgcggctgaggctggaaacgagtttgccctagtcaaacagaccaagcaggcctcgcggaattcctcctcctcgaattcgacgcacagcatcagcttgaccgatagcctgacggctgacattcacaagatgctctggctgatgcacggcggagccgtcgatgaccggggccgtccaatcaccggcacctcggcggacggcactccaatcccggcaagcagcagcctggtcccgccgaacatgtccaacgcacacttccagttctaccaggatgctattcaagcgcttcagggcacccatcccacttccggttccagtgtggaacacatgaccaacattgagttggctagggataagttgcgcctggatgccaaattgatgtgcgagcagctggttgcggcggcggaggccaactcaggagtccgaggaaacacactcgcaactcagcaaatgacgcagcagcaggtgggcatgttaatgcgcggaggctctagctcccggcacccatccagtgctccgttctcggtccaaggattaatcaatgtgatccgaagtgagcgcccggcagcgcgcagtcaattggacgccttgcagcaactaagtgatgcagcagcagcattggccgctaatgccagtgaggctgcctccgtttcagcctccggtgcaggaggaggagcatcgagtggcgggggaggagttttaagcgccctaggactggcgaatcaccccagcaaccagatcagccaaatcagtcagctcagtcagatgagccaacccatgctgaatgtggacgggcattttgcaccctactgcgactactggagacccgcgtgccttctatccgcgacagaaaagccagcggctccaaagagtttctacaagtaccgattcaagtggtgcggccaagagcatgagttcaagattgccatggaccggctagagcttcttgccctgttcgaccgtgatctccactggatgcacgtccttctggccagtctgctgtgcaccctggtagcctgcttgggagcggcgatcttgcagcacgatcactacaaggatctatgtgccctgctcttctgcgcagtgatcgcgggagctcagtactcgctagtaaaaagtgtgcaaccggacgcagcttcgccagtgcacggattcaacaagacagtcgcctactcgcgggctatatacttctgccttgccgggggcatgctgttgctactaaagcgcctagatacggactacggggaacggacaccggaccctgtggtattctttggcatgcgctactctcctgctgatgtggttgccctccttctgcaggcgctctacatcttgctgctgtgcttccccatcatattctcggtgggattgtgtccccagataaacacgtttcttatgtacctgctcgagcagatcgacatgcatgtctttggcggaaatgctgctagcagtcttctaggttcctttttgtgcgtcgtccggtcggtgctagctgtaatgctgctttacggacctctgtacggagcattggacgagcagcgcgggacgcagtacattctgttctccatcttctgcgctatgctggtacccctgggctaccatctgtctcgatgtgccagcgacttcagccacctgtggcggctgatcaagacgtgcattgtgagcacgtatcgggacgatgaggatgaagatctcagccagatgcaacatatagcaaccggaacagttactggatcagggactgccaatagcactgcccttcaattgaccaccagtactccaaagcagcacaggcaaacagacgtaaaaacggaacatgagcagatcgagctgagttcgctagaaaagctaacagtcaacgaagaacatcacgagaaagatcacggagcagatgatcaactagagacggatcaagatctgcctctgcaacaaaagcacagcaaatcaaaaacttcgtccttgggcagcagtcagcaaaccctgggtaagacgatcagcagtagcaagagggccataaccgcctccagttcgtgtacctccattggaacgggagaaccagcggtggaagctggagctttgaccgaggaggcggtggaaggcgaggagcaacgtaggaatacactggctggcgaggtggggagcaagcacgaattagcggagaactatgaccaagccgccaaaattgatgagtgtgaagacaagatctccagctcatctgccacaaaccccggggacatgtctacgttgacagcgggggcgggcacagccaccactgatgccacacccgcttgcctggaggcagatcctgacgccgaagctgaggcacctgctgacgaaaagcaacatcaggggattctgggaacgggaactggaactggaactggaactaccgaagccagtgaaaatggcagcggtggcggcgctaacggaaataccaatagcaatgggactggcaacgaccttcccgatccactaccacgaaagctgcaggctacagtaacaactcggctgaagaacgacttggtggtgatgaccctgctggcggtcagtgtactggggttgcactgtagcactgtattcaccgccctgcagccggatctcaacgtggttctctactcgttcatcggcgtacttggacttctcctgcactacatagtgccgcagatgagaaagcatatgccctggctttgtttctcccgtccgttgctccggcagcgtgagttcggccagtttgaggtgctcaacgcccccaagatcatgtggttcgaaaagctctacatttacctcagtgtcctggagcggaatgctggtccgtcttcaggtcaatccaagtcacagtcacagcagcagctgcgccgtccacaaaagagtgttgcccaggaaaccagcgtaggcggaggaggtgtagttgtcggagggactactgtccctggcacaggaggagtgaccggtggtggtggagatccgcagctgagcagctcccatagctttgccaatatctcccggcaaacatcggagagtgctcccggactgggtggctacgtagcgtatatggatcaaaatgttttcgtgaagctggctaagagtagcaccaccacaggagcaggagccggagcaccaactagccggaaagaaagtcaggaaaaaccagcacttcgtctgaaactagccagcgtgggaaaagatgcaccgctcgtgtccctgtgcctggccctgggccttttggccaggcgatcactggccacggcctcgcacagcgcgttgaccggtgtggagttctttctgcatggtttacatgctttgttcaagggagattttcggatcacatcgccgcgcgacgaatgggtctttgcggacatggagctacttcattccgttgtggcaccggcggttaagatggcacttaagctgcagcaggaccacattaccaatcccgatgagttcctggatcctcatgccctgtacgatgccattgacaactgctctaacgagttggtaatttcgcatgaggctgatcccgtttggcgaagtgccgtactacgaggagcacccaatctacttgccctgaggcacgtaatggaggatggctcggatgagtaccgcattattcggctgacaaagaggtgtctgagcttccgggtaatcaaacttaacagagagtgcgttcgtggcctgtgggcaggacagcagcaggaactgatctacctgaggaatagaaacccggagcgcggaagtatccagaatgccaagcaggcgctgcgcaacatcatcaactccagctgcgatcaacctattgggtatcccatctacgtgtctccactcacaacgtcatatgcggatacaaatgcccaactgtgcgaagtgattggcggcgccatcacattagacaccatccggcatacagtgctggggtggtggcaccgtatacgagagcgctgtcgccagggatgcagttcgggatctgctctagaaccgcatccgggatcgggacccgtccaactgggtgcctgcaattttggcagcggtggcagcgtcgttggtgccgcatccactgctaccggagttggtgcctcgacaggatctggcttgggagtagctgctcccggcaccgctggcagcacgggaggcgagtccggggatctagctcctgtttttatttctgctcctctctacaacactcttacggttaacagttactacagcgtgcgtccgggaaatgttcccggaggacccattcccggaaatctgggcggtaactatgtgagcgacagtttggcggtggtgcgtggaggtctggcagtgatgcctgtgaaacccacatccactacacttattgcgggtctgctgaacagagaacgcgatgaaacatctggatctggaattatgggagcaggagccagtggacccaccagagcaacgagtagtggcggagtgcgcagtcgaagacctgaagtcggcagcagtcgaggtagagatcatgaacgcagagccactttgcccatagcgagcggtggagccggcggtgagccaggaaaggatcttaccgcgcctcaaacccaagtggagcatgaaccaagcccacgcagcacaaagctctcctcttcttctggcagtctgggtcttggaatgggcgtgggccttggcaacattatcaccacgccgggagattatccacggaaaaccaagggacccatttgcctcaccgccgtggacacaggaactagtagttcagcggcagagggaaagcccgcaggatcgggaacagtggctggaactggagtaggtggcgttatcaggaagccgcgcattgagatcttcaagaaagtcataattgttgatgacactgggatttacgactgcctggatatcatcgatgctgttgtgtggccaactgaacgaatgcgcaacaatggtggcaggctgtcctggaaagactgggagccgagtgccggcatggtgggccatgtggtccactgctggacgcctaaccataaggacattcgcttccgttcgcatgtcaaccgctatgtttacctcgtggagatcggtgaccactatgtgcccgtagaggagttgggtctaagggaatataatcagattatgggcagcaccgaggagatggccaattcgcgacgaagctccatccagcgtgattttcacgagtacaacattcagctaaagctggctggtcttgctccaattattggaggcggcgaatcctcaacggcaacgactagtgatgcttctaaatcacacaaggcgaaaatccgagcggtaagcagcagcagttccgaggacgaggatacgtcgtccactcgctccattccattaccacagggcgatgatggcgacttgacgaacttcaccaggctggtgagcatgtggaaggaaatcattttggacaataacaagagaagactctacgatatgggtgagttgtccccagagctgctacaaaaactggatgatgccgttcagcagcagcagcaactggaagatgcactagcggaggaatcgaaggaaaagggcacagccacagtcactgccaacgaaggtgaagagggggtaggagaaatggaaattgagccagaacaggaacagaaagaagtggtgtatctcgaggagcagtcaccgctggaagaggtgaccgtttcgaagcccgacgagcagccagctcagccaacaattccggctagtcccgttcctgctgagaccagctctacttccagtgccaaatccacaagttccccttcattatgccaggaggaagaggatgcagtcgatccggaggagacccctgaactggcctccgaggagtcaccaagcgatgagaatggcgagagcgaggcgggaacaacggtctaa

SEQ ID NO: 6135 - protein, 2479 aa, DROSOPHILA
MYYVAHLDPFPDGYLEDDSYTKSDLGIEQPHQPTFRTQHRHHHHHHHLHHHLGGAIIRKDPTSTMSALQLAAVTQPGTGGSVTGGGGAAGGGGSAAGMKRRRHSNATSYKHGSSQSNKSSLVGGGGSRGPSGEAGTSGGAGGTGGVRRIKSAALEVLCPQPSVSNLSPHPNSVEAISGQQQMRNPLPPPSKSLVRNQHLNLYPTQGYGDGTPSAGGGGPGNSSTCSSLFFGSSSACGSTTALIEPPVYPIVEHSDEKTAHEEHGDDCLGIGQGNADDDDEVDDVPIRRRTRALGCSQTHYSVESDVGGFLADEVGADEDVFKDFDDNLEHILSELQQTHNQLDDVLKTHDLHHHSHLHHHKAASVEGAGPSGGSVAVGVSAGNDDEDEETEDNNTGSRSPLLNDRNRQPATLREIQADKQLRQELSHQSGAVIPAPNPPVPIRSEADSGCPSSDCEQVSASSKDQLLSGIELELQQYQILQRCQLDEEQPCTSKMAAKSLGAIPKVVKYREVDELRRRRRGGSPADAAEAGNEFALVKQTKQASRNSSSSNSTHSISLTDSLTADIHKMLWLMHGGAVDDRGRPITGTSADGTPIPASSSLVPPNMSNAHFQFYQDAIQALQGTHPTSGSSVEHMTNIELARDKLRLDAKLMCEQLVAAAEANSGVRGNTLATQQMTQQQVGMLMRGGSSSRHPSSAPFSVQGLINVIRSERPAARSQLDALQQLSDAAAALAANASEAASVSASGAGGGASSGGGGVLSALGLANHPSNQISQISQLSQMSQPMLNVDGHFAPYCDYWRPACLLSATEKPAAPKSFYKYRFKWCGQEHEFKIAMDRLELLALFDRDLHWMHVLLASLLCTLVACLGAAILQHDHYKDLCALLFCAVIAGAQYSLVKSVQPDAASPVHGFNKTVAYSRAIYFCLAGGMLLLLKRLDTDYGERTPDPVVFFGMRYSPADVVALLLQALYILLLCFPIIFSVGLCPQINTFLMYLLEQIDMHVFGGNAASSLLGSFLCVVRSVLAVMLLYGPLYGALDEQRGTQYILFSIFCAMLVPLGYHLSRCASDFSHLWRLIKTCIVSTYRDDEDEDLSQMQHIATGTVTGSGTANSTALQLTTSTPKQHRQTDVKTEHEQIELSSLEKLTVNEEHHEKDHGADDQLETDQDLPLQQKHSKSKTSSLGSSQQTLGKTISSSKRAITASSSCTSIGTGEPAVEAGALTEEAVEGEEQRRNTLAGEVGSKHELAENYDQAAKIDECEDKISSSSATNPGDMSTLTAGAGTATTDATPACLEADPDAEAEAPADEKQHQGILGTGTGTGTGTTEASENGSGGGANGNTNSNGTGNDLPDPLPRKLQATVTTRLKNDLVVMTLLAVSVLGLHCSTVFTALQPDLNVVLYSFIGVLGLLLHYIVPQMRKHMPWLCFSRPLLRQREFGQFEVLNAPKIMWFEKLYIYLSVLERNAGPSSGQSKSQSQQQLRRPQKSVAQETSVGGGGVVVGGTTVPGTGGVTGGGGDPQLSSSHSFANISRQTSESAPGLGGYVAYMDQNVFVKLAKSSTTTGAGAGAPTSRKESQEKPALRLKLASVGKDAPLVSLCLALGLLARRSLATASHSALTGVEFFLHGLHALFKGDFRITSPRDEWVFADMELLHSVVAPAVKMALKLQQDHITNPDEFLDPHALYDAIDNCSNELVISHEADPVWRSAVLRGAPNLLALRHVMEDGSDEYRIIRLTKRCLSFRVIKLNRECVRGLWAGQQQELIYLRNRNPERGSIQNAKQALRNIINSSCDQPIGYPIYVSPLTTSYADTNAQLCEVIGGAITLDTIRHTVLGWWHRIRERCRQGCSSGSALEPHPGSGPVQLGACNFGSGGSVVGAASTATGVGASTGSGLGVAAPGTAGSTGGESGDLAPVFISAPLYNTLTVNSYYSVRPGNVPGGPIPGNLGGNYVSDSLAVVRGGLAVMPVKPTSTTLIAGLLNRERDETSGSGIMGAGASGPTRATSSGGVRSRRPEVGSSRGRDHERRATLPIASGGAGGEPGKDLTAPQTQVEHEPSPRSTKLSSSSGSLGLGMGVGLGNIITTPGDYPRKTKGPICLTAVDTGTSSSAAEGKPAGSGTVAGTGVGGVIRKPRIEIFKKVIIVDDTGIYDCLDIIDAVVWPTERMRNNGGRLSWKDWEPSAGMVGHVVHCWTPNHKDIRFRSHVNRYVYLVEIGDHYVPVEELGLREYNQIMGSTEEMANSRRSSIQRDFHEYNIQLKLAGLAPIIGGGESSTATTSDASKSHKAKIRAVSSSSSEDEDTSSTRSIPLPQGDDGDLTNFTRLVSMWKEIILDNNKRRLYDMGELSPELLQKLDDAVQQQQQLEDALAEESKEKGTATVTANEGEEGVGEMEIEPEQEQKEVVYLEEQSPLEEVTVSKPDEQPAQPTIPASPVPAETSSTSSAKSTSSPSLCQEEEDAVDPEETPELASEESPSDENGESEAGTTV

SEQ ID NO: 6136 - DNA, 3902 bp, DROSOPHILA
tcgattggttggatggtcgcaatctgtgccgcgagtactgcatggatctggtcgccctggagactcaggagaagaacaatctgatcttccgcgtgatccagcagaacgatgtgccgtacatctggacggccggacgtatctgtgactttgctggctgcgagaatcgtccagatttggagcccaagaccgtctatggatggttctggtccgcaacccgcgagaagatccaggccaccaaccgcatcccacagggctggggctacaacccatggtcgcagactggccacaagaagcgcccgcagccggacaacgccgaatacgacatcaaccagaccaaggagcagtgcctgtccgtgttgaacaacgtgtacaacgatggcatcgcctggcacgacgtggcctgctaccacgagaagcccgtcatctgtgaggacaacgaggagctgctgcgctatgtggcggccacgaatcccggcatccgtctatagagcggctcgctgggcgttcgctgtttgcctaattttaaagctacttattataatattccttaaacgagtttttgtataatttttgtttgtatgtgtacgacgaaaacggaagaaagcaagacaaatagactttagaatttacaatttccgatcctacaaacaccacaaaaccacccacccaccaaatccacaatactgctttcatcacaccttagcacccagcacttagtctcacttctccttcctccctaccttcgaaactgccaattttacgcgtagaattctattccgttgtaaacagttgagtcgttttcagatcgcaccttaaatatttataggcaatcctaaattgcaagtgtttcgctctgacccactgtctgtcattcaagcaagaaattcggaatctctttagtattttgtttgagacactcatgttttgtccacaaagagattgaataaaattttgtaaagatcccataaaaaagaaaacacttgaattaatactttggtttttattggcaatggttgtgctgatgatcgggtgttgtggagttgtgatgatgatgatgcctctttgatctgcgatcgtcatgtgaagatcccgaggagctgtgctctcttttagagcgcacggaactccggtcacttcttgacctggaatgatgattccgctgttggttgtttttgagatcccgacctcggttgcccaagtccttggagttttccagttcaacctcggggcttgccgaccagcgccagttcctgccgtgctcgctgtgctcatcccaactgaagagatagggaaagtatttaaatagtttgccggaatataaactaatattatatttaaatccacctgggtgtcttggccgttggagtttggctggagcgtcgttcactgcgtggaccgctggtgtactccagttccgtgttgaacaggttgttcggattgccaaacaggtgcagatagccgcagtcgttacctttgggacatttacgtgttaaggacaaacctttaagaagtcacagattgtgttaaagaaaatggtattaaaacatatgaatgggcttgctttgagttttggttttttaaaggatacggcttcctcttggcatgcagttcacgtaccgcagactgcgccgcgccaggtcctcagattggagaactccacgtttagtcgcttggaggcgtagtagcgaccttggagattggtaaatgcgcgaagtgcagatctgaaatcatgacgtacgctttataataattagtttatgacctctttagacattattaacataacataaaagtatgcaagcgcagagacaatacaatatatatattttttggcgagagaacaggtataaattaaaattgtgaattatatgaattaacttttacatgaaaatgctgggaaataggctgcatttgaatatccgaattgcttgcatataaacaatgtcatattaattaaataataataatgataattaatactctcagacaaaccgttcgtttgtgtactccacaaagacgtgacccctgaggtgttccagcgtattgcgcaccgtgcggaagttgacaatggtgccgaactttctcagttcttcgacgacatcgttgaagaactcatcgtagtcgtggcgcagatcctgttcggtcaattccaggtgttcctccgccgaggcgtactccttgtgcgtgcatcgcttctgcagcatggaatggttgaagaagtgccggatgagaaggatccttcccagcatcgggcggcgatggttgaaggtgcaggcgtgaccgtagcggcaacagttggtgcggctaaagaactcgcaggctcgttcctccggatgcgtctccattacacgcagaaggtggctgggtggcttctcgatacgcgggttgttcagatactcatccatgctctccatcatggcatcgaattcggcggcagccttggcggcttttcgtgtctcttcctcgcgctgcttccgctgtctctcctcccgttccgcccgctctttcgcctgttcccgctgcaaacgctccacttcctcctgctcctgacgcttcttcgcctcgtccatttggaattgtcgctgcgctgtggcttcgcgtcgcagccaggactcctccgccaactggcgctcccgttcgtcggctagtcgttggaattcctgcatttcctcctgttcctgcgaccatttctggtactccggctgcataagtctttggttttccgcctcttcctccagtttatcacgttctttggcatgtttttgacgacgccgcttcctctgctgcttcttgattaactttcgccgtgccctttgtataaattatatacattaaattaaattatacattatatttaaacaaatttatagttatttacttccttcccggcatttcgcaaaatcaaaacattgaatttcggtgagcagctgaaacgcatttgtgagaacacagctgattaataccgtgtacagggtctatgaaaaataccacaaaatactgcagcacgaaaaaaattacatttttacatttacatatttttcaaagttttcataaatctggcaaatcaaaaatgttttgtaagttttccctcaaaattaagatttcatatcataaatgtttaaaatttacgaattcttacgatttttgtaattcaaaatttattataaattataacagtctaatataacaccaagtttcgttcttgctataaaatgtaaaataacattgctgtatagcacaatgccaaaagcctcagttcaacttacactgctataaattatgttatgtgatttttatagcactgtgtcgaagagcttttaaaatttaatagaagcgcttagtttgaatattttcttgtttatcagatttgtatattttgaattgaaccgtttattcaagctttttctcaattcccccttccatcgaaccagaaactttcgaactcgaaaattcccctctgcaacaatgttgccagcaacattgtgtccggcgattgccgaagatgcgaaaaaaaatcaaattcagtgataaagtaaaattcgtgcgcgtcggttcacctacacttcgtgtcgccagagaaagcctttctcctggctttctctctgagctctccttttgcgctcggctccgaaatccgaagtccggaatttggactccggctcaagcgccgaatcgccgagcttggctcacggaaaaccaactgagttgtgcgaaactaagtcaaaacaattgatgtgaattctcgcggcacaacttgatattagataaatgaaataattcgcgccgctggcactttgaactcgtaatcaggtcgcaagcatattcacggttttttgtgtagtaaccacaggaattcaaattcatattcgttgagattctcgcaatgcggctaattggattta

SEQ ID NO: 6137 - DNA, 1351 bp, DROSOPHILA
attttgcgaaatgccgggaaggaaggcacggcgaaagttaatcaagaagcagcagaggaagcggcgtcgtcaaaaacatgccaaagaacgtgataaactggaggaagaggcggaaaaccaaagacttatgcagccggagtaccagaaatggtcgcaggaacaggaggaaatgcaggaattccaacgactagccgacgaacgggagcgccagttggcggaggagtcctggctgcgacgcgaagccacagcgcagcgacaattccaaatggacgaggcgaagaagcgtcaggagcaggaggaagtggagcgtttgcagcgggaacaggcgaaagagcgggcggaacgggaggagagacagcggaagcagcgcgaggaagagacacgaaaagccgccaaggctgccgccgaattcgatgccatgatggagagcatggatgagtatctgaacaacccgcgtatcgagaagccacccagccaccttctgcgtgtaatggagacgcatccggaggaacgagcctgcgagttctttagccgcaccaactgttgccgctacggtcacgcctgcaccttcaaccatcgccgcccgatgctgggaaggatccttctcatccggcacttcttcaaccattccatgctgcagaagcgatgcacgcacaaggagtacgcctcggcggaggaacacctggaattgaccgaacaggatctgcgccacgactacgatgagttcttcaacgatgtcgtcgaagaactgagaaagttcggcaccattgtcaacttccgcacggtgcgcaatacgctggaacacctcaggggtcacgtctttgtggagtacacaaacgaacgatctgcacttcgcgcatttaccaatctccaaggtcgctactacgcctccaagcgactaaacgtggagttctccaatctgaggacctggcgcggcgcagtctgcggtaacgactgcggctatctgcacctgtttggcaatccgaacaacctgttcaacacggaactggagtacaccagcggtccacgcagtgaacgacgctccagccaaactccaacggccaagacacccagttgggatgagcacagcgagcacggcaggaactggcgctggtcggcaagccccgaggttgaactggaaaactccaaggacttgggcaaccgaggtcgggatctcaaaaacaaccaacagcggaatcatcattccaggtcaagaagtgaccggagttccgtgcgctctaaaagagagcacagctcctcgggatcttcacatgacgatcgcagatcaaagaggcatcatcatcatcacaactccacaacacccgatcatcagcacaaccattgccaataa

SEQ ID NO: 6138 - protein, 446 aa, DROSOPHILA
MPGRKARRKLIKKQQRKRRRQKHAKERDKLEEEAENQRLMQPEYQKWSQEQEEMQEFQRLADERERQLAEESWLRREATAQRQFQMDEAKKRQEQEEVERLQREQAKERAEREERQRKQREEETRKAAKAAAEFDAMMESMDEYLNNPRIEKPPSHLLRVMETHPEERACEFFSRTNCCRYGHACTFNHRRPMLGRILLIRHFFNHSMLQKRCTHKEYASAEEHLELTEQDLRHDYDEFFNDVVEELRKFGTIVNFRTVRNTLEHLRGHVFVEYTNERSALRAFTNLQGRYYASKRLNVEFSNLRTWRGAVCGNDCGYLHLFGNPNNLFNTELEYTSGPRSERRSSQTPTAKTPSWDEHSEHGRNWRWSASPEVELENSKDLGNRGRDLKNNQQRNHHSRSRSDRSSVRSKREHSSSGSSHDDRRSKRHHHHHNSTTPDHQHNHCQ

SEQ ID NO: 6139 - DNA, 3515 bp, DROSOPHILA
ggacactctcgatccgccagatccaccgaagttctttagctcggacgacgacagtggagaagacaatccgcaaaagtacaccgacgagatgcgtcagaagttaagagacattgagtcgaaagcaattcagtaccaggacgaactggagtccggaaagcgccgcctggaaccaggttggagtgtccccgaacaagtggaacaattccggaagcgattacttaaacaggtaagatttgtaacatacagtaagtcggatgtaacaactgaattctttgcgaacgaacaggactcgcgatctgaggcaactgtagactccccgctcagctacatgcacataaaatccaagagctccaaggtgagtgagagtccagcgctgttcagaagcagttcccgcaaacgatcccactcgccgttctctggtggcgaatccaaacgacgtgactattcacccgaaacctcgcgctcatccaaatcctcgaaacgcaatcggtcgcgtagtccgtccagttcaccgaagcggtatacagagcggtcgtctcgcagctcccgctacgaaactcctgcctccggatcgtcgcgatcacgcagttctccaacctcctcgcgctcctctcgcagagaagagccatcgccgccgagacatcgcagcgacaagcacaagcacaaacataggcactagagtgtctgctcttcggacgatttgtatttaattaaacatggattctacataaaaacactttcgtcgtttgttttaaatacacagtatatataattttaaatctaaatcgtttgttaggaagtgggacacacgcaaaacagacggcccaggcagttcgattccgctctgcgaatttgtctaaaaacatgaatctaagcaagctatcttaaaatggttacgttttgttaaggaaagccggccaaccaacaccagtcctcgaaccgcctgagcctggtcatataagcagtggtgattatcataaggtgaatacatagatgtggcttaaaagtagatgcgaacagcctcctcggcattctgctccacggggcagtaggggcacttcagtatgtggccaacactcagcttgtgcagggcgtcgttggatatgacatgaccgcaggtcaacttcttcggcggattgtcctcggaagtctgctggcgcaatatggggcaggcaaagatcgagtggaatcggaattccggctgcagatcgatctcaatgggcaactcgtcgcagccgttccacatgccaaggacttggcgcgactgcatcacctgcttgatattgagcaaggcgggcagggcagtgcatccggcattgaccacaacagacagggcggagttcttgctaatgcctagcagttggcatgcgtctttgaggaatatgaacgacagttcggtccacttctcctggcccaagaagtgcttgtaaggcgagttctccagtccactgggcagatatataaagctggccatcaagttggctatttcgtgctcatagcgcacagcaaacttcttgaagttcagtcgagcgtaggagatggcctcgcgctgcgagtccaatccgtaggagaccagctgcatgaaacgcatgcggtgcagccggaactctatgagcgagtggcggtcactcagctgctgggagtacatctttgcccacttgagggcgtcagtcagatcccgcttttggatcttcacccaaatgccgtagatgtcggcaaactcgcgctccgagtcgaacacatcctgggcatgctccggcgacatcttgcactcgcggattagcgtgcgagccacatcgtccatgccctggcgacaataatgcttggcaatggccttgttcagcaacatcaggttctcctcgtcctgcagcacgtccactcgcatggtggacgagaagtcggcgctaaagttgcggtcaatggccttgccgatcttcgaaatggagccgtgcagatcgcggtgctccgtggacagtttttgcacgcgctcgtggcacctggcgagagcattccggacgctctccacttggcgctcggttaggcgttgtggtgccgtcggttccgtctccacctgcatgctcaccgcatcgcccatgggatcgtcctgggacacctgggtgctcgagttcagagtggtcaccagctgctccgccctgctgagaacctctaccagctccgacatctgtgtggctatatctccgatgtccgcctctgcgttctcgtgaagctgctccagtttgctgaccactcgggtcaggtccttctccaccgacgaacaggccaacgactcgctgtccattgttagctccagtttcgtggggtgaaagcctagaaaccagtcacgccaggcgcgcgttcactttcgattttacaaccttttgctttcgaggattgatagcactgtgattcttcaaagtcacgacgatattcggtggtccagcggaaaatgcgtatttataaattgttaattttataacacaaagaagacgaaaacattggagctgggtggaccactcacgatgctatcgataaatcgaataattttaatttcgataaagggcaacagtgctgagcgaattaatatttgtatattccgcattttacgtattaccgttatattggatccttagttgatccttagttatatatagttagtctagtttaacatcataataatgcataataaagtaaccattttacgaaccaaatatatatttgacctttatatattaataataatgtgattccatttaaaacaattacaaatatacaaaaatttattaaatcccataagccttctatcagtgtaaaggatccgttaactttaaacgatagaaaagtatcgatagcactcgcatgcatcgattgacagccaatgctgcccatctccgttcggtcgactgaaaaatcaattattattgctgctgctttctggcagagaaacttataacgacaaacaaacagtttgaaattagcgtaattagataagaaaacgaactttgaaaccaaaggtgttagtctttaaaaacgaaactgataattatttaaaaggtacctcagaacacgagagcaattccaaggacaaaatctccacactttgaattcataatttttaaaaataagtgatgagtcttaagccgaacggcattgaacccaaattacaaatgctgtgcctccaaaaataaaagcgcagagagctcgaaaaacgttttccaaattaatgtagacagtgacaagaagagggaaatttttaaaataaaagtggtggaaataagaagatgctgtgcaaataacagacgtgcatagtaaaaacaattttactttcgccacttttcagtcagtgcgcttgaaagcgaaatggaaaacggtcggaaaactcatagcacttggcagtgtgtgtgtgcgtgtgtgataacaagagcgaagaagctgcgaaatgaaaaatatgaaaacacgaaatttcgcacacagtgctggtcagcaaaacagcagcaatagctcaaaaaattaaattt

SEQ ID NO: 6140 - DNA, 1515 bp, DROSOPHILA
agtggtccacccagctccaatgttttcgtcttctttgtgttataaaattaacaatttataaatacgcattttccgctggaccaccgaatatcgtcgtgactttgaagaatcacagtgctatcaatcctcgaaagcaaaaggttgtaaaatcgaaagtgaacgcgcgcctggcgtgactggtttctaggctttcaccccacgaaactggagctaacaatggacagcgagtcgttggcctgttcgtcggtggagaaggacctgacccgagtggtcagcaaactggagcagcttcacgagaacgcagaggcggacatcggagatatagccacacagatgtcggagctggtagaggttctcagcagggcggagcagctggtgaccactctgaactcgagcacccaggtgtcccaggacgatcccatgggcgatgcggtgagcatgcaggtggagacggaaccgacggcaccacaacgcctaaccgagcgccaagtggagagcgtccggaatgctctcgccaggtgccacgagcgcgtgcaaaaactgtccacggagcaccgcgatctgcacggctccatttcgaagatcggcaaggccattgaccgcaactttagcgccgacttctcgtccaccatgcgagtggacgtgctgcaggacgaggagaacctgatgttgctgaacaaggccattgccaagcattattgtcgccagggcatggacgatgtggctcgcacgctaatccgcgagtgcaagatgtcgccggagcatgcccaggatgtgttcgactcggagcgcgagtttgccgacatctacggcatttgggtgaagatccaaaagcgggatctgactgacgccctcaagtgggcaaagatgtactcccagcagctgagtgaccgccactcgctcatagagttccggctgcaccgcatgcgtttcatgcagctggtctcctacggattggactcgcagcgcgaggccatctcctacgctcgactgaacttcaagaagtttgctgtgcgctatgagcacgaaatagccaacttgatggccagctttatatatctgcccagtggactggagaactcgccttacaagcacttcttgggccaggagaagtggaccgaactgtcgttcatattcctcaaagacgcatgccaactgctaggcattagcaagaactccgccctgtctgttgtggtcaatgccggatgcactgccctgcccgccttgctcaatatcaagcaggtgatgcagtcgcgccaagtccttggcatgtggaacggctgcgacgagttgcccattgagatcgatctgcagccggaattccgattccactcgatctttgcctgccccatattgcgccagcagacttccgaggacaatccgccgaagaagttgacctgcggtcatgtcatatccaacgacgccctgcacaagctgagtgttggccacatactgaagtgcccctactgccccgtggagcagaatgccgaggaggctgttcgcatctacttttaa

SEQ ID NO: 6141 - protein, 432 aa, DROSOPHILA
MDSESLACSSVEKDLTRVVSKLEQLHENAEADIGDIATQMSELVEVLSRAEQLVTTLNSSTQVSQDDPMGDAVSMQVETEPTAPQRLTERQVESVRNALARCHERVQKLSTEHRDLHGSISKIGKAIDRNFSADFSSTMRVDVLQDEENLMLLNKAIAKHYCRQGMDDVARTLIRECKMSPEHAQDVFDSEREFADIYGIWVKIQKRDLTDALKWAKMYSQQLSDRHSLIEFRLHRMRFMQLVSYGLDSQREAISYARLNFKKFAVRYEHEIANLMASFIYLPSGLENSPYKHFLGQEKWTELSFIFLKDACQLLGISKNSALSVVVNAGCTALPALLNIKQVMQSRQVLGMWNGCDELPIEIDLQPEFRFHSIFACPILRQQTSEDNPPKKLTCGHVISNDALHKLSVGHILKCPYCPVEQNAEEAVRIYF

SEQ ID NO: 6142 - DNA, 5764 bp, DROSOPHILA
gctataaaaattggacaaactagacacaggaacggtattcccttgcagttttattggtagtaaagttccagattcatgccatcgtgaatttcatctaagaaagcgaaaaagaaatgcgggtaaagcaaggcgttacaaggacactaaacaagggcttacagtcagataggcgaatcgggtccttgaagattgtgtaccacttcttcaggacaatcttctcgtgctttgtgcccgtttgtgccgcgattagtttcttgaggtccccaatcgtgtcgtccgggttgcacttgacgcgcacctgtgggttaatcgttggttaacgatgcttgcagttgccttgggtacttagctgcttaccttcttgccaagacgatcgttacacgttatttctatcatattttatggctttgctagacaaatcacaacaataaattcttgatttgttgtggtattattgcttagggttgtcaaataccctttaccgaataccgagtggtttgagggatcgctaattgtccgcaatgctatcgatattttatttaattttaaatatgtttaaataacaatcatatagaaagtcgaagttaaagatatcagaagtctgaaagtatacttagaaagctcaattgcttgtcatgacgcaaatctatcacatccttgtaaaacgataatatttgttaacaaatttatatttaaatttcagtcttcttcttagttatcaagccagaagtcgaatgtttcggcgttaatagaaaaataatgtatgtttgcatatttgcacacctcattcaaattatttttctttgttgaacaaaagataaaagtgtaaaaattaaattttttattcttgacccattatttctcttggttaatgaaaacaaattccgtttctcaacgttccctttaataatccatgtgaacaatcgataggcggcgaaacatcgatgattgctagaataatcgatgtgtcttccccgttcattcgaattttttcgccgctcggaatagacgtgattttgccgtcgtgacggtggaggctatttttaaaacggtcgcggcgcttgcaaacaaaattcatatccagctattcaacggaggaattcattagtacggcagtacaagaaatattactaagtatgtcacatatttgcgggcaaactgccgaaagcactgtgcggagtttttgtttgtgtgcgtgcgtgcctcatttttacattcacgtacatacatatgtacatatatgtacgctatgacgcagctgtggaaaacttgtttgggtttccatttcaccgaatcacggaatcaacgaatatttgcgcctgtgctgcgaactcattttgggcagtaagccattgtattgattatcgcgcgttgtttgtggatggcgtggtccgccggagcaccctgtagcgtctacatccctaccccgctccctggagtccgatatctgtgcgcgaaaggccgggcgggcgtcgttttcggctatgtggcccaacaccaatggatccccacggtcactggcagcaattcgcgatccgaaatgctccgccctatttttagacgcggtctttgcggcctgcctacttacctacctccccaatgcattctaattaaaaaccgggcactgcgctcatttccacacgcattgcattgcataatgcggcattaatgtggcggggaaagctcgcttcggaaagcactcgagcattgaagtgaagagaccgaatgttttccagctgcccaattgtaaacaacccacgcctagcacgcacacacacgcacacgcacacacacacagactggttttaatgtttactccaaataaatcgttgcccatgttaattatttgtgtcttcgcagggcccgagcactggagggaatctaatcatgagcgaaaatacataccagatagaaacgcgtcggcggtcgcgttccaagacccccttcctgagatcgagctgcgaccatgagaactgtgagcacgccggagaggaggggcatgtgcaccacctcaaaaggaaatcggcggcccccaatgtgcagtaagtatctgggatactcccgaaataggcctacggacgaagccctttatcgcgaacccataacattatttttagcccttataagtagtaaaattgtaagcatacaatatgtttacggagttcgagtcaatttcattttgagaattaggagaattcagtttaaactctataattatttcctatttggtcctgagtcacctttttctatactgaccattggtttcagtaagcaagttggactgtagtaagacacatccatagcgactgtatgtttgtatgccgtgtgctgccgccatgacgtcacctttttgttattcacgctcgccgcgaatttgaatttcgaagcgggtagaaaacgaaggcaaagccgcatacagggtgcagcatctggtcgagcttcgttagtttttggcgcctatttcgagagcgcctggtcggtctgatgatcagtcttcaagactcgatgacgacattcggagtccaacgtcggccgtcagaaatcgttttcacgttttagcctctaaatcgagcatgctggggtgggctaacagtcgtttgcgctgaaggccagcggcggttataagcatatttttgtgtttttgttttgatacgttgtactcgtcgtttcaaacgattccgagcacgttatcacggacttactgaaatatttttcccaaatcttacctcttctctgcagaacgataatagaggagcatatagtggagtcgagtatcagtaagaaaacccgggcaaaagcgttcgcccagctgacctcggactattcgagcgacgacatgactccggatgccaaacgcaaacagaactcgatcacggccacagtcacgtcgattctcaccaagcgatccggcggcgccacatcgacaccgcggaacagaagccagctggagaccacacaaaacacgctgaattccgcccaggaaaagctaaaccaatcgaacggtaacctcagctcgggaaatgtcagcgattatctggcctacatcgagtacagggatgctggtgaatactggaagtgagtgaatcatttctacacattttaaacagtatactaatgatgctattttgcagcaaaactcccaagacggactatacctactcagaactgtcccctcaccgacgccagttggcgccaggaattgtggccatgcccaatatgtccagaaagagcctagagaaccataacgatcgagtcaactacatggtccagcagaaccctgcgcaagaggagttcatccgccgccgctaccagtccaagtatacccagcaggttaactatgactccgcagatgaactggacgccacatttgggcagcaaaagcagagctggtggcttatccgcctcatccaactggttgttagcagcattaccaccgtgtggagtcgggtgaccaatctctcggccacggagacgactgcctatcaaaactaccacgctaagcgccagcagagtcaacaagttggactttggtggaaaatagtacagaccatcggaggaggacttgcaagtttgctgcgctacctgtatgttttcatcggatcggtgctgagtttggacacgtggttgctgcgatcctcggatgcggaaaacaagtcgaaaaagcgcttcctcatatttctgctgattttgttgcccttgctgctgctgtcgggtgagtaggatttaaagcaccgtccgatttttgatgtaaagtaaaatatgttagagcgtgtgccgtgaccttgtaccggttcgagaattcatactacatgcatatagatcacctccagtcgttgtatttataaactcgtctggtcgttggcagtcgcgtgacgccatcgataatttgttagtaaaatcccgcggatcagatttaagtggccatgtgatgacatattttattttccattcaccgtctgccaaggttaaacgcctaatttgctttgcctttgcaggtctgttctattacatacaccccaatgaaactttcccacccaaatccctgtccgaatacacattcaccctacctgagttgcccaaaatcgatgtgaaagactacctgaaccaggagcagttcgaatcgctacgctctcaggccgccgagcatgcggtccgcgttcgcgattgggccgacgactacgttttgtacttgagaaccatcggtcagaacgtggtcaacaagggtcgtcagttatttcagggcgatgataaagtctattatgagcgtgtgtagggaacatctgcaatgggcaggctacagctaccagatttagtgatctggttgggtgcaacgccccttgcacttagacaaatatgagaaactttctttatgaacaatatgagtacaaaataaagcatttgatccgttttttgtccgtctgcttgacccgcagttttgcgcacttactttatagtttttcgtcccgtcatttacccacttcataggcaaacccacctctcataccccaccatactaaccgacacaattcccaacaaaatgcaacatcacaggctgatgggagaaggatagagctcgccgctgttcaaattgtaaaactttcgtaatcgttaacttcattcttgtccaacaattagggccgttatccgtctgggttagtgccctaactaaatcttacttgttgttaaacaacgtttaattgtaatttgtgcactgtttgctttgtaatagtctatacaaaaataaatcgcaaacaatttcatatgaaacatcaagtacaaagaagagttgtttgttttatttgccatttgttggaagttcgctaaatggtaagtaagatgtaaacaaagcaatattagttggccagaatcgaactctatccttctgcatttgtgttggaataaccccaaaaacgagttccctgttacctcagtccggttgataattgaagttggtagggactgtaaatgtagaaggattgccaactaatagtgctatgtttaattttctccttccccaggatggttgctcttgcaggaggatcaacgtagtgcttacgttcagcgtgcggaagcactgttgccgctgccactatctattttcggctccctacgtagtcgattttcaaatgctggagccaccttgaaaagttggatggaagtgcccaccgtcaggagtccccagcgggaagccgaggccattaaggtaaacatggccagcattgaacagaacatccagaaagccttgactgccgaggaatacgaaaatatcttaaaccatgtaaacagctacgtgcagcagttggtcgagctgaaaatgcagcagcattccaaggagctcgcaccgcaacagattgaactctttgttaagctgatgaaggaaaacctcaagcagattatgtacaaaacggagctaagcgaaaaggatttgtctgatctggccataaaactgaaactggagctgcaaagctcaggcggttggcaagatggagcgaaactatcacaagctaacttagaggagataaccaagctaattaaagcagaggttcacctccacgaatcgcactacaccattcaattggacaggatagactttgcatccctgctggagcgtattcttgctgcgccagcattggcagactttgtagatgctcgaataagtcttcgggtgggagagctcgagccaaaggagagttccggttcctcagatgcagaagtccaaattgagcgtctgaacagggaaatcgccttcattaagttggctctc

SEQ ID NO: 6143 - DNA, 2002 bp, DROSOPHILA
cggaatagacgtgattttgccgtcgtgacggtggaggctatttttaaaacggtcgcggcgcttgcaaacaaaattcatatccagctattcaacggaggaattcattagtacggcagtacaagaaatattactaaggcccgagcactggagggaatctaatcatgagcgaaaatacataccagatagaaacgcgtcggcggtcgcgttccaagacccccttcctgagatcgagctgcgaccatgagaactgtgagcacgccggagaggaggggcatgtgcaccacctcaaaaggaaatcggcggcccccaatgtgcaaacgataatagaggagcatatagtggagtcgagtatcagtaagaaaacccgggcaaaagcgttcgcccagctgacctcggactattcgagcgacgacatgactccggatgccaaacgcaaacagaactcgatcacggccacagtcacgtcgattctcaccaagcgatccggcggcgccacatcgacaccgcggaacagaagccagctggagaccacacaaaacacgctgaattccgcccaggaaaagctaaaccaatcgaacggtaacctcagctcgggaaatgtcagcgattatctggcctacatcgagtacagggatgctggtgaatactggaacaaaactcccaagacggactatacctactcagaactgtcccctcaccgacgccagttggcgccaggaattgtggccatgcccaatatgtccagaaagagcctagagaaccataacgatcgagtcaactacatggtccagcagaaccctgcgcaagaggagttcatccgccgccgctaccagtccaagtatacccagcaggttaactatgactccgcagatgaactggacgccacatttgggcagcaaaagcagagctggtggcttatccgcctcatccaactggttgttagcagcattaccaccgtgtggagtcgggtgaccaatctctcggccacggagacgactgcctatcaaaactaccacgctaagcgccagcagagtcaacaagttggactttggtggaaaatagtacagaccatcggaggaggacttgcaagtttgctgcgctacctgtatgttttcatcggatcggtgctgagtttggacacgtggttgctgcgatcctcggatgcggaaaacaagtcgaaaaagcgcttcctcatatttctgctgattttgttgcccttgctgctgctgtcgggtctgttctattacatacaccccaatgaaactttcccacccaaatccctgtccgaatacacattcaccctacctgagttgcccaaaatcgatgtgaaagactacctgaaccaggagcagttcgaatcgctacgctctcaggccgccgagcatgcggtccgcgttcgcgattgggccgacgactacgttttgtacttgagaaccatcggtcagaacgtggtcaacaagggtcgtcagttatttcagggcgatgataaagtctattatgagcgtgtgtagggaacatctgcaatgggcaggctacagctaccagatttagtgatctggttgggtgcaacgccccttgcacttagacaaatatgagaaactttctttatgaacaatatgagtacaaaataaagcatttgatccgttttttgtccgtctgcttgacccgcagttttgcgcacttactttatagtttttcgtcccgtcatttacccacttcataggcaaacccacctctcataccccaccatactaaccgacacaattcccaacaaaatgcaacatcacaggctgatgggagaaggatagagctcgccgctgttcaaattgtaaaactttcgtaatcgttaacttcattcttgtccaacaattagggccgttatccgtctgggttagtgccctaactaaatcttacttgttgttaaacaacgtttaattgtaatttgtgcactgtttgctttgtaatagtctatacaaaaataaatcgcaaacaatttcatatg

SEQ ID NO: 6144 - protein, 449 aa, DROSOPHILA
MSENTYQIETRRRSRSKTPFLRSSCDHENCEHAGEEGHVHHLKRKSAAPNVQTIIEEHIVESSISKKTRAKAFAQLTSDYSSDDMTPDAKRKQNSITATVTSILTKRSGGATSTPRNRSQLETTQNTLNSAQEKLNQSNGNLSSGNVSDYLAYIEYRDAGEYWNKTPKTDYTYSELSPHRRQLAPGIVAMPNMSRKSLENHNDRVNYMVQQNPAQEEFIRRRYQSKYTQQVNYDSADELDATFGQQKQSWWLIRLIQLVVSSITTVWSRVTNLSATETTAYQNYHAKRQQSQQVGLWWKIVQTIGGGLASLLRYLYVFIGSVLSLDTWLLRSSDAENKSKKRFLIFLLILLPLLLLSGLFYYIHPNETFPPKSLSEYTFTLPELPKIDVKDYLNQEQFESLRSQAAEHAVRVRDWADDYVLYLRTIGQNVVNKGRQLFQGDDKVYYERV

SEQ ID NO: 6145 - DNA, 2753 bp, DROSOPHILA
atagtttcttggtctttcattttgtatgttatttgctaaattttctattaatttaatttcttagtcgactatatacacgtatgtgtattatatacagctgtgttgaaaattgtagccagttaagaaggcaaggttgaagattgcagttttttataacaatgtagcctagttgtatttaaggccaatataaaatccatatatgtatgtatataatatatacttacttccctacatcgaagaaccgttgaaaaggcccccaaattttgcacgaattgttcctgatttttatgcggtttaatgaacttgaactcttatcagtcaggttggctttcttgatattgcccaggagagagctgtaatgcaacaaaagaagcggaataaacaaagtcggtgatcttactcatgccattcggcgtcatgtgaatttattttaggattttgaacttggttgagttgggaaataaagcagggctatcgaaattgggtcgccatttcttttgctagactttgtcgctttggatatacgattacttaggataaatataaaaaatcgactttattttaaagtttacatcatctattgcacatatactttataagcttaaaaattgtactttacgttactcaagatttatcaacaagacgatcgcaatacgtaagttataacattaaagttacatgcctataagtatgcaaatattttgtcagcgtttgtgtatatatatggcatatacgtctttagctttaaaatgcgtctttaaataattgtaatttacgatcgcaatacgtaagttataacattaaagttacatgcctataagtatgcaaatattttgtcagcgtttgtgtatatatatggcatatacgtctttagctttaaaatgcgtctttaaataattgtaatttacgaaggattcaaaatttttaagaaaatacctctgcccaatacgtcagatcacatgttcatggagaaatcattttccaaccacccactcagtttgtagcagtacaaacaccccattacacatttatcactaaacattcaaagaattttccaaacttttactctgttttaaacacgatgacgtccatgctgaataccccgatagtctccatcttcgatttgatggtggaacgtcacatcaggctgcgcagggaactgaatggaaatcttccgccagttcgtcggcctaaagcagcacgtggagctgccgacggaaagaaacctttcaaatacaaaccaagtccgatggagtttcccttgccagaaacactggaattgatgtctccgccagcggcaaatgccattactgccgcgcatttgacccagaaacacactttccttaagatccagccaccgagcgagaagaacgcaattaagaagctggtggagaagatgtcccatggacgaggcaagaccaagaccgtgtcgccaaggcactccctgtccagcaagaagaccagtgccaattcctccaagacggtcgtcattcagcctcgcaaaaggaaagtagccgggcagggatcattccgtgctcagccaaagctcggcaagaccagttccactcagttgaagcgacaacccctctctcccagaagggcagaatctacagctaaggatgccagtacgctgagcaagacgaagaccaagaagagttcgcctgaaaagtcgggtgcacagatgcgaaataccaggtctgcagatcgactcggcaatgcagagattccggtctcaaaacgatggcgtctttagaagcgatagatataccagtagattttcattcattcaagctaatcaaatttgcaccaagtaatcaacaactttaatcacagtgatccctccatgtgatggaccgcactgaatcccacatgaaggcgatccaaattgaaaatgtacttaaatatggattgtctagtttatatacacatgaataaaaatgtcatgaaatgaaataaaggcgttatttttttattttatttattcggttttataataaattagaattttcattgctgcagcttaacattcggtctcttattcttgtatgttctgtttaataagcctaaattgtgacacaaatcgtaagccaatttagctagggcccaaattaatttgacaagagttagtttttagcgtggtattaaccaacttaaaaattttgttagcttagatctaaatgtatttttcttaattattccggtttagttttctcttcacattcaattcgcacaggttcctgcttttttcaagcttttgctttgtttatttttgctctggtacattaaaatgcaactactacagactaacaatacttggccatatatacggattatatatatggtgtatatatagagttacgcagttactggccatagccttgacttgcgatttggattaaatagtttgaagcatcttgtttctgattcttgttgtggtattggtatcggtatcgtctgtaaacgggcgccaaaaatcgaaaaagggtaaagagttgggaggagttatacaaaagaacgaaaacattgctcacaattgtttcgattggttttacaaaagtattgtacacaataagtattttgtataatcgtttttatcaaatttcccctagccatggactggcaattatattaaagttatagttattatatactctccagtttgccagttttgcgcttgctcgacatgtaaatgaattttctaaaacaaaaattcagggcgctctctctcttgatttgtttcggtttttggtatg

SEQ ID NO: 6146 - DNA, 753 bp, DROSOPHILA
gtagcagtacaaacaccccattacacatttatcactaaacattcaaagaattttccaaacttttactctgttttaaacacgatgacgtccatgctgaataccccgatagtctccatcttcgatttgatggtggaacgtcacatcaggctgcgcagggaactgaatggaaatcttccgccagttcgtcggcctaaagcagcacgtggagctgccgacggaaagaaacctttcaaatacaaaccaagtccgatggagtttcccttgccagaaacactggaattgatgtctccgccagcggcaaatgccattactgccgcgcatttgacccagaaacacactttccttaagatccagccaccgagcgagaagaacgcaattaagaagctggtggagaagatgtcccatggacgaggcaagaccaagaccgtgtcgccaaggcactccctgtccagcaagaagaccagtgccaattcctccaagacggtcgtcattcagcctcgcaaaaggaaagtagccgggcagggatcattccgtgctcagccaaagctcggcaagaccagttccactcagttgaagcgacaacccctctctcccagaagggcagaatctacagctaaggatgccagtacgctgagcaagacgaagaccaagaagagttcgcctgaaaagtcgggtgcacagatgcgaaataccaggtctgcagatcgactcggcaatgcagagattccggtctcaaaacgatggcgtctttag

SEQ ID NO: 6147 - protein, 220 aa, DROSOPHILA
MLNTPIVSIFDLMVERHIRLRRELNGNLPPVRRPKAARGAADGKKPFKYKPSPMEFPLPETLELMSPPAANAITAAHLTQKHTFLKIQPPSEKNAIKKLVEKMSHGRGKTKTVSPRHSLSSKKTSANSSKTVVIQPRKRKVAGQGSFRAQPKLGKTSSTQLKRQPLSPRRAESTAKDASTLSKTKTKKSSPEKSGAQMRNTRSADRLGNAEIPVSKRWRL

SEQ ID NO: 6148 - DNA, 3941 bp, DROSOPHILA
tggaaacactttgcgaggcttgactgtggccacttaccttcgccttgttgttgttgtcctgcgtcttggaggcctccttgtgctcctttttctccctctccacgcgcttctccaccctcagctccctctgcaacttgcgtttttcgcgtatccgcattgtttgtgctttccgtgcaatttacacggcaattgccgtttgttttcgtcttgtttgtttttgttgctgctgctgcgcccactcaatttcgcccaccccttgcaccctttctgctctctcactcacacacccgcccgcctgtgtgtgtgtgtccgtgcggctgtgtgtgtgcgatggctacgattatgcgcgttgactgtcaagcgaattcaaatcatttcgtcactgcttttctcgcttttctttggcctttcaatgcgctttggctctattcgctttcgttttctcttcctaggcactcgatttgtcttctgattgtgattttccaactggccgtgcgctgcaccttgcgtattttccgatgtccgtgcgaactagacgacgacccatacaaaaatagctgccgcgttatctcgcgcagttttcattctctgctcgctccctctctcgctctcgcatgcgcaacgtgggcaactagaacggaagggaagtcggcgtgtgcgagagtgtgtgtgcgtgtgaccagctgagagggtgcaactgcgcatgcgacaactttactgttactttcgccatgtggcaactctgcaggcgatcgctttttaagtagagtaagattaatgagaacatacatatgtatgtatgtattttgttttcagtttaagaatgaattgatttcacaagatctgcaactaactgcactgtaaaatataactataaagtctttgcgaattgtaatcaatatttaatttaaattaatcgaaccaccaccaattggaaacccacgagtccatacatttcgaaaataatctttattttaacgcttttctccggctaatttgtttaaccgaatttggtgaagtgtcgcaggatgtgcgacatggccgcgggattatcggcaggaaccatgtgaccagcccggttgacccaaaacatgctgaagttgccataggtcttctcgtaaccctcgagaactcgatctacggtgattcccacgcgcggagagacctggtaagatggcttggcggaccattccattgcttcgatccagttgacggctcccggagtggcgcaaatcaggtccagtcctccggagaacacgcccacttttacggtggtgttgttcagcagttcacccactaaaagtgtcataaggctataatttgaggtagcacccagacggttgaaacataccaacatccacagctggcttcatgaaatcgcccatcagcttggtgaaggtggtgccgctctgggcgccccatttcactccggtgttgattccgagggcctcggtcacgggtccaagcattagatcctccagcaatttgtcgcggtcctcatccacatcgaatttcacgagggtgcgatacatgacctctggataagtggttgatgagaatcagctcggtaagttacgcaacggatcttaccctccggagtcatggcagctctggacatcaacctgtactgatcacccaatgttggggtctccacgttatagaagtccactcccttggactcgcgcagcaccactgactgggtggagctccactgcaaagtggcctgtgtccacttctcgcggtcaacatagtccttagtcttcagggccgaagcttcaatcttgtcatggccatcctgatccacgattcccaactgcagcaggaagggagcccacgagagcacagagtctatgggtgaggtccagggatctcccaaggccaccgaaacaaagttgctctcgatctcaccgcgcttgatggcgtaatccaactccaaagcgaactccggggccatctttccgccataactctcgcagaagatgtgcagcggcacagtcttgaattccgggtggtttgtgtagaagcccttcatcagctcaacgagatccagggcgatctgcttgttgttggtcgtgtagtaagaagatccgtccacgtagctgaaaccactgcccacgggattgtcgatgaacatcacgttcatgtccttcacccaagtccagtcgcggtagctgccgtcgagcttcaggggacccaactcctcaaagtttccgtatcccgttgaggaggcacctggacctccttggagccaaatggccagcggacgctccgtgtaactggagacattggcggtggtgtagtacagccagtagaacatgtgggcgccagtcctgacatccacaaatccccaatcctgatcaccgggtccatagcccttgcgtgctgagagtatattgaattatagctcatttcgattaaatagttattaatatacaaagctctttgattttgtaatttcatgatagcccctgatttctagggaacacttgagaaatctagcctttaagtatattaaacggctgcacgagtagccatttagataagattaattgttatagatagtgtagatagttgattgtattgtcttataacaaaccgaatagcggttggtcactgtatcttttacaatggtaataaggtctgtccccaaacgattcataagtatttcaatctacggatataaaagtaggtaaaaaagtctgtaacagataattctgttggcctgttctacaagtcgtaaagaaccgtttgttttggaacactttctcactgattagcacccctaattggaatacaaatcacgattctcaccgtcaacggaagccaagccggcaaatcccagtagggccaaaagtgcgatgatagcgcgtccagccatgttgcaccagtgtttcagttccaattccaagagacaccgatcgagagacaaccgcacacttggcagttccactgccaattgatcgctggttgctcccagacatcgaaggtaaaatagcaacagccagcacctgacacacctggaattcgtaatctgcgggcaggggaactgtgtttgcagagtatttatggcccttcgctggacggtgacgcggctttttggtcaatctgtgcttgtcactcgtccgatttgccgaatctttgtgtcatatatttagatagagcctatgaagctccaaaatcatcgcaaagattgcactttgctatcttgagtgggttttccgagggcttttcctattatttttcggtatcacttgcggtttatcccacgtgacatgcgtgaaagatatctaaggtgtctcccaaaaactctttttaaatcatcagcattctttgattgattgactatattatttttaggtgttcatataatcatatatgcatcaattctgggcattgctttttaaagagcagattaagacatacatttgacatttatcaaaataactaataggataacttccccagcttctataagcaaaaaatccattacgatttacattatatactttcagtaaaacactcctctatttttagacgaatatagtatacaactggcttgcatactgagtttattataattcaatttaaatgaatttagccaaatgaggtaaactctcgaagtacatgactcatagccgcagggttgtccgccggagccatgtgaccacttcggttgatccagaacatggtaaagttaccgcccgtcttttgatagccctccaagatgcgatccaccgtgatgccattgcgtggagcagccaggtactcgtcctttcggctccagtccagcttggctatccagttgacggtgcccggtgtggcgcaaatcaaatccaggccaccggagaatacgccgaccttcagaggagtcttctccagcaattcgttcactgtcattcaatggatgtcagacgctttcgttatataagaagtaatatccc

SEQ ID NO: 6149 - DNA, 1404 bp, DROSOPHILA
ccaagtgtgcggttgtctctcgatcggtgtctcttggaattggaactgaaacactggtgcaacatggctggacgcgctatcatcgcacttttggccctactgggatttgccggcttggcttccgttgacgcacgcaagggctatggacccggtgatcaggattggggatttgtggatgtcaggactggcgcccacatgttctactggctgtactacaccaccgccaatgtctccagttacacggagcgtccgctggccatttggctccaaggaggtccaggtgcctcctcaacgggatacggaaactttgaggagttgggtcccctgaagctcgacggcagctaccgcgactggacttgggtgaaggacatgaacgtgatgttcatcgacaatcccgtgggcagtggtttcagctacgtggacggatcttcttactacacgaccaacaacaagcagatcgccctggatctcgttgagctgatgaagggcttctacacaaaccacccggaattcaagactgtgccgctgcacatcttctgcgagagttatggcggaaagatggccccggagttcgctttggagttggattacgccatcaagcgcggtgagatcgagagcaactttgtttcggtggccttgggagatccctggacctcacccatagactctgtgctctcgtgggctcccttcctgctgcagttgggaatcgtggatcaggatggccatgacaagattgaagcttcggccctgaagactaaggactatgttgaccgcgagaagtggacacaggccactttgcagtggagctccacccagtcagtggtgctgcgcgagtccaagggagtggacttctataacgtggagaccccaacattgggtgatcagtacaggttgatgtccagagctgccatgactccggaggaggtcatgtatcgcaccctcgtgaaattcgatgtggatgaggaccgcgacaaattgctggaggatctaatgcttggacccgtgaccgaggccctcggaatcaacaccggagtgaaatggggcgcccagagcggcaccaccttcaccaagctgatgggcgatttcatgaagccagctgtggatgttgtgggtgaactgctgaacaacaccaccgtaaaagtgggcgtgttctccggaggactggacctgatttgcgccactccgggagccgtcaactggatcgaagcaatggaatggtccgccaagccatcttaccaggtctctccgcgcgtgggaatcaccgtagatcgagttctcgagggttacgagaagacctatggcaacttcagcatgttttgggtcaaccgggctggtcacatggttcctgccgataatcccgcggccatgtcgcacatcctgcgacacttcaccaaattcggttaa

SEQ ID NO: 6150 - protein, 446 aa, DROSOPHILA
MAGRAIIALLALLGFAGLASVDARKGYGPGDQDWGFVDVRTGAHMFYWLYYTTANVSSYTERPLAIWLQGGPGASSTGYGNFEELGPLKLDGSYRDWTWVKDMNVMFIDNPVGSGFSYVDGSSYYTTNNKQIALDLVELMKGFYTNHPEFKTVPLHIFCESYGGKMAPEFALELDYAIKRGEIESNFVSVALGDPWTSPIDSVLSWAPFLLQLGIVDQDGHDKIEASALKTKDYVDREKWTQATLQWSSTQSVVLRESKGVDFYNVETPTLGDQYRLMSRAAMTPEEVMYRTLVKFDVDEDRDKLLEDLMLGPVTEALGINTGVKWGAQSGTTFTKLMGDFMKPAVDVVGELLNNTTVKVGVFSGGLDLICATPGAVNWIEAMEWSAKPSYQVSPRVGITVDRVLEGYEKTYGNFSMFWVNRAGHMVPADNPAAMSHILRHFTKFG

SEQ ID NO: 6151 - DNA, 2940 bp, DROSOPHILA
taataatgaatgaatatgaatgaagaacgaaccaccaacaccccccgccccgccccgcacgatgggcaacttatcaaagccaaaacgtgcccaaaacccacacaagcgcacacactctaaaggaatttacatggacatgcggcaggacattgcgactaggtggctgaaggggatcgggagtccgggtccgagtggctgacttcctcgccctgttggaacgaagacgaatgagtgtaaaaattgccaacggcatgtgataacaacgccgtatccgggcgtaaccagccaggacttcgaatgtccatttagatggcgcttgtgtgtatgtgatattgagtcaccttgtattcttggcccggccatgtaaatgaaaatcaaacatgcaagggttgataaagaaaatcgcgaaattctaggtttttcccggactttatcctcttgcctgtttcccccattttccggtgtgtgtgtgttagcttgtgtgcttttctgggggagcgcccactattgaaatatatgttttggcgctctccactgtgttctctgtgttttgcctttcactttctctgatttcactttcgttccttttaattaaatggatttctcggccggctttaattaacatcaaatttatctttacgcccccgtgcacgtgtagcaataatgttcggcgattatgggttcattacccgctgtgccggtggcctaggcctaaatgtttacaattttccaggtttaaggtaacatttgagccaaaggttcaatgccgccatggacccgatgacctagtaaaaaagaaaaagaaaaggaaagcacacacctttaggcctaagtggatttccatgttcgcctgcagttttcgcgacttggccataaatctagagctcctaacatggaggcgttggtcacagaatgtgggtcaaccaacgatttacaatatattaatttaaggccacatcgaaaagtagaagcgaaagtaacaaaaaattcaaaggatcaatcagttgatgcgacacacgctgctctcgctcttcgctcttgtccaattgccatggaactcctcatgacgcaaacccatggcctgagcctccgacgtcgtggaatccgtagtgctggccagatggagacgctccgaagcgaagctatccaagctggtggagtgcttacaaggatggattttggtcatgaactccctttggctgcagcctgcattctcctgattgttccggatgatctcacgggcaaaacgggccaataacttctgtttgtggtgacgcttgctgagtggtccatgggcacagttctctcggatccagcgacgagcctcccgacatcctagatatatactctggttgctaaacgtctttgtatccaacatgaagccacgattgcccagcagtccgaagcccagatcgaaaatattgcgacccaggttgagcggatttggtccgtccttggactggaacttattcggaccgacggcatccataggctccttggtttcctggtagaatcggcgatcctccggcgtgcaatacgtccagggtttgaaactcatcgtgtaatgatccttcatctcaaagtcgacgggcagactatcattgaagttaacctgatcgatcgagaccagtctgccattgtgatgggttacttgataggtaacgcccaaggaatcaggaatttgtatggtgccttttccgtggaaacgattgttgagaaactctcccgtgtagcatgtcccatccggataaatgtagacacccatctcctgcatgcccaactcatcactgggaccaacgtatctggatccagtcaacagaatatcaacctgggtaatgcttgaagattttgttgtcttctgctccatgatttttagaaagcttatttacactgtataccaaaaataacaattttaaagttgagtaaatgttcgttgaaatgggtgttcaaataatttactatatattatttgagataacaagttttgccgaactaatatgatgccactaatggcaatttacttaaataattataacttaaatgagtaacgcccctcaagataatcaaagaaatttcactaatgttcgctaattacccagtgaatatctatataaactcgtcagtttaactaggcagtaacaaccttcgcttgaaatcatgaagctattggtagttttcttgggtctcactctcgtcgcagcaggaagtgctaagaaggattccgaggatcctgatcacattataaccaatggaagccccgcttatgaaggtcaggcaccctatgtggtgggcatggcctttggacagagcaacatctggtgcagtggcactattataggcgacacctggatccttacatccgctcagtgtctaacgggcagttccggagtgaccatctactttggagccacccggctgagtcaggcccagtttacggtgacagtgggaactagtgagtacgttacgggtaatcaacatctcgccctggttcgagttcctcgagtcggattcagcaaccgggtcaaccgggtggcccttccatcactgagaaatcgatcccagcgctacgagaactggtgggcaaatgtctgtggatggggagtgaccaccttcagcaatggactcaccgatgcgctgcaatgcgtcgaccttcagataatgtccaataacgagtgtatcgccttctacggatccaccaccgtctccgatcagatcctgtgcacccgtacgcccagcggcagatccacttgctttggcgatgccggcagccccctgatcaccaaacaggattccaccgtggtgggcatttccgcatttgtggcctccaacgggtgcaccttgggattgcccgctggatttgctaggatcaccagcgcactggattggatccatcaaaggactggaatcgcctactaatgggtcaaatagtagcaacattta

SEQ ID NO: 6152 - DNA, 940 bp, DROSOPHILA
atttcaacgaacatttactcaactttaaaattgttatttttggtatacagtgtaaataagctttctaaaaatcatggagcagaagacaacaaaatcttcaagcattacccaggttgatattctgttgactggatccagatacgttggtcccagtgatgagttgggcatgcaggagatgggtgtctacatttatccggatgggacatgctacacgggagagtttctcaacaatcgtttccacggaaaaggcaccatacaaattcctgattccttgggcgttacctatcaagtaacccatcacaatggcagactggtctcgatcgatcaggttaacttcaatgatagtctgcccgtcgactttgagatgaaggatcattacacgatgagtttcaaaccctggacgtattgcacgccggaggatcgccgattctaccaggaaaccaaggagcctatggatgccgtcggtccgaataagttccagtccaaggacggaccaaatccgctcaacctgggtcgcaatattttcgatctgggcttcggactgctgggcaatcgtggcttcatgttggatacaaagacgtttagcaaccagagtatatatctaggatgtcgggaggctcgtcgctggatccgagagaactgtgcccatggaccactcagcaagcgtcaccacaaacagaagttattggcccgttttgcccgtgagatcatccggaacaatcaggagaatgcaggctgcagccaaagggagttcatgaccaaaatccatccttgtaagcactccaccagcttggatagcttcgcttcggagcgtctccatctggccagcactacggattccacgacgtcggaggctcaggccatgggtttgcgtcatgaggagttccatggcaattggacaagagcgaagagcgagagcagcgtgtgtcgcatcaactga

SEQ ID NO: 6153 - protein, 288 aa, DROSOPHILA
MEQKTTKSSSITQVDILLTGSRYVGPSDELGMQEMGVYIYPDGTCYTGEFLNNRFHGKGTIQIPDSLGVTYQVTHHNGRLVSIDQVNFNDSLPVDFEMKDHYTMSFKPWTYCTPEDRRFYQETKEPMDAVGPNKFQSKDGPNPLNLGRNIFDLGFGLLGNRGFMLDTKTFSNQSIYLGCREARRWIRENCAHGPLSKRHHKQKLLARFAREIIRNNQENAGCSQREFMTKIHPCKHSTSLDSFASERLHLASTTDSTTSEAQAMGLRHEEFHGNWTRAKSESSVCRIN

SEQ ID NO: 6154 - DNA, 9264 bp, DROSOPHILA
gagggcattgctcaaacatttatatgtacttttaagcaattaatataaactgatttatttttgcgtgtgctgaatttcgtaatagtctatattagcctttacttttcctaacgcgtaatatttgtggtaggcaacactgcgtatgattaatgtacttgcagcgactacgtatacgtaatattctattacaggcgcgatttgttgttccaagcagaagagaaacaatcatagcatactttcaggcgcaggcgtaaacccttaacgaaaggaagtcaagtgggtcacattaagttcaacgtaacaaaacaaccagtccacaaaataaacactttgaagttcagttttattttattatatattgaacatgacacacatcgttttgggttaaaacttgggcttcgcgcatccgtcgctgttttagtaagttagatttcgaacataaactggactctgaaacgcaaacaagggcttcgataaatgcttctgttagtacactacaaatacgatggaggggcgattctagattccttggagcgcaagcccattgaaaatggtctcttattatatacgttgcattcgcttaaatctgactgctgtatgtacatattgctttcctgttcctctctctttttcgtggctatcgctttgctttattgcacgcttaataattaatgtgtttattaaaattatcgaaacaaaatcagcataggatcgggtgggggaagggaaatgggctgtggaagggggcacgaaggcgggggcggggacatgagcacaagttcttggagcacataataaatagttgcaggcacttacataactggcgttcagatggaaccgattagggattaacatttaaaatagaaatcattaagattagtgtttagctttgtatgttacacaaggcacgcggctggcggcattcggtcaggtgggttgagggcggtgggcagatggtcaggtgccttcctccagcatccccgtaggcactgacaatcgcctagtactggtaccacggctgtcggcgcacccactgcaaacgattgctggtttgatccgaccggatcttgatgctggctccttcggcggcgcgcaccgtctccttcacctggaatcgcacatagaaagagaggatttagcaatgaaaaggaactggtaaaggtaaagcccagaagcttcaggaatggcgactccttcctgtgaatttggctaggcaattactaagcatttcgagacttacgctctgcatcaggttctgggcattgcccacaagcatctcggtggcctcgcgatcctcgtcggatccctgggcgcccagcatcgtggccttcacggtggacaggattttcagctgggtgccgatggtggggatgcgttcgcacacttggagcaggttggtgcggatgcgtcgatcagtgcactggcgggccaactccttagccaatcgggtcacgtcctcggaggcctcggcgatcttcttggcggtggcgatcagctcccgcttgctgcccctcgaatcggacagcactagctcgctgaggcgggccatcaggatcgccatgcgcttggcggccgcaatgatctcgttgtccttggacgaccactggcgcacctcctggtgcaagccacgggcggcgatctacgggcaaaaagcggattagtatccaatctaacgctccaaatggcagttctactcaccaagatgggctggttggcatgtggcatcgtgcggaagacgccctcgtcttcatcatccgtttccggaggtggcggacgcactggcgccaatccttctcttggcagtggtgggcgtggaggcgcacgctcggctggcaaagacattaaacagttaacacatactttggaatatatgtggtcctgaatgcttaccattctggttggaaagatgcagggcactcagctccggaatgggtggcggcagggaagtgggcagtggtggtggctgcggtggcgcaatagcgtctcgcacctcacgcacatcgcccaggagccgctggaaggagttcttccaagcggccgctgccgccggatcggcaatgttggtggccaccagctttgcgtcgccaaccatggcgggcagcgaacgctccaaccggttggcggcggcattcaagcgctccgtgaacaccggatcctcagagttatccgcctcctgtttagctaccaacaagaccctattgatcaggcgggcaatgttcgaggtgttgtccaccatcttctgcggctggcgggcatggatagcatcctcacagagcttggcgtaaacctgcatgtgctcctcggatgttttaatgaagtccgccgggtccgtggcctggtcgcagagggtgcgcatgcgcagcacggtatccgcgtactgctgcttcaggttctgcagatgctcgtccgcggccttgctgcccggatagttcattcggatgcgaccagcgctgataagctgaggtgtgagggagtccacctgggcggcggaagagagcagaatctcggcgatcttcttattgccgcaggctccaccggcggccaccattctggaggtcttcgaggcgcgatcgctgaaggcctgcaggttgttggacttctggttgaagttctgctcccgtccgggtgttccctctggctggagcaccgcctccgtaaactgttttagcggggtgctcacgtccatgaagtcctgcacaatgcgattgaccagggcattctggatagccgccttcagctcgtagagcttctgggtgagctgcttggcggcctgcttggccgccgggccggatccggctgcctggcgtttgaggcgctccacttcgtcacacagctgctggatctcggccttctggtggccggggcagccctcggctaccttgcgaccctcctccacaatcaggttaatagcccgctctccgaggccaccatcgttgatttccgggtgctgaagccacttcaccgcctgctctaatcgaccctggatggtgtgggccgtctgttgaactccagccttatccacgccgagcaccgcctggtgcaccagggatttgagctctcccatgcgatcgcgtatgcccctgaccagggactccgcttggggactctggcccttgccctcctggcgcagctcgcacaaggtgttggccatagccgtcacctcatcagccagcttgcggatgggataagagtcctggggcagacagcgctctgagatctccgtagcattatcgatcacttggcgcagagccttctcgcccacgccgcctcgcaaggcatagggattcgatagccactcgttggcctgctccattttgttggaaatggcattggagagctttttcagcacagtgaggttgtccagctcgctggtgtcctcatcgtaggtagtcagctgcagcacgcggatgatctcctgcagctcgtcgctcatcctggcggccaggtagttcctgttctcagccgcttcctcagctccgcggccctgctgctccacaatgtggatgtagaccttcatactgcagatgaggattggggccagggtcttcacttgctccaagcatcgcaccaatatctcgctgtgcacctggtgggtcagctccttctcgcgggcgcccacctcccggtgcaccttgctcagacagggcgagaggtccttgaggaactgcaccagctgttccatggtgtttatcacctccgccacggctaagtagtccagtaccctcttgcactcctggatgatcttccgcacctcactctcgtcgaagcaaagcagcagcgaggaggtgccctgcagaatgccgcggcttccctcgattagcttcttgcgcgccggacccgagtacgggtcggagcggagcatatcggacgcctcctccagcagctgcgaggcaccctccacgcggtgcaatgccgagggcatgtcctggcgcaggatcttgtcgtcggagctgttgatcgtatcgcggcccaccttcacgagattagccactgccgccgacaccacctgcaccggtcgactgaggtccggcatcgcgttgccatcctcggcctcctcgtgcaggatcaccagacgagatacctgccggtcacggggaaaagtgcagtcattagtacaggattttatatttatgtatatctagaaattattcgttcggggagcttgaaatgcattggggcatcatgtaaggtgtccgacaagtcagatgttggaatcggcctcccttgaatattagcataatctaccctttgcaggaattccccagctggtattattgcgataaaataattcgtgtttgaattggcaatcttgtttcacattcgatttgtcgattgggggattttgaattagagacaaaacaattggatatctgttatatgaatgcgcctccatcggtgaccagtgattacttcattcccgttcaagcgcgatgattgatcaatcaattccaatggagttgtttatggcagcaaaactgttaatgatcttgctgcgtgatcgctcggcggcaggcccatttggacttatcgtcgatccaacggcttcgcgctccgttcattcatcgacttggggagctggtggagagcgctagaaatgaaaacggcgtgggcggcgccatggaacgccacatggtgcacggaatttggacttgacatcagcacctgctcaaggtgtttttggccatggccatctgcctatttataggcaatgagcagtgcgcagcgtccgccgacgctaatctccactgagccccattaaaccgaaactaaatcgaagcgcggctaagtcaaagacttaagacttaactggtgtaagctggcggattaggtggttagccactgagtgctgggcaatacacgtccggggtgcaccctcctgctccagaccccccccccccccgcgttgggcgccacttttgcaattagcaacaattggcctacttgattaattaattatgcaattaagctcctagtcgctagttggaaggcccctcgctgctcatccaacgactaattatacggacagagacatgtgtgcccgacttatgtatccatgcgctgatggatgtggtgaatgatcgtttttaattcatttgtttgccagcagcacccaccacactcaatccgccccacggcggatgactaatgcactgggtttgctttttggcacagatttcagaccacaatcctcactcatccgcgtcgctacagatgtgctaggtacacctacaactcccacaccttcggtcctcacctcctaaagcatgtagcctatagcctatagcctttgattttgctctgactttgctttcgccatgatttcattttcattgcttgtccgtcgtaaatgtttttattttggttgtttcctctcgctgacgccgaatgttgttgccgccgttgttggattttactaaacgtattttatgctgctatttttggaactcggccaaaaggcaccccccatccccgatgctccgatcgccacttatttgttttctttgctccgcctgatttttcattttcatttgttgcgttattaaattaaaattctgcctgtcctcagaagctcaggttggcgctggcctctgatcaacatttattcttattatttccacctcatttatttttagaccagttaagtaacgcccgaaaacaaaacaacgaagacgctgatcgctgatcgcaaatcacctccgctccgctcgtttgtttcttcgcctcatgatggaaacacacatgaatagatggatatatatggagggggcgatcggatcggaaaggacagaaagaactgtggcataaatctatatataatatatggcagaacacccaacacatgccacacgtatgcagttgggggaatcaggtgcgaatggcaactatagctaacgataggtgatcgatcagtgagttacggtggggaaagcggaaaagtggaaagtggagtcagtggtgcgcagtcacaactaccataaacatatacactgggaaaagtggacttgcataaggcagaggtttccaaacaaggcatagttaactagacgggttggtctcttatgtactttaaaacaatttttgtgaaatactttaatttactttagaacaatacatctattaaaatactgattttgctagtcaagcttaactttcagagttgctttttccagtgtagtgcatgcatgtacgtatgcatgtccttctaaccagcgtctaaataaccatggaacgttaccttcttgggcgccaatttgcttactagttatagctatgcggacgagagatttgcttgaaacgtaagtttagccctctgacccaaaacccacaggagtggaccccgtccgaggacgatgcttacctgttgggcaacaggatctagaatgctctcgatggtttttgtgtgaaagacgggcattttggctgcgcttttcgtctgattcctgttttcagtttggttgtctcagagtttattgttcctctctctttctcgtgggccagatctgtagtgagctgaaagaacgaaagaaatttaaatgagccaaatgaaccacgaagttggacaatcatctcgggggttatctctgtgaattccacctgaactgttagataagagtaagtaaggcacgccgtggcgttctagtttcttgcgagagtaaccatatctcgcttgccatggtgaaggcatgcgtttagtgatatgtttcaaaaacaaattgtgagcgatcatggatttttccaagcacaacacactccaattgactggcacgccatattcgagctgtgctgcaagtcaacgaaaatgtgaaaactacagcatgtaaatcaattgatcagcgcataactatcggccttgtgcccaattcaagttcccaacgattgatgtaaacaatcaatttaactagcctgttcagaagtgcacaaggaccttaaaagacccctcccaaaaagtcgttccctgcgttatggtaagttcccaagggtctgggtatttcgcctgaagttttctttttctgcttttcgcatatgttctgttgattcagttctgttctgttgattcagttttcttgttggggctttcgctttaataacgatgacgcatcttgtgaggtcactcgccagacttttgggggatgtcgatattgggtatcggattggaaatgaaactgctacagtgacgcactaactggccagggtgcggaccgtaattggccatgatttacggcaaaaggtggcaaacagtgggagatggtggaaaattgtggtaaagagtaaaagcgggaaatgcgaaagcgaaactcgcgccaaagacattgaaaatacgacttcctctagaggggaactgactatctgccgcgtgggagggtccaattttgggttggggttcggactggggctggggcagttctcccctctctttcgccctccagccagtgggagcacagagtatttctggactttcagaacctgcacacagtgcacacacactctctgccagatgaatatctaaatatacaagtctaaatatacaggaatagttgtgatgtacgtccgccacttatggaattttgctttcgattgatttttgccattctcaacgcccggtttgaaaattcgagctgtgggctggggtttattgacttggcggttcgtggccatttatggctaacaaattccagccaatgttgcagcaacacacacacttccaatcggacaggttgatcggagcagcttcttatcagaagctctagaagtgcgctacctagtacaccaatgggattatggatatggatcgcagattctgtttccaggcaaagtgctcccaattgggataatgatctgagccacacacacacacacactctcacacataatacactcaaacaaaatcgaagtctcgaaaaatcagcaagtgggtctcccgaacgtgatctctctctgaactggaatcactttgttattgcacattacttcactgcttctttttcgactttgtcactgggaatttattaatcacgacaccactactcttgcagcagcagcaacaattggttcacacacaaacgcaccacaacaaaaacataaaagaaatgcaaataagcagagtgaataacaaactaaatgtagcaaaacactgctgctcatcaccagcttgttgacggataattcatcgaaatggaattactccctctatatgtatgccgatgcttagttatttactttgtctggctcgattttgctgcgccccaactttcttgcccgactgttctttcaatactaaaaaaagatttcgattggggggcgcacacacacacgctggcgcactcagccagtctgcgcacagtgggcgtcataggcccagattctggctcttctaactgcgaaagctcagccgattaacagctttttaacacattttgtttcaacaaacatatcttatacgtgtaaattattttcttacatgcatacagcctatttatcttaattagtttcgaagttaagaaatccaattaagcataaaaatagaagaaatgtgcacttaagcccacttggagcgagattttgaccactgttcgagggtgacgctattatcgctgttctctattctttcgctagctcgctcgctcgctttttctgtttccccctttcttagccgctgcttcttcttgccgctgggactctggccgatgacagccagtgatatcgataggctccgcattctatgagtgatcgtatttgaaattgaatagcgaacaagttcgggattcgcaattaaataacacccgcaaatctggcaaatcgcctgtacgattgcataatagaaatatgctccatgtgcatgcgatctatttgtaacgtatttctctatttctcgcgttacgtgccatgtactcaagttagccggggagtcgggcgggggcttaataaataaatccaggggctgagcgaccatgcaacatatctttgtgagtattaaacacacgctgcactcctgctatttacgttgactgagtttgggtcttcggtgtggggctccggctcctagctattgagtgcagttttccgtgccttccgtctgcgtgagctgctgaaaaaaggcatagctttagaagaagttcacacacagccgaaacaaaacggaaaaacaaagaaaataaacaatggtaaaaacccatcaatggggacggagctctcatgccctgcaaattgggggaaaaccgaagtcaggggttacattaattcggtgaattgggcaaccaataaagg

SEQ ID NO: 6155 - DNA, 3028 bp, DROSOPHILA
acagtcgggcaagaaagttggggcgcagcaaaatcgagccagacaaactcactacagatctggcccacgagaaagagagaggaacaataaactctgagacaaccaaactgaaaacaggaatcagacgaaaagcgcagccaaaatgcccgtctttcacacaaaaaccatcgagagcattctagatcctgttgcccaacaggtatctcgtctggtgatcctgcacgaggaggccgaggatggcaacgcgatgccggacctcagtcgaccggtgcaggtggtgtcggcggcagtggctaatctcgtgaaggtgggccgcgatacgatcaacagctccgacgacaagatcctgcgccaggacatgccctcggcattgcaccgcgtggagggtgcctcgcagctgctggaggaggcgtccgatatgctccgctccgacccgtactcgggtccggcgcgcaagaagctaatcgagggaagccgcggcattctgcagggcacctcctcgctgctgctttgcttcgacgagagtgaggtgcggaagatcatccaggagtgcaagagggtactggactacttagccgtggcggaggtgataaacaccatggaacagctggtgcagttcctcaaggacctctcgccctgtctgagcaaggtgcaccgggaggtgggcgcccgcgagaaggagctgacccaccaggtgcacagcgagatattggtgcgatgcttggagcaagtgaagaccctggccccaatcctcatctgcagtatgaaggtctacatccacattgtggagcagcagggccgcggagctgaggaagcggctgagaacaggaactacctggccgccaggatgagcgacgagctgcaggagatcatccgcgtgctgcagctgactacctacgatgaggacaccagcgagctggacaacctcactgtgctgaaaaagctctccaatgccatttccaacaaaatggagcaggccaacgagtggctatcgaatccctatgccttgcgaggcggcgtgggcgagaaggctctgcgccaagtgatcgataatgctacggagatctcagagcgctgtctgccccaggactcttatcccatccgcaagctggctgatgaggtgacggctatggccaacaccttgtgcgagctgcgccaggagggcaagggccagagtccccaagcggagtccctggtcaggggcatacgcgatcgcatgggagagctcaaatccctggtgcaccaggcggtgctcggcgtggataaggctggagttcaacagacggcccacaccatccagggtcgattagagcaggcggtgaagtggcttcagcacccggaaatcaacgatggtggcctcggagagcgggctattaacctgattgtggaggagggtcgcaaggtagccgagggctgccccggccaccagaaggccgagatccagcagctgtgtgacgaagtggagcgcctcaaacgccaggcagccggatccggcccggcggccaagcaggccgccaagcagctcacccagaagctctacgagctgaaggcggctatccagaatgccctggtcaatcgcattgtgcaggacttcatggacgtgagcaccccgctaaaacagtttacggaggcggtgctccagccagagggaacacccggacgggagcagaacttcaaccagaagtccaacaacctgcaggccttcagcgatcgcgcctcgaagacctccagaatggtggccgccggtggagcctgcggcaataagaagatcgccgagattctgctctcttccgccgcccaggtggactccctcacacctcagcttatcagcgctggtcgcatccgaatgaactatccgggcagcaaggccgcggacgagcatctgcagaacctgaagcagcagtacgcggataccgtgctgcgcatgcgcaccctctgcgaccaggccacggacccggcggacttcattaaaacatccgaggagcacatgcaggtttacgccaagctctgtgaggatgctatccatgcccgccagccgcagaagatggtggacaacacctcgaacattgcccgcctgatcaatagggtcttgttggtagctaaacaggaggcggataactctgaggatccggtgttcacggagcgcttgaatgccgccgccaaccggttggagcgttcgctgcccgccatggttggcgacgcaaagctggtggccaccaacattgccgatccggcggcagcggccgcttggaagaactccttccagcggctcctgggcgatgtgcgtgaggtgcgagacgctattgcgccaccgcagccaccaccactgcccacttccctgccgccacccattccggagctgagtgccctgcatctttccaaccagaatgccgagcgtgcgcctccacgcccaccactgccaagagaaggattggcgccagtgcgtccgccacctccggaaacggatgatgaagacgagggcgtcttccgcacgatgccacatgccaaccagcccatcttgatcgccgcccgtggcttgcaccaggaggtgcgccagtggtcgtccaaggacaacgagatcattgcggccgccaagcgcatggcgatcctgatggcccgcctcagcgagctagtgctgtccgattcgaggggcagcaagcgggagctgatcgccaccgccaagaagatcgccgaggcctccgaggacgtgacccgattggctaaggagttggcccgccagtgcactgatcgacgcatccgcaccaacctgctccaagtgtgcgaacgcatccccaccatcggcacccagctgaaaatcctgtccaccgtgaaggccacgatgctgggcgcccagggatccgacgaggatcgcgaggccaccgagatgcttgtgggcaatgcccagaacctgatgcagagcgtgaaggagacggtgcgcgccgccgaaggagccagcatcaagatccggtcggatcaaaccagcaatcgtttgcagtgggtgcgccgacagccgtggtaccagtactag

SEQ ID NO: 6156 - protein, 961 aa, DROSOPHILA
MPVFHTKTIESILDPVAQQVSRLVILHEEAEDGNAMPDLSRPVQVVSAAVANLVKVGRDTINSSDDKILRQDMPSALHRVEGASQLLEEASDMLRSDPYSGPARKKLIEGSRGILQGTSSLLLCFDESEVRKIIQECKRVLDYLAVAEVINTMEQLVQFLKDLSPCLSKVHREVGAREKELTHQVHSEILVRCLEQVKTLAPILICSMKVYIHIVEQQGRGAEEAAENRNYLAARMSDELQEIIRVLQLTTYDEDTSELDNLTVLKKLSNAISNKMEQANEWLSNPYALRGGVGEKALRQVIDNATEISERCLPQDSYPIRKLADEVTAMANTLCELRQEGKGQSPQAESLVRGIRDRMGELKSLVHQAVLGVDKAGVQQTAHTIQGRLEQAVKWLQHPEINDGGLGERAINLIVEEGRKVAEGCPGHQKAEIQQLCDEVERLKRQAAGSGPAAKQAAKQLTQKLYELKAAIQNALVNRIVQDFMDVSTPLKQFTEAVLQPEGTPGREQNFNQKSNNLQAFSDRASKTSRMVAAGGACGNKKIAEILLSSAAQVDSLTPQLISAGRIRMNYPGSKAADEHLQNLKQQYADTVLRMRTLCDQATDPADFIKTSEEHMQVYAKLCEDAIHARQPQKMVDNTSNIARLINRVLLVAKQEADNSEDPVFTERLNAAANRLERSLPAMVGDAKLVATNIADPAAAAAWKNSFQRLLGDVREVRDAIAPPQPPPLPTSLPPPIPELSALHLSNQNAERAPPRPPLPREGLAPVRPPPPETDDEDEGVFRTMPHANQPILIAARGLHQEVRQWSSKDNEIIAAAKRMAILMARLSELVLSDSRGSKRELIATAKKIAEASEDVTRLAKELARQCTDRRIRTNLLQVCERIPTIGTQLKILSTVKATMLGAQGSDEDREATEMLVGNAQNLMQSVKETVRAAEGASIKIRSDQTSNRLQWVRRQPWYQY

SEQ ID NO: 6157 - DNA, 3583 bp, DROSOPHILA
gcagctttaagccttttaaactagaatttctggcgaatgcagttcggtttacagatattcgaatgtgggagagtactaagagagcgtttttcagtagagattctagggctgcaggtagctgggcagcttcatgcgcatgaacagccaggtggtgaagaaggagaccaggatgaaaatgaatcccatggcggtcagcagcaggcggttgaggttcgtcttgcccggcgtgtgcgtttggtccatgataatgaatcccagtccgccgacggtgaacaggaagctgctggccaggccctccatgatgtactgcccattcacacggtagggcataaaggccactggacgcgagtgtccgtgctcatccaccgtggctcccagactgggcggctccacaatcacgtcatatatgatacctgcgggccaatttgcatctctgtttaaccaatctcaattatagaaagcttaggactcaccgcctgtcaccagaaaataggaaaacaaaatcacactgaaaacggccatcggtgacggcattggaatgctgaatctgcgcaccttgatgttcggcggcaccaggatgtggaagggcaggttatacagtgtctcgatcatgatgaactaataatttaataactataaatttaaatatatcacggatttttcaattttcgtggcggtgtcgctgaattttgccggcgtaggcggagtttgttgttatctatcgaatagggatggacacttgtacgatactccccctgcattggtgtatttccactagacagcatctatgcttgcagctgcatcgtaagccatgtcattgtactgttaatgtcttaagttttaaactgcctaatcgatttgaatttttttataagactcaaaatatattatatgtaacatcaaacgattggcttattgatactaatgtgcttcagctgcgcagcgtgaacagcctttatatttggtcatacttagtgatgtcactattgcgctcgcgtagaaaaagaggaagatgcccccaaaataacaaacaaaacgtaactcccgatcaaaatagctttaaattgaagttaaataacgaaacaactataatggcgagtggcattaaccaagcagcaggtgggctgagtgaatttctgaagattcgtagcttagttaaccactccatttgcaggtaaactgccggcaattgcgaagaaggtgcaaaatctcggcgatatgggcgtttggcaaaaatcccgcgccttccacgatttaattggatatataaatggcaccagttcggccattcagggcattaaaaccacagacgagattttcgagtcggaaatgctcaagaagctgctgcggctattcgatgcactggagaaattggtagagcaaaatcctccattggagcagccgcagcggttcggaaacaaagcctacagggattgggcgcaggcaatgcgggaattgttgcccgaactcctagaacagctgttgccagacgacaagaagcgataccaggtggagctggggcagtatctcactgaatctttcggcaatgccaccaggatcgactacggcaccggccacgagctgtccttcctcttcttcctgtgctccctgttcaaggcggagatcctgcaggaaagggacatcgtgagtgctgcgctgagactcttcaatcggtaccttgagctcgccaggcagctgcagcgaacatacaacatggaacccgctgggagccaaggagtctggtcgctggacgatttccagttcgtgcccttcatctggggcagtgcacagctggcgggtaaacaattaagaaggattcctccaagatttcctttctgaaacgattcctttcagttaagagtccctttgatccctcgaagttcgtggacgaggcgataatcaccgagtacaaggatcacttcatgttcatcagttgcatcgactacatctgcaaggtcaagactggacactttggcgagcactctaaccagctgtggagcatcacggatgtgccaacatgggccaagatcaacgcgggactagttaagatgtaccaaaaggaggtaatctttagtcagtaatatgactaatataaagtagctttaattgaatacctagtactcagaaactactataaactatccacagattctctccaagtttcccgtgatccagcacgtctacttcggagaactgatgacattcgagcccgtctcctctggcacaactctgtccaacgcacgactgggtcatgtggctccgccgccatccaaacgcatctgcatcgggactccaaacttggtgccaccagttcctgttgccactgctcctcctccgcccgccgaatctcttagcatcgaacagaatgtgggcgactcgagcagtgagagcagcgacaacagcgtggtactacgtccatccacatcgtcgtcttctctggtggcggccgccgagggatctggggataagcccagcaaggaatagactacagaatggaggaaaatggcgatggtgtaacctgtgttaaaaattcttattaatagcgttggccaatggtccagtaaaaactgtttacacaagtacaatcgcaatttgtgttcctgggtcttaaagtttccgctttcaaatgggtacatgaagcactttcccggcgaatgtgtttcacaacatttaatccgagtttaatggaaacaaatgttctttcccatttacacaagaaaaagtacaaaaatgggaagcgatggacgagcggaaaaaaaataaacaaaatcaatatggcaaatgaggcatgcaaatagatgaactcgttgtagtacatctacttttgcgggtagaaacagcttaaaacaggacgaatttatagcagaaaaagagggaagctggaaagtggcaaaatgtaaaagttgaaaaaaaaaaacttttgcggggagtccccctgaaagcataatcatttattttcgacacatcatttatcaaaccgtacggcaggcgccagcttgccacgccccctcatttcgtcacttaaaaacttcatccggcatagttttttttttttgtttttttcttcgttgtatattttgagaaaaaccgggtaggcaaggcagcagcgaatgcattaaaactttgccgacgcattttgattgaagactttcgaaaaacacgaaaatgtgtgcttttctccattgttttggcccaaaatgtggcaacgagcgaccaacttcggtcatgttcatcaatttgaccctgtccacgcccacattcctgttttcaaaaatgaatccgttctgggttcagtttcagttcagttttggtttcggttcggtgtcggttttgtgttcttgcaaattgaatgaaatttgcggatgagctgttggcaggcgttcgaacaaggtcgaaaacatgattgaagggcggtgatgtgatagctatgatgtctgtgatggagtgggcggtggttggctggctgggcggacctttcaacctgccccactggcaattgtggccggcagcgtggctgacaaggctccaatcgagatttcggtgtttctgacctatgacactagcagttagatgggcgattctg

SEQ ID NO: 6158 - DNA, 1387 bp, DROSOPHILA
aaaaagaggaagatgcccccaaaataacaaacaaaacgtaactcccgatcaaaatagctttaaattgaagttaaataacgaaacaactataatggcgagtggcattaaccaagcagcaggtaaactgccggcaattgcgaagaaggtgcaaaatctcggcgatatgggcgtttggcaaaaatcccgcgccttccacgatttaattggatatataaatggcaccagttcggccattcagggcattaaaaccacagacgagattttcgagtcggaaatgctcaagaagctgctgcggctattcgatgcactggagaaattggtagagcaaaatcctccattggagcagccgcagcggttcggaaacaaagcctacagggattgggcgcaggcaatgcgggaattgttgcccgaactcctagaacagctgttgccagacgacaagaagcgataccaggtggagctggggcagtatctcactgaatctttcggcaatgccaccaggatcgactacggcaccggccacgagctgtccttcctcttcttcctgtgctccctgttcaaggcggagatcctgcaggaaagggacatcgtgagtgctgcgctgagactcttcaatcggtaccttgagctcgccaggcagctgcagcgaacatacaacatggaacccgctgggagccaaggagtctggtcgctggacgatttccagttcgtgcccttcatctggggcagtgcacagctggcggttaagagtccctttgatccctcgaagttcgtggacgaggcgataatcaccgagtacaaggatcacttcatgttcatcagttgcatcgactacatctgcaaggtcaagactggacactttggcgagcactctaaccagctgtggagcatcacggatgtgccaacatgggccaagatcaacgcgggactagttaagatgtaccaaaaggagattctctccaagtttcccgtgatccagcacgtctacttcggagaactgatgacattcgagcccgtctcctctggcacaactctgtccaacgcacgactgggtcatgtggctccgccgccatccaaacgcatctgcatcgggactccaaacttggtgccaccagttcctgttgccactgctcctcctccgcccgccgaatctcttagcatcgaacagaatgtgggcgactcgagcagtgagagcagcgacaacagcgtggtactacgtccatccacatcgtcgtcttctctggtggcggccgccgagggatctggggataagcccagcaaggaatagactacagaatggaggaaaatggcgatggtgtaacctgtgttaaaaattcttattaatagcgttggccaatggtccagtaaaaactgtttacacaagtac

SEQ ID NO: 6159 - protein, 398 aa, DROSOPHILA
MASGINQAAGKLPAIAKKVQNLGDMGVWQKSRAFHDLIGYINGTSSAIQGIKTTDEIFESEMLKKLLRLFDALEKLVEQNPPLEQPQRFGNKAYRDWAQAMRELLPELLEQLLPDDKKRYQVELGQYLTESFGNATRIDYGTGHELSFLFFLCSLFKAEILQERDIVSAALRLFNRYLELARQLQRTYNMEPAGSQGVWSLDDFQFVPFIWGSAQLAVKSPFDPSKFVDEAIITEYKDHFMFISCIDYICKVKTGHFGEHSNQLWSITDVPTWAKINAGLVKMYQKEILSKFPVIQHVYFGELMTFEPVSSGTTLSNARLGHVAPPPSKRICIGTPNLVPPVPVATAPPPPAESLSIEQNVGDSSSESSDNSVVLRPSTSSSSLVAAAEGSGDKPSKE

SEQ ID NO: 6160 - DNA, 2787 bp, DROSOPHILA
ttggcgaaatcttctacattcccaatgtcttggtcttcgtgtaagttatttaaggttttcataagttaactctaaatttataaatgatttttttttttaattctagtgtgtgctacttcctgctgcggcgtcgaaaggccaacgaggagaagagcgtcgtggaaatggagcagaatggtggagcaaatggtggcaatcgggcaagcgtggtgcccgatagcgaaataactagtctgtaacgtacttaatgccagtccgtgttatatatatatttttatatatttataatataaattgtatattttttgtatatttatagggaatttttatagcattttatattaccaacgagttgatctttaactttcatttgctgaaagtgtgagtttaaagttagtaagcatattaaaaacagttgtaactagtccacatataacttaattaaagtcgttgctatttttggccgagtccatttgcaaatccatttacctgaggtcatccaagtctaatttggacattttactccccttttggagtgggaagaaaattactttttcggctcaagcattttattttaagccttttgccttttgccttttgccacccactttcggattttgcccgggaaaagtggtagttttccaatcagcaaatgcattcagtttgagcagccagctgtcgttggtacaaggggcggtggcggcagctgggggcgtggccacatgtgggcgctaactgccaagttgaaacaattgggtgctaataatccccggttaatctgggtaagtgtgtgtttctggagggcattgaagcaaggattctggaggaaaacgcagacacatcacgcatcctttggcatcaatccttaatggctatctaacaacgatataaaagcccgtcgaggagcatcaatagttcagacgcagttgtgattcgaacgcgaaaggaaccaaccgagattaccgagtgtcctgcaaacaggactaacttctgccgaaacatgttgcgcctcctgctgctgcccctcttcctcttcacgctctccatgtgcatgggccagaccttccagtactcccgcggatggaccaacggcaagaggtcctttaacgccgcatctcccctcctggccaacggccatctccatcgggccagcgagctgggactcacggatctctacgatttgcaggattggagcagcgatcgtaggctcgagcggtaagtttcatcgaaagaataacagaaatatacaactttatttttaaaatacataaagaatatgataacccaaaaacattccattagatacctattaaaatcatataactaaggaattatatattataattgccctacttatacacttcattcctacttattttcttgttttttatgtattaaagtaatattttaaaattttcctccagctgtctatcgcagctccaacgttcactgattgccagaaactgtgtccccggttcggacttcaatgccaaccgagtagatccggatcccgaaaacagcgcccatcccagactgagcaactctaatggcgagaatgttttgtactcaagtgccaatatccccaacagacatcgccagtccaacgaactcctagaagagctgagtgccgctggaggagcatccgccgaacccaatgtgtttggaaaacattagccactatccgttcaatgtgaaatctattgtaaactagcaaaaaatgctacaaaaatgtaaaaaaaattgttgtaaacggttaataaaacacaggatttttatgaattacttaactgtctttttttaatatccaagaagagtattttaaatatttaaatagtgtaaataatagagttgtttcagataccatttacatgaggtcattagaaaatgtatgtaataaatccaaaaccttcgtctttttctaatggtaccattagaccacttagatataaataattcatatttagtcaaattgatttaacatatctttttcaacttaatactttagtactgcccaacacagctttaaaacatgctgaaaatatgaaaatatactgaatttggtattacaaaatgaggccgcatacacgagaggtgaaagcagatgcgcaatctggtaacactaaccgacgcaaaaaagaaagaaccaaaaaagtttgcggaaaagtgcaacaattaatttcccccgccattgaaatgctgccatgcataaagtcgatcgcatccgtttaaaaatgcgcttctgcgtatgacgacagttttccgagcgaggtgcattgcggggactcacattattttccctctttttttcccttcttttggtcttcttcctctttcgctcgcttcgcacaacaacaataacgactacgttttttcagtggcgaaaactgtacgcaagaggggcgagtagaggagaaaagtgcatggcagagagcgagagtaagagaggtagaaaaggaggaaaaaaaaacacacatgtaatgtgcaattgttttatgagttctacgttaattttgttgtttgttttttttcggttaccttcaggtaattgcagtttggtttttccgcgtgtgcgtgtgagaggtaaaacgcgtgtccagaaaaaaacgcgccaacgccaaaaaaaaacccaagtaactaccgcccacacagcgatcacgcgcccccaacccattttaaatgataatggtgcgaagacgacaacggcccgccaaggaagccgcatcctcatcctctggtggagcttcctcgggatcgggaattcctgttgaccaggcactgccactgaat

SEQ ID NO: 6161 - DNA, 578 bp, DROSOPHILA
atgttgcgcctcctgctgctgcccctcttcctcttcacgctctccatgtgcatgggccagaccttccagtactcccgcggatggaccaacggcaagaggtcctttaacgccgcatctcccctcctggccaacggccatctccatcgggccagcgagctgggactcacggatctctacgatttgcaggattggagcagcgatcgtaggctcgagcgctgtctatcgcagctccaacgttcactgattgccagaaactgtgtccccggttcggacttcaatgccaaccgagtagatccggatcccgaaaacagcgcccatcccagactgagcaactctaatggcgagaatgttttgtactcaagtgccaatatccccaacagacatcgccagtccaacgaactcctagaagagctgagtgccgctggaggagcatccgccgaacccaatgtgtttggaaaacattagccactatccgttcaatgtgaaatctattgtaaactagcaaaaaatgctacaaaaatgtaaaaaaaattgttgtaaacggttaataaaacacaggatttttatgaattacttaa

SEQ ID NO: 6162 - protein, 154 aa, DROSOPHILA
MLRLLLLPLFLFTLSMCMGQTFQYSRGWTNGKRSFNAASPLLANGHLHRASELGLTDLYDLQDWSSDRRLERCLSQLQRSLIARNCVPGSDFNANRVDPDPENSAHPRLSNSNGENVLYSSANIPNRHRQSNELLEELSAAGGASAEPNVFGKH

SEQ ID NO: 6163 - DNA, 2834 bp, DROSOPHILA
ttgtgtatgccggtgttccatgccactgattatttacgtatctacaatggttagcagatgctctaagggggaaactcattataataaacacatccaacctactacttccaacaggcatattatattgagttcccctgttgataaactcttgtcggaagacttctgcaatgtactcctggtgcaatggtatctagaacggtattgttatcagatcatccgagtttccctctatcataatgtttttacttaacatcagcaccacccaaactcttatcgattcaagaaaatgtaccaaaaagggtcaccattggtgacatcgcagggggaaaatggaagccagcttgctgatggcagtggaggagttcatcttctggagacagttcacccttttggctggaactatcaaccacactcccttggccatcagctgcagacagcactcatctgcatatgtctttcggcagtgcgacttgttttcgaattaactcttatcttttgggtacatttttaaaattataagcataatcgtctggggtggattgactacttaatagataattcccaatgtcgcagtatcattggaattaattggattttttttggatctgaagagaccattaacaattcctgaataataaattcctatctacatatatttcggagtcaccctaatcgataaataatagcgagggtgtttgtctaggtaaattttgatatcaaatattcttattaaaaatgggtagataaagatttataccggattattcatcattaaaaatgttcccgacgaacaaacgggtttaatagaaaggcgtcttgaacgttggggtaagcaaaaaccagttgagcccggtttccatgttgagataaaagagcgaccttgggtgtattttttctctattaattaaacatgtacattttttatttgtttacactgctattgaaaagatatttgtgtatttgttcaaataacttacttggtcacttggaagtggtcacttcaaaagccctcaccaaccggcttgattatgagctcctttatctggacagttgggggcgtctggatgcagtaggtcaccgcatcggctatatcctccgatcgcagcatgggcatgcctgtgggttgctcccaggatccggcttcgaaaatttcagtggccactacaccaggactgatgctctaaaatacgtacatcattagaagttctcatgcgaactggatgagcaaggtcacttaccgtgatctttgtttgagtgcccttcttgatgaactcctgacgcaggatttcggtcaaggcggtgatcgcgtgtttggagggcgcgtacatgttcaggctgaagccctccacggccggaacggagtggcctaccacactattgatgactaccacatgaccgtcgtttaccttgcggcgctgcagcgataggaaccactggcgggtgcaccaggtcactcccaacacattcacgtccagaatggcacgcacatcagcggaattttccgggtccgtgatgttcatttgacgtatgatcccggcgttattgacaagcacgtcggcaccacccagggtgcgatcgatccaggcgaaggtatcgatgacctgctgttcattgctgacatcacaggggcgggtgtggaagcgagcagcctgatcggcgggcagggaggatttgatgtcctggaggaccttctctctcctggccaggcccaccactaccattcccttggccaccagatcgcggcagcaggctgctccgattccggcgctggcaccagtgactacggcaacgcgattcaaccagcggttcatggcaagtctgtttgatgtggtttcccaacggagactaggttcaatgtctattactttataccctacatcgatgttaatcggttatcaataggcggagctttttggtgaaaagtttacacacagatagcttcaataaatccagttgaatggggttctcgagagccgagtgaccagacaaattcttaagtggaattcattttattttcaagagagcggcaccattaccaattatgatcgctatctatggatgacttcatatttatacccatcaagaacattctccatcgttatttcgatttgctattaaatcaagtttgcctaaaagtattcttcgtttcgggcaaacttctagaatatttaaaatcgattgtagtccatttgcaaaacgtaaatgatgcccaaattaagatattaaaactttagtttagtttgaatttttatttattatttctgctaacatgcatgtatctttggtgttagttctatgcgataaatatacatatatatgtctgcataacacatatatttacatatataatattgtgttgccattaatgccatgctttcggtttaactggttaacgcgcgatctctgttaaatattttgttttttttttttttgtattccgcatcggtaaataacgaacataatgcacatgcatgtgagtatgggtatgctctacgttttaaaactttaaaacctaaagttcaaattggggtattcgataaatattactttgcttaaatcagcctgctcgcaactttcgggttcttctttaagtggaatcgaaagcgggaaaggacattctattgcgcgcccttcgtacttgcagcatataatatgtatgtatttgtataaatgtaatctcttgtttactagacgttgttgttcgcttctgtggctgcttgccacatattgccagcttgtgagtcgctaggcctatataaatatatatttgtatatttgaaatatattattgatattcctcattgtagatgcttgccttacactaagcgctggag

SEQ ID NO: 6164 - DNA, 776 bp, DROSOPHILA
aaaccacatcaaacagacttgccatgaaccgctggttgaatcgcgttgccgtagtcactggtgccagcgccggaatcggagcagcctgctgccgcgatctggtggccaagggaatggtagtggtgggcctggccaggagagagaaggtcctccaggacatcaaatcctccctgcccgccgatcaggctgctcgcttccacacccgcccctgtgatgtcagcaatgaacagcaggtcatcgataccttcgcctggatcgatcgcaccctgggtggtgccgacgtgcttgtcaataacgccgggatcatacgtcaaatgaacatcacggacccggaaaattccgctgatgtgcgtgccattctggacgtgaatgtgttgggagtgacctggtgcacccgccagtggttcctatcgctgcagcgccgcaaggtaaacgacggtcatgtggtagtcatcaatagtgtggtaggccactccgttccggccgtggagggcttcagcctgaacatgtacgcgccctccaaacacgcgatcaccgccttgaccgaaatcctgcgtcaggagttcatcaagaagggcactcaaacaaagatcacgagcatcagtcctggtgtagtggccactgaaattttcgaagccggatcctgggagcaacccacaggcatgcccatgctgcgatcggaggatatagccgatgcggtgacctactgcatccagacgcccccaactgtccagataaaggagctcataatcaagccggttggtgagggcttttga

SEQ ID NO: 6165 - protein, 250 aa, DROSOPHILA
MNRWLNRVAVVTGASAGIGAACCRDLVAKGMVVVGLARREKVLQDIKSSLPADQAARFHTRPCDVSNEQQVIDTFAWIDRTLGGADVLVNNAGIIRQMNITDPENSADVRAILDVNVLGVTWCTRQWFLSLQRRKVNDGHVVVINSVVGHSVPAVEGFSLNMYAPSKHAITALTEILRQEFIKKGTQTKITSISPGVVATEIFEAGSWEQPTGMPMLRSEDIADAVTYCIQTPPTVQIKELIIKPVGEGF

SEQ ID NO: 6166 - DNA, 4730 bp, DROSOPHILA
cggaacagctgttacctcgtcagtgttgcaaacagttcgcgcagaaagcaaacgagttggcagacccgcgcgctgtattacgaagtttcactttcatatttgttttggccaccactccaaactagtcatttaccaaaaatgttggcctctcgcttgaatctcctgttgccccgcgtatcctggctgcgcggttgctcaacgacagcggtgggccagaaacatcagcgccaggtgcccacggagttcgccgtacacgatcctctgcaggctcacgctctaaaggaacagtgcatcctggttgacgccaacgaccaagccattggggccgcctctaaggcagactgccaccgtgtgcatccagagacgaatgatgttaagctccatcgcgccttcagtgtttttctcttcaattctcagggagagatgctagtgcagaagcgatcgtctcacaaggtgaaattaaagggtaatccccttattacaaggtccataatcctctgtatccttagataaccttcccaaacacctacaccaacgcgtgctgcagccatccgctttacgaaatcgaacaggaacgtcaggagcgcaacgcacagggcatccgtgtggccgctcaacgacgtctcaactacgaactgggcattcccacagaggaactgcagccacaggactttcgctacctgacccgcatccactacgcagacacgggcgacggcgtgtggggcgagcacgagatagactacatcctgttcctgcaaaaagacgtgacgctgcgtccaaatagcaacgaggtcagtgaggtgcgctacttgcgccgcgataagatcgacgaggcggtggcgaagtttagtgccccgctgacaccctggttctctctgattctgcagcatcgattgaaactctggtgggacaatttgcaccagctggagcaatttgaggacttgagtaatattcagcgcttttaagtgtgctaaccaaccaaaaatacacgtaatgacgtctaaaaggggcttttgttcgtttgggtttcaaattcgctttattcaaatggaaaatagtgtgtgtctgtgtgcggacaatgggcacaaagcggattttatgcaacctccgcgggtcgatcagttcagtacaacgcttttgtatatgtaaatataacaatacatatatagtttgtataggcgcacgatattcaatatgtttcatagcctaactaatgtgtttgtatgttgaatatcaaataactaattagcttttaaaatgatcacattacgtttcccataatcatcatcatcatcgtcatcgtcgcaacaagaataaatatgtacaaaagtacgactacaggctaacagagacacaaactaaaagtattgattctagcctaaatacagaagaaacaaacaaaagacaagctgcagcacttaacattaacatatatcgcttcgggagcgagttcgaagcgcgcgcttcgaggcgtgaagtgcagaccccgggcgaatccggagtcgacgttcacgaggcaccaccttggcaccgtttctctgggtactcgagtaaataaagcaattgctcggaaattccaacaacttaaagctagaccctgcaaacttcgatcgatggtttgcacctttacggcagggggtgaatatatagttatatacgtatacgtacttttcgcatgcaatgggggtcgtatttgtggatgtgtgtatgtgtggggatcaggataagcgcttcatcctgaattcgattagtggttaaggcacataggtatgagtctatcgtgaatctcaggctcgttgaatctatagagttacgggtttaaagctgctgggtggcacactttgtcgttcagttccatgtggctcctttaccattttctaggacaagccaaacagtttcagggcattaaaggcagtggccaaagccacctcgtccgggcttttcttcatgaaggcggctatcatctctacaatggcgggcaaactgcacggctcgttgcgttggaaggtacaatatctggaaggtattttgaactaatagaagagtgacctattttggtactttttacttcgcccacctgtgtaagtacaacaatgagcgttcggtgataccagtcttcacgtgttgcggtagcttggaagcccttgtgtttgggtacatgaaaggagcatccgtctccaccagtagtctgtctagcggcaatgtgccgtcctccagcaggcggcgaacgccagtatccgatttgtccttgcacaggtagcccgtcaggctgatgtagaacctccggtctaggtacttaagcgcctcctcggcggtgcccataaaacctctgatgatcacaggcggaagattctcgaatctgcgcggggaacaatttaaagttttgtaaaccaaatctacggctcttacttgtctagtatttcgagtaaatcgagctgagccgaccgctcgtggatcagcagaggtttatttagccggatggccagatgcagctgcttggcgaagatctgcttctgggcgtccggttcggagaagtcccgctggtagtccaagccgcaggggccaatcgccacacactcctgcgcctgggcgatgtgctccagatcgaaccacgtggccggctcttccacgatggacttggagtcgtgcgggtgaatgccagcagttgagtagattatgtcgggatagatgcgcgaaaggcgcagcgcttccttgctcgatttgaccgaagtgccgtgaaccattagtttctggacacctgcaacaagaaaggcgggagaaagttagtgcaacgttcactgggctacagacttgtgtacaaaagagaaaatatgtgacttctgtttgctttcgatcagatactcttatcagcattgtaatgtatccctttaagtaaatgtatttaaaaaacaaattttttgttgaatatcaaatcaaatatgtaaagagaatttatctcttacatatatttaaatgtttatagtttcctttaaaaatttatcctatgcaaatattgttgtgttgacatcttggttatttggtttttaatctccagctacgttcccattgaatttgtaatgccatctcccagggcacatatgtacatgcatacatatatcaaaacacaggcacacttgttgctcgccaatagcccgaccttctggctgtctgggtgttttcgcagcctcgccccagaacgaagacactgcccgggtcttattaattatgcctgcacatgtagtatctgatgctggcatacaaacctgcgtctctggctctctgcaccacggaatccagatcacggctatacttcttgttggtcagattcgcacccacgtcgatgacgatcaggttctcaaagcagtgcttcatgtccaattccagctgatcctccagcagcggggccacgggggccaccaccgtctcctggggcgtctgttgactggggtccatgttctggatcggaatcttggatctattatcgacgaaaatagcttatgacgcaggcgatggattgctgggctgcgactgtgtgcgtgggtaattcaattagcttgtttttgagggcgcaaggaaacgcgacggcggtgaaagccgtgaaatgtggatctactgaatttgttggaatttggaagagttgaccaattcggcaatcaatggtctaaaagttgagaaatattaatctaaaaaacaatcccgacacgaactacaactgctggctagagttgaacaacgtctgcagaacgggtcagtgcaggtactacactctgcatgcaatcgatagtcggaatcgatacgtagcaccaaattatatcgtgtttgaatttaaattgttatcaaaataaatattatgtaataaaattcagtccaattatttgatataaatatatttgtttcatgtatatagtagaattccgatcatcaatagtaacatcttaagacaaataattaaatatttcacaataccataccagaagtcgcaactaaatataactgagtcgaattttttgtttcggcaacagtcattgtttttggggatttaaaacccaagcccacacacttgcaccgaccccaccttcagttttggttaaacaaacgaacaaatgagaataatgttttcattatattctttccaaacacctgcaagattatttaactaaaacgattcattgtattcaagtgcgattgtttatttatttgagttggcccacacaaagcttgttcatttttttttatcaagaaacaaaggtttaaacaagttcgcccacggcttgatagtgagtgtaatatgatattgcaccggctcaatcctctattctcagcttgtgtatgccggtgttccatgccactgattatttacgtatctacaatggttagcagatgctctaagggggaaactcattataataaacacatccaacctactacttccaacaggcatattatattgagttcccctgttgataaactcttgtcggaagacttctgcaatgtactcctggtgcaatggtatctagaacggtattgttatcagatcatccgagtttccctctatcataatgtttttacttaacatcagcaccacccaaactcttatcgattcaagaaaatgtaccaaaaagggtcaccattggtgacatcgcagggggaaaatggaagccagcttgctgatggcagtggaggagttcatcttctggagacagttcacccttttggctggaactatcaac

SEQ ID NO: 6167 - DNA, 2114 bp, DROSOPHILA
ttcaactctagccagcagttgtagttcgtgtcgggattgttttttagattaatatttctcaacttttagaccattgattgccgaattggtcaactcttccaaattccaacaaattcagtagatccacatttcacggctttcaccgccgtcgcgtttccttgcgccctcaaaaacaagctaattgaattacccacgcacacagtcgcagcccagcaatccatcgcctgcgtcataagctattttcgtcgataatagatccaagattccgatccagaacatggaccccagtcaacagacgccccaggagacggtggtggcccccgtggccccgctgctggaggatcagctggaattggacatgaagcactgctttgagaacctgatcgtcatcgacgtgggtgcgaatctgaccaacaagaagtatagccgtgatctggattccgtggtgcagagagccagagacgcaggtgtccagaaactaatggttcacggcacttcggtcaaatcgagcaaggaagcgctgcgcctttcgcgcatctatcccgacataatctactcaactgctggcattcacccgcacgactccaagtccatcgtggaagagccggccacgtggttcgatctggagcacatcgcccaggcgcaggagtgtgtggcgattggcccctgcggcttggactaccagcgggacttctccgaaccggacgcccagaagcagatcttcgccaagcagctgcatctggccatccggctaaataaacctctgctgatccacgagcggtcggctcagctcgatttactcgaaatactagacaaattcgagaatcttccgcctgtgatcatcagaggttttatgggcaccgccgaggaggcgcttaagtacctagaccggaggttctacatcagcctgacgggctacctgtgcaaggacaaatcggatactggcgttcgccgcctgctggaggacggcacattgccgctagacagactactggtggagacggatgctcctttcatgtacccaaacacaagggcttccaagctaccgcaacacgtgaagactggtatcaccgaacgctcattgttgtacttacacagatattgtaccttccaacgcaacgagccgtgcagtttgcccgccattgtagagatgatagccgccttcatgaagaaaagcccggacgaggtggctttggccactgcctttaatgccctgaaactgtttggcttgtcctagaaaatggtaaaggagccacatggaactgaacgacaaagtgtgccacccagcagctttaaacccgtaactctatagattcaacgagcctgagattcacgatagactcatacctatgtgccttaaccactaatcgaattcaggatgaagcgcttatcctgatccccacacatacacacatccacaaatacgacccccattgcatgcgaaaagtacgtatacgtatataactatatattcaccccctgccgtaaaggtgcaaaccatcgatcgaagtttgcagggtctagctttaagttgttggaatttccgagcaattgctttatttactcgagtacccagagaaacggtgccaaggtggtgcctcgtgaacgtcgactccggattcgcccggggtctgcacttcacgcctcgaagcgcgcgcttcgaactcgctcccgaagcgatatatgttaatgttaagtgctgcagcttgtcttttgtttgtttcttctgtatttaggctagaatcaatacttttagtttgtgtctctgttagcctgtagtcgtacttttgtacatatttattcttgttgcgacgatgacgatgatgatgatgattatgggaaacgtaatgtgatcattttaaaagctaattagttatttgatattcaacatacaaacacattagttaggctatgaaacatattgaatatcgtgcgcctatacaaactatatatgtattgttatatttacatatacaaaagcgttgtactgaactgatcgacccgcggaggttgcataaaatccgctttgtgcccattgtccgcacacagacacacactattttccatttgaataaagcgaatttgaaacccaaacgaacaaaagccccttttag

SEQ ID NO: 6168 - protein, 319 aa, DROSOPHILA
MDPSQQTPQETVVAPVAPLLEDQLELDMKHCFENLIVIDVGANLTNKKYSRDLDSVVQRARDAGVQKLMVHGTSVKSSKEALRLSRIYPDIIYSTAGIHPHDSKSIVEEPATWFDLEHIAQAQECVAIGPCGLDYQRDFSEPDAQKQIFAKQLHLAIRLNKPLLIHERSAQLDLLEILDKFENLPPVIIRGFMGTAEEALKYLDRRFYISLTGYLCKDKSDTGVRRLLEDGTLPLDRLLVETDAPFMYPNTRASKLPQHVKTGITERSLLYLHRYCTFQRNEPCSLPAIVEMIAAFMKKSPDEVALATAFNALKLFGLS

SEQ ID NO: 6169 - DNA, 5288 bp, DROSOPHILA
cccaaaaaattgtttcgggtgttttgctaacatgtcgaagacaattggattggattcattttacttgcacattttgttaaataattttactgctagcgtactacgatttcagccaaagttctttcagtctgaaaaacaaaaggattttgagtaaaacagtttaaaagcaaacttatgttctccacacaaaaagcgttttacagggaagcatccaggatacaaattagtcaaacataaaaaggattagttgagagtgaatgagtactttctacaagggtaaatacaaaattaaaaattacttacaaaaatacaaggttttgacagtgagtttgtgtggtgccatgggaatctcttctccattcttcattcagaatatgaaaatttttaaaggtttttcattacaattgcaatcgtacttcatgatacattaaccgtactggccttgagtttgctctacggaatacaagacttatctttaaggactacttatcaactctgctcgagatagatgttggaaaacataggttaaaccttgattgggatacatgaattttcaacattaaccttaacattcagtgtcagaggatgtgtatcttaatccgagagaatagaacatgcacaagtttgggttttgtgtattgctaactaggagatcaaagtaacaaatgcccgctggtgcagtgcgtttcaaaactatcagacctttccatctgctcgtgagatgactaaatttggcagtagtaaggaataaaaacgaaaacattaaatgcaaatagaaaacaaccaagttctttaagaaaaaactaatgcatccagttaaaattcatttatcataacgctgaggacgttaagtggacttcttaaatctgccctgcagttatgaaacgccttgcaagtatacatgtgtgtggtagtgagtgttaaagttacaattagttgacgctgttgctgtttgccgatgtctctgatcgccgctgttaatcaccgtctaatgagatgcttagaattcagtgcgccccgccatcgacatcgactcaatgctctgacgcaggtggctatcattggtgatcttttcgcagacaatgctcacctttttcagcagctcgatggcagtttggagcacctgctgccatttgtgcagctcgttctcgtgcgccatctcctggtctcgcagcaattccagccattcctgattcgtgctcggcagctcactgaaaagcgtaggttcatttgcatacattatagcgaatttggttgtcagtatggatttggactcacctcaaggccgccaaactgggcatgcgggcccgccgattgagatccacgtcaatgcgttcctccagcctccagagcttaagtaataatatcacatttaatgccagcatcaagcacagcaagagtataaccaacaaccacaagcccttgtgtctaagtctgtgaccctgtgacccttgacccgatgccagaggctgaccgtcgccgccgcccaggtgcaactgctgctgctgtaggtgctgcttgtgcggctgaaggtggtgatggtgcatttgctgctggtggtggagctgttgctgcttgccgccctcgagcagcagcggatgaccggcggcggcgccgactgccgccccgggaatacctcccgcggccagcatttgggtctccaggggatcaacggctggggccggaccaactgcctcctccagaggacgaatttgggtggcggtacctgcggagaaacggggacgagcgaaggaatggcatatggaacggttagaaatcaaaccattcgaacggaagaatcgaaatgaacataggccggcaacaaaatcacaacattaagagtacaacaaaatataaatcactagtaaaaaaattaagctgcaataaaaagcaagtgattaggaggtacatgatgggctagcaatcgtcacgagagactgtatttaagataaaagacatatcattcaagacatttccagaaaagtttgcattaccagtagataactgtttatgaaatgaaccaagcctttcggtgaaaaatatccttgcaaaaaatttaatgatcgacataatattaggtttctttaacgaaattaatgcgcgaactaaatcgaattgattcgaaagcttcgtcaagttcttgtgacttagttgaaggtaaatccattatgaactagaaggggacaaaactttaagcaaaatatgaatgaagccttatcgaaatttgataaagccattaaaagtaatcattaccaagaaaaattattagattaataaaaagaagcattcaaaaggaaggttaaaattggtgaaatcgttttatgatcggcaacctgtatcacgtgtgctcataaatctttggcagtgccagctgtgcttcttatcgaatttactttgaaatgtatatttgaagttaagcgcattaaaagagcgaaatcccgaaatccctctaaattacgtttcaaaacctcattactaaacattcgcttctcaaatagaaaagaaatagttaatagttaatagctaatgacaataagccgacaacatttgaaactattatttttgacatcttttctttaaagatgaagtggtcaattctgagtagattataaactaactatattttagtactgatagacatacacaattcccctgtggcaattgctagtcagaaaggatccaaatacttaagctgtacctctgccggactgaagtagagccttacggtgatgccagtgatggggatgttgctgctgatgatggggaagcagaggctgatgatgatgatgatgggagtgcctggcatcgtgatgatgatgctgactaccatggtgatggtggtgatgatggtgcatgtgcaagtgctggtgctgatgttgatcctgctgatggggatgtcgcgactcttgaatgctgtcattgtccgtgctggtggccgtatggagcgcacctgtcgtgatggaggtggtcgacgtggaggtggcggattgctgattcatgcctgagatgtatgttgattgtagctggatgttgcttttggttcgtaacgagtggtttcatgtttattgtgagcatgcgtgcgttttggtgtgattagaagaagcaatggcaattggcattggcagttatcgaattcgaactctgatttgatatgttcattacaaaatattagaaagaaattgctttgctttgttgctgtatttgctgtatttgttgttcttgttgttgtggttgttgcattgtagttaattggttactgcgtctagagtcgcaatgcttacctctcctcggccgtcgaccctttcccttggcaggtggaatgcacgtctcgctctggagcgcatgcaattgagcgccaaagaagtcctcgaggcccgcccacgtgttcttctcaatgaagcccttgaccacgccccagatcgacttcttgtacttgatctgggtgtgaattgagagcatagtgtgatcatcgacagttctatgaaacggaattagaatgccaattagaaaagtcagaagttgagtgacatctgtgcactgttcatcagccagctagttatcatcgccgagtgcaagtcgggtgactcacctggccaggcagaagtgtatgagcacactgaaactttccgcatatggaatgcctgcattaacactatttacgtctatggaatacagttcgcccggcttgctacactcccgctgcgtctgatactcggttacctaagggaattaatatatgctgcgtagtcagtttatttgttcgtttctatttcgagggcagtgcacattcacctttgaggtcttgggccccacagaggcggccaattgaacagtgacgttcactgtgcgcacttgcagaccctcctcgttcttggtccactcgcctaacacgaggtccgttgacttgcgcatggcatggaagtcagttatgaatttcgacttgctgaacaaaagattaaacaaggtgtccacgttaattggcagaatggtatgcacgatttggcggccctcgtgcgtcgaggtgcactctgtggtgggcacaaatctaatcgggcgatagaaggagtatgttagttagatgtgatccactcatggcgcctcaaacttacggcaaattgttctcctcggaatcagacgagtcggagacatctgtcggcacactctcggctgcatttttgccctcttcgcgttgccgatgcattttccctagctttcgcttcatttccatcttggactccaaggatcctgacccggaactggcactggccagcgattgagcggcttctgccgctgctacggcggccgagttagaagccgtgctaaccttcttctccgcactcatcttgtcgctgccactgccgctggctgccgccgtatttgagcccgacagagatcccgatccggagccagagcccgtgtggttggcaatcgtggaggaggaggcagtggtggagcccgctgtgctgctgctgctgacgttgggagcgctcatggtgacgctcaccgatagctccgtcggcttcaccgagctgagagtcagctccttggcattctgtttcatcttcttgttcaatttgcgtgagctctccctggtcttattgttatccgatccgctggccgaggcgttggccgatgacttggacgaattgaagaaatatttcgttttagacttgcggggggcagaggcgcggacgccgccaccgctgctggcgctgctgtttccgctctggggaagcaggggattcgactggttggattgattcgactgctgcgactggcgctgcgagtagctatcgtcatcgatggccgtctgaaagtcgaagtctggctcgttggtcttgttcagcgtgggatcaatgtagtcctcgtcgtcggtggtcaggcccagctcgtcgccgtaacaggtgtgcacatgttgccaaatttcctgcggcgaaaactgcttgttcatcagcgtgttctgccagacgcggaagagcatcaagaagctcttgtcgcgcgaggtgaacgtggcaaagaagtacttgtccttgccgctggatatcgaaatggcattcggtatgaccagtgctgtcttctccttggttatggccgtcacatccttccacttgatgctcacgtgggtctcccaactgaagatgttcgcgtggaagcagacgtagttctgtgacacatacagacggccctggaccagaatgtcgcgttgtagggcacacgagtagtctgcggaagaagataatcacttgagtaaattgcttcaattaaggcgtgtttcattaacgggaatt

SEQ ID NO: 6170 - DNA, 1722 bp, DROSOPHILA
gcagaagccgctcaatcgctggccagtgccagttccgggtcaggatccttggagtccaagatggaaatgaagcgaaagctagggaaaatgcatcggcaacgcgaagagggcaaaaatgcagccgagagtgtgccgacagatgtctccgactcgtctgattccgaggagaacaatttgccatttgtgcccaccacagagtgcacctcgacgcacgagggccgccaaatcgtgcataccattctgccaattaacgtggacaccttgtttaatcttttgttcagcaagtcgaaattcataactgacttccatgccatgcgcaagtcaacggacctcgtgttaggcgagtggaccaagaacgaggagggtctgcaagtgcgcacagtgaacgtcactgttcaattggccgcctctgtggggcccaagacctcaaaggtaaccgagtatcagacgcagcgggagtgtagcaagccgggcgaactgtattccatagacgtaaatagtgttaatgcaggcattccatatgcggaaagtttcagtgtgctcatacacttctgcctggccagaactgtcgatgatcacactatgctctcaattcacacccagatcaagtacaagaagtcgatctggggcgtggtcaagggcttcattgagaagaacacgtgggcgggcctcgaggacttctttggcgctcaattgcatgcgctccagagcgagacgtgcattccacctgccaagggaaagggtcgacggccgaggagaggcatgaatcagcaatccgccacctccacgtcgaccacctccatcacgacaggtgcgctccatacggccaccagcacggacaatgacagcattcaagagtcgcgacatccccatcagcaggatcaacatcagcaccagcacttgcacatgcaccatcatcaccaccatcaccatggtagtcagcatcatcatcacgatgccaggcactcccatcatcatcatcatcagcctctgcttccccatcatcagcagcaacatccccatcactggcatcaccgtaaggctctacttcagtccggcagaggtaccgccacccaaattcgtcctctggaggaggcagttggtccggccccagccgttgatcccctggagacccaaatgctggccgcgggaggtattcccggggcggcagtcggcgccgccgccggtcatccgctgctgctcgagggcggcaagcagcaacagctccaccaccagcagcaaatgcaccatcaccaccttcagccgcacaagcagcacctacagcagcagcagttgcacctgggcggcggcgacggtcagcctctggcatcgggtcaagggtcacagggtcacagacttagacacaagggcttgtggttgttggttatactcttgctgtgcttgatgctggcattaaatgtgatattattacttaagctctggaggctggaggaacgcattgacgtggatctcaatcggcgggcccgcatgcccagtttggcggccttgagtgagctgccgagcacgaatcaggaatggctggaattgctgcgagaccaggagatggcgcacgagaacgagctgcacaaatggcagcaggtgctccaaactgccatcgagctgctgaaaaaggtgagcattgtctgcgaaaagatcaccaatgatagccacctgcgtcagagcattgagtcgatgtcgatggcggggcgcactgaattctaa

SEQ ID NO: 6171 - protein, 553 aa, DROSOPHILA
MEMKRKLGKMHRQREEGKNAAESVPTDVSDSSDSEENNLPFVPTTECTSTHEGRQIVHTILPINVDTLFNLLFSKSKFITDFHAMRKSTDLVLGEWTKNEEGLQVRTVNVTVQLAASVGPKTSKVTEYQTQRECSKPGELYSIDVNSVNAGIPYAESFSVLIHFCLARTVDDHTMLSIHTQIKYKKSIWGVVKGFIEKNTWAGLEDFFGAQLHALQSETCIPPAKGKGRRPRRGMNQQSATSTSTTSITTGALHTATSTDNDSIQESRHPHQQDQHQHQHLHMHHHHHHHHGSQHHHHDARHSHHHHHQPLLPHHQQQHPHHWHHRKALLQSGRGTATQIRPLEEAVGPAPAVDPLETQMLAAGGIPGAAVGAAAGHPLLLEGGKQQQLHHQQQMHHHHLQPHKQHLQQQQLHLGGGDGQPLASGQGSQGHRLRHKGLWLLVILLLCLMLALNVILLLKLWRLEERIDVDLNRRARMPSLAALSELPSTNQEWLELLRDQEMAHENELHKWQQVLQTAIELLKKVSIVCEKITNDSHLRQSIESMSMAGRTEF

SEQ ID NO: 6172 - DNA, 4942 bp, DROSOPHILA
tctcccctcctggccaacggccatctccatcgggccagcgagctgggactcacggatctctacgatttgcaggattggagcagcgatcgtaggctcgagcggtaagtttcatcgaaagaataacagaaatatacaactttatttttaaaatacataaagaatatgataacccaaaaacattccattagatacctattaaaatcatataactaaggaattatatattataattgccctacttatacacttcattcctacttattttcttgttttttatgtattaaagtaatattttaaaattttcctccagctgtctatcgcagctccaacgttcactgattgccagaaactgtgtccccggttcggacttcaatgccaaccgagtagatccggatcccgaaaacagcgcccatcccagactgagcaactctaatggcgagaatgttttgtactcaagtgccaatatccccaacagacatcgccagtccaacgaactcctagaagagctgagtgccgctggaggagcatccgccgaacccaatgtgtttggaaaacattagccactatccgttcaatgtgaaatctattgtaaactagcaaaaaatgctacaaaaatgtaaaaaaaattgttgtaaacggttaataaaacacaggatttttatgaattacttaactgtctttttttaatatccaagaagagtattttaaatatttaaatagtgtaaataatagagttgtttcagataccatttacatgaggtcattagaaaatgtatgtaataaatccaaaaccttcgtctttttctaatggtaccattagaccacttagatataaataattcatatttagtcaaattgatttaacatatctttttcaacttaatactttagtactgcccaacacagctttaaaacatgctgaaaatatgaaaatatactgaatttggtattacaaaatgaggccgcatacacgagaggtgaaagcagatgcgcaatctggtaacactaaccgacgcaaaaaagaaagaaccaaaaaagtttgcggaaaagtgcaacaattaatttcccccgccattgaaatgctgccatgcataaagtcgatcgcatccgtttaaaaatgcgcttctgcgtatgacgacagttttccgagcgaggtgcattgcggggactcacattattttccctctttttttcccttcttttggtcttcttcctctttcgctcgcttcgcacaacaacaataacgactacgttttttcagtggcgaaaactgtacgcaagaggggcgagtagaggagaaaagtgcatggcagagagcgagagtaagagaggtagaaaaggaggaaaaaaaaacacacatgtaatgtgcaattgttttatgagttctacgttaattttgttgtttgttttttttcggttaccttcaggtaattgcagtttggtttttccgcgtgtgcgtgtgagaggtaaaacgcgtgtccagaaaaaaacgcgccaacgccaaaaaaaaacccaagtaactaccgcccacacagcgatcacgcgcccccaacccattttaaatgataatggtgcgaagacgacaacggcccgccaaggaagccgcatcctcatcctctggtggagcttcctcgggatcgggaattcctgttgaccaggcactgccactgaatgtggcgggaaatctgctggaggatcagtattttgccagccccaagcggaaagactgccgtttgatgaaggtcactcaaaatggccaactgccggaagccacaatgatggcacacaacaaagacaacaaagcgggtcgcacaataggtgagtacgcttctcgtactttttaggttagctgtgttggctaaaataccccttgtttgttatttttcaaggagttcccttggccacgcgctcacaaactcgcaccattgagaacttcttcaaagccaatgctgccgctaaggattcccaaaagacaatacacacagaggagcagttgaatctaggaaatcaggaactgaaactggacgatgaggagctaaatggacagataaaactagatgacgaggtgctaaagctggcagacaagcagataaatgaaaaccttccctttgccgacgaagtagatgccaaggcagaacaaaagcttatggatgaggaactgcagcaggtggtggaggaacttctgttcgatggcagttccagagcgtcctccaattcgcccttttatcagcatgatatggatgtcatgcaggagatccagcagactccagaaattccacacatcaaaaaggtcacagagccgctcgagggactgggctctctggccgacttccagacacatcgctctgcgctgagggacagccacagttccacgcacagcagcagcaccgacaacatcttcctgcaggagccggtactgaccctggacattgatcgcacgcccaccaaagcctccagcataaagatcaatcggagcttcgaactggccggagccgtattctcatcacctccgtcggtgctaaacgcctgtctcaatggacgcttcaatcaaatagtaagcctgaatggacaaaaggaggcgctggacttgccgcacttcgatttggatcaacatgacagtagttcttgcgacagcggagtagcctgtggtctcactgccaatacagaatcgccagcggggcaaccccgacgcagaaaaccagccacaccgcatcgcatcctctgcccctcgccaatcaaaacggctttgaaggtaactggagggatttgcaaggtcggatctgcggatccattgtcgccgcgcaagtctcctcgaaaactgccgaccacaacagcagcggtggcagcctgcaagtcgcgtcgaagactgaaccagccaaagccacaagcgccttaccagccacagctacagaaaccaccgtcacaacagcagcagcagcagcaggatgatatcgtcgtggtgctagacgacgacgatgatgaaggagatgacgaggacgacgttcgagccctgatcaaggctgccgaggagcgtgaaaaccagaacaaagcaccagccacagcgaacagcaacaaagcaggcatgaaaacgatgctcaagcctgcgcccgtgaaatcaaagaccaaaagcaaggggccaacgaagggacaaccgccgctgcccttggctgccaccaacggcaatcgtgagatgacggacttcttcccggtgcgaaggagtgtgcgcaagactaagacggccgtcaaggaggaatggatgcgaggcttggagcaagcagtgctggaagagcgctgcgatggtctccaagtacgccactttatgggcaagggaagaggcgtagtcgccgatcggccctttaaacgcaacgaatttgtggttgagtatgtgggagatctcatatctataggcgaagccgcggaacgggagaaacgctatgcgttggacgagaatgctgggtgctatatgtactacttcaagcacaagtcccagcagtactgcatcgatgcaaccgttgacaccggcaagctggggcgcctcatcaatcactcgcgggctggtaacctaatgaccaaagtagtacttatcaaacagcggccgcatctcgtactcctggccaaggacgacatcgagccgggcgaggaactgacctatgactacggggaccgatcgaaggagtcactattgcaccatccttggttggccttctgaggaagagctctccaggagctcgcgaaaggggttgcggtacagccttaaaacgaagactatttaccatgttcagggcagagaatctttaaaataataagacctgggctaaactggtttttggctcgagggaatctttcttagcttttatacgtagattgccttgccttgaaccactgcaaaattgttttcagacctgtttccgtgtgataagttgccggaatttgattcatttacaaagtttcattaagcaaaattatatcaatattgcaagcacttatatttttggtaagaccaattcaatcattacgaattccggcaatttggatcggaatggagagaggcgtatttgacaccggttctgggcagccccgagcttagatcttatttgaggaaaagtatataaactgttagttcaaaatatcataacggatagcgaaacccacacgccccacacccaagggtggttccagccagggacgaaaagtaatcaatgtaaattctaacaagtttgcctcagaaataggtctaatgtcaatttcgatcttcggcgttaccaaaataagttacaaatgaagttaatatttccctttgggtcagtgaaataatcgaaattatcaattaagaacaaatttatcaaaaagacctagactatacagattgtaaattgatattagacccatgatccccaaagcaaaatgcctttaaattgtacgattacgattcaatccctataagactcattatcgatccacccgtgatccaagcaacccccccctccccctccctccttacacaaactcatgagcatctttttggatttgttagcgtttcattatgtttagagcaaggctaaagttaaggagagataataatgataataataataataaaaacaacgcgcttaagcattaaggcatcttaagataattgaatgaaatcgaaaaactgttgaccatttgaaaagagatgatgatgttgatgaagccacgcattcacattgacaagaatcgattgtacactatttatatagatatttatattagatacatgtgtaatttctaactattacgtactatttactgccatagagctatacactccccctcgcacctgtcccaaaaaaaaaaaaaaaacccctaggaactgacactactgaattgttgatttaacccattgacacactcattaattctcgaggcttctccaggagagtagtggcctgctggacaccta

SEQ ID NO: 6173 - DNA, 2598 bp, DROSOPHILA
taacactaaccgacgcaaaaaagaaagaaccaaaaaagtttgcggaaaagtgcaacaattaatttcccccgccattgaaatgctgccatgcataaagtcgatcgcatccgtttaaaaatgcgcttctgcgtatgacgacagttttccgagcgaggtaattgcagtttggtttttccgcgtgtgcgtgtgagaggtaaaacgcgtgtccagaaaaaaacgcgccaacgccaaaaaaaaacccaagtaactaccgcccacacagcgatcacgcgcccccaacccattttaaatgataatggtgcgaagacgacaacggcccgccaaggaagccgcatcctcatcctctggtggagcttcctcgggatcgggaattcctgttgaccaggcactgccactgaatgtggcgggaaatctgctggaggatcagtattttgccagccccaagcggaaagactgccgtttgatgaaggtcactcaaaatggccaactgccggaagccacaatgatggcacacaacaaagacaacaaagcgggtcgcacaataggagttcccttggccacgcgctcacaaactcgcaccattgagaacttcttcaaagccaatgctgccgctaaggattcccaaaagacaatacacacagaggagcagttgaatctaggaaatcaggaactgaaactggacgatgaggagctaaatggacagataaaactagatgacgaggtgctaaagctggcagacaagcagataaatgaaaaccttccctttgccgacgaagtagatgccaaggcagaacaaaagcttatggatgaggaactgcagcaggtggtggaggaacttctgttcgatggcagttccagagcgtcctccaattcgcccttttatcagcatgatatggatgtcatgcaggagatccagcagactccagaaattccacacatcaaaaaggtcacagagccgctcgagggactgggctctctggccgacttccagacacatcgctctgcgctgagggacagccacagttccacgcacagcagcagcaccgacaacatcttcctgcaggagccggtactgaccctggacattgatcgcacgcccaccaaagcctccagcataaagatcaatcggagcttcgaactggccggagccgtattctcatcacctccgtcggtgctaaacgcctgtctcaatggacgcttcaatcaaatagtaagcctgaatggacaaaaggaggcgctggacttgccgcacttcgatttggatcaacatgacagtagttcttgcgacagcggagtagcctgtggtctcactgccaatacagaatcgccagcggggcaaccccgacgcagaaaaccagccacaccgcatcgcatcctctgcccctcgccaatcaaaacggctttgaaggtaactggagggatttgcaaggtcggatctgcggatccattgtcgccgcgcaagtctcctcgaaaactgccgaccacaacagcagcggtggcagcctgcaagtcgcgtcgaagactgaaccagccaaagccacaagcgccttaccagccacagctacagaaaccaccgtcacaacagcagcagcagcagcaggatgatatcgtcgtggtgctagacgacgacgatgatgaaggagatgacgaggacgacgttcgagccctgatcaaggctgccgaggagcgtgaaaaccagaacaaagcaccagccacagcgaacagcaacaaagcaggcatgaaaacgatgctcaagcctgcgcccgtgaaatcaaagaccaaaagcaaggggccaacgaagggacaaccgccgctgcccttggctgccaccaacggcaatcgtgagatgacggacttcttcccggtgcgaaggagtgtgcgcaagactaagacggccgtcaaggaggaatggatgcgaggcttggagcaagcagtgctggaagagcgctgcgatggtctccaagtacgccactttatgggcaagggaagaggcgtagtcgccgatcggccctttaaacgcaacgaatttgtggttgagtatgtgggagatctcatatctataggcgaagccgcggaacgggagaaacgctatgcgttggacgagaatgctgggtgctatatgtactacttcaagcacaagtcccagcagtactgcatcgatgcaaccgttgacaccggcaagctggggcgcctcatcaatcactcgcgggctggtaacctaatgaccaaagtagtacttatcaaacagcggccgcatctcgtactcctggccaaggacgacatcgagccgggcgaggaactgacctatgactacggggaccgatcgaaggagtcactattgcaccatccttggttggccttctgaggaagagctctccaggagctcgcgaaaggggttgcggtacagccttaaaacgaagactatttaccatgttcagggcagagaatctttaaaataataagacctgggctaaactggtttttggctcgagggaatctttcttagcttttatacgtagattgccttgccttgaaccactgcaaaattgttttcagacctgtttccgtgtgataagttgccggaatttgattcattta

SEQ ID NO: 6174 - protein, 689 aa, DROSOPHILA
MVRRRQRPAKEAASSSSGGASSGSGIPVDQALPLNVAGNLLEDQYFASPKRKDCRLMKVTQNGQLPEATMMAHNKDNKAGRTIGVPLATRSQTRTIENFFKANAAAKDSQKTIHTEEQLNLGNQELKLDDEELNGQIKLDDEVLKLADKQINENLPFADEVDAKAEQKLMDEELQQVVEELLFDGSSRASSNSPFYQHDMDVMQEIQQTPEIPHIKKVTEPLEGLGSLADFQTHRSALRDSHSSTHSSSTDNIFLQEPVLTLDIDRTPTKASSIKINRSFELAGAVFSSPPSVLNACLNGRFNQIVSLNGQKEALDLPHFDLDQHDSSSCDSGVACGLTANTESPAGQPRRRKPATPHRILCPSPIKTALKVTGGICKVGSADPLSPRKSPRKLPTTTAAVAACKSRRRLNQPKPQAPYQPQLQKPPSQQQQQQQDDIVVVLDDDDDEGDDEDDVRALIKAAEERENQNKAPATANSNKAGMKTMLKPAPVKSKTKSKGPTKGQPPLPLAATNGNREMTDFFPVRRSVRKTKTAVKEEWMRGLEQAVLEERCDGLQVRHFMGKGRGVVADRPFKRNEFVVEYVGDLISIGEAAEREKRYALDENAGCYMYYFKHKSQQYCIDATVDTGKLGRLINHSRAGNLMTKVVLIKQRPHLVLLAKDDIEPGEELTYDYGDRSKESLLHHPWLAF

SEQ ID NO: 6175 - DNA, 4562 bp, DROSOPHILA
ttacaatgcatgagcatacgtgtgcacacatacagttgttagctgtagcgctcttcgctctctcgctctctaacaaaaattcgagagagcctggagccacctctagagccacggcgaaaaaatcgtgtgccaaaaaatcgtatggcgttacgcatcttgttattatagtgtctttggtaatacctaacattttttcattaagtcaatgaactcaaaatatggaaattaatttataaatatttccactgtgttataaaccctgtgtgttataaacctgtgttatataaacccgtgataaaattataacatgttatacatataattctttcgattgatcagaaattaaatgtttgataagaaaatgtactaattgtattatattatggaattaagaatatattttttggtatattattattataagtttcattaaatatcgatagacatcttgctgtagtggacatgtactattattacggttccatatgggctaattttagttcttttagaaattcggtcacactattgatgaagaaggtcaaaataaaaactagctcagtcgagacaaaaacgtatgtgtcagtgtagtagattaacgtatagaaaaactgcaacacaacttaagtgagattgccattcaatatgttcgccaacaaattgttgacctgctcggcattactaataatgttatttttactaagcagtacaggttagtgccaagccaattaaaccctttttaaaacagcaatgaaatgcgtcgcattggaggcctttgttcaatgtgataatacatcgcagttctttttatatgtatatgtatgtcgtttgttcatcgcacataatttatttttccggtgccgttcacgtcgccatatgcgttagtgtcttatcggcgtaataaggtgtaaacggttgaattgcgagttttgccttcgtagatcaagggttttaaacctatttcagtaatctggctatcctttcataactcttctagaaaaatggtgtcgcttacgttcgttagccccggagaacatccatttttacccctttcgcttatttgttctggcaatttacagttttgtatgcagataaagtcatccgccaccgtatgcatccatatttattttatgcacttaaaatatttatatgcatgggtgtataaatcggcatatcatattaaatttgtatccgccatatagcatactttagtttttggttactatctgtcaattcatataacaagattttgggtcatttgttcaataccaatgttagacatttgtgcacatagtatatacaaaataatatatgacataaaaaaaacaatctgtgataaaataacaacaagagataacgctatagtcggttctctgactatcagactatgataagcggataagacaacaaagacttggagctagactgggcatatgtatgtacctacatatttggggagacatattaaaataaacaatttaaaacatttttttttatagcatgcgtgataaaatgtttcggcatagcaacagaaggataaatgattaaatcagaaaatattttttattttttaatttgtagtgtgttcctactaatcttatcttgttaaatagttctataaccagaccgaatttaaaattcgatttcgaccttatacatttggtttgtataaatatttgacaatatgttacggtacggccattttcataggatctctacaaatcactgaaaacggaaataaattgtccatcaagtccaaactcactaatataaataacaaagggtaattttttgataagagaacaaaggaaatacaattagagctaaccatatgtacatttgaatctctaataaataatttttttttcacgtcaatttaaagaaaattccgatttaataaagaaaagctttaatatttttaaaaattcttcttttagtgttctctcaaaagcttattggcttgccgagagtcggtaaaaatgttagtgatttgtttctggaacaagcaaacccactgaccagcagctcctcaacaatctcaacgtcttcgacaacaactgagaaacctatcacaaccagatcaacttctacaataactccgagatctaccacaccttcaacggaatcaccatcgaccaccgcaccagtgataagcacgaccattgccccgcaaccatatccgcaaccatccattggggcttggaatacctcttgtattatgcttcaaatggcggcacaacttaattttacctatgaggctaggggtaagaaaataaatccatatttagattgcgatcgaattacggcattggtgaggtatgggctctattagattttatagaaactcgtctcacagttttaacattttaatgaacttactgaaatcgataaggcaaatatttcagtttagattaaaaagagatgtacatatgtaaggatatatgtatgtatattatatatattatatttacatcactgtacacatagaaatgataatcaagttttcagacaataacgagtgatgcactaatgatgcactaagggtaacgtaaggataaagacggagcgcaagtttgttgacccatgttgccacgtccacaaaccattttttttcccattttattccccaatatctatcgatatcccagaaaaattataaaagttgcgttcgcattcacactagctgagtaacggttacctcttcgggtatctcttttgtttttagtttaaatcgaatggtgtatcaagacttacataagtagtacatcgtatatataacttaataactttcactccgttttggaccatttataatagttatcttttaaataattcatcagtaaaccagtatttaacatattaaaaagtgtataacaggtagaagaaatcgtttcccagtcgagctcaaggaagctgggttcggtaaaatcgaatttatgaaatttgaaagctggaatagtctgtccatctatgctaatgggcaaacgctttttattaattattatttgtacttaaataagcaattatacttacttctaacttcatatattattataactaaaaaaaacttgcatctttgtaagaatatccgactaacgaagacttttatctttagagggaaactttaccaccggtctgtacaacatccccagcaacgcatctgttgaagatgcagaatgtaaaagccagactactcagtttattcatctgatttggggaccagaaacatcaaagcaatcattaattatgtattttaataaaagtaatgacaccactgtgctttcctttatgcaaattcatctggctttgctgcctgaggattttccagatgcaaagggtaagaaaatataaaaaatagtagacagatctgtgtcgaataatccccaattccagaaaatcaaacggttcagcttattaccaggagcgacggagcgtttaagacaccagaaaatatgtcgtatcactgcactcgtgttcagaagataaatatgactgagacactcgatgctgagcagttaattggttggatcagcgtcagtcatgttcaggtggaggctttccggagggccaacgacactggtttctcagttggacacgattgcgatagctcggaaacttcggatgtggttcccattgccgttggaattgctttagctgcattaattttggtggtattaatatcatatctgtgtgctaggcgtcgttccacctcccgcggttacatgagcttctaatagaaggacatcagcttaattgggcaggttgcgaatcaaaggagtatggacagcaaattgttagagagaaatttaagattgatttttattattggaagccaaaattgattagttgaagttgaattagtttttttttcaagagggtcatcgaaatcatcaagcgcaattgggtttagaataataaaacggttctttaaaaacttttttacgtctctgtctttgtaagtgtccgatattggttcttgtatgctgatatttgtgttttatttaattggtttgagcaatgtaaatgtaaaataaaaaaaaaatttctaaataaattaatctctataatgtagctaccgtgttaaccctaaaaaggtggtgtcagagaggacatttctattgttaaggcaaaaacctgtacgcaataccaacaagtatacattctattcaaatgttatattttttaaacattattattggggcatataaatgtgtgtattcctgaccttaactgtaataaataatatttaaaaccaagcacaataatgattttcgtttgctggaaagggcttatgggaaaaatcttaaaatcatttttaattttatacaatttttattttaaattattttaattggttaattattgcgctgttcctgtttagatgaaattctacgctcctgcagctgacaaaatacatgacctgagctgggcatcataagttgttcctttagcaactcgaaacgctcctcggctagttcataatcattctgcgccaaggccactaggcccagattgtacctggcttcaaagttcatcggctgaagttgcagagctccctcaaaccg

SEQ ID NO: 6176 - DNA, 905 bp, DROSOPHILA
ttgatgaagaaggtcaaaataaaaactagctcagtcgagacaaaaacgtatgtgtcagtgtagtagattaacgtatagaaaaactgcaacacaacttaagtgagattgccattcaatatgttcgccaacaaattgttgacctgctcggcattactaataatgttatttttactaagcagtacagtgttctctcaaaagcttattggcttgccgagagtcggtaaaaatgttagtgatttgtttctggaacaagcaaacccactgaccagcagctcctcaacaatctcaacgtcttcgacaacaactgagaaacctatcacaaccagatcaacttctacaataactccgagatctaccacaccttcaacggaatcaccatcgaccaccgcaccagtgataagcacgaccattgccccgcaaccatatccgcaaccatccattggggcttggaatacctcttgtattatgcttcaaatggcggcacaacttaattttacctatgaggctagggagggaaactttaccaccggtctgtacaacatccccagcaacgcatctgttgaagatgcagaatgtaaaagccagactactcagtttattcatctgatttggggaccagaaacatcaaagcaatcattaattatgtattttaataaaagtaatgacaccactgtgctttcctttatgcaaattcatctggctttgctgcctgaggattttccagatgcaaaggaaaatcaaacggttcagcttattaccaggagcgacggagcgtttaagacaccagaaaatatgtcgtatcactgcactcgtgttcagaagataaatatgactgagacactcgatgctgagcagttaattggttggatcagcgtcagtcatgttcaggtggaggctttccggag

SEQ ID NO: 6177 - protein, 262 aa, DROSOPHILA
MFANKLLTCSALLIMLFLLSSTVFSQKLIGLPRVGKNVSDLFLEQANPLTSSSSTISTSSTTTEKPITTRSTSTITPRSTTPSTESPSTTAPVISTTIAPQPYPQPSIGAWNTSCIMLQMAAQLNFTYEAREGNFTTGLYNIPSNASVEDAECKSQTTQFIHLIWGPETSKQSLIMYFNKSNDTTVLSFMQIHLALLPEDFPDAKENQTVQLITRSDGAFKTPENMSYHCTRVQKINMTETLDAEQLIGWISVSHVQVEAFR

SEQ ID NO: 6178 - DNA, 4024 bp, DROSOPHILA
tcggtcgccatgctgatggccagcccctccagtgaggagcagtcggtggccacatcgaccacggagccggccatcattagcgatgcccgcctgggcgagttcaagaacaatttgcagcgactgtttcgcgaggcacgcgaacagagcttggcgctggccaggatcaccacggccatcaacgttggcagccaggagccgttcaccgctggcgaaatcgaggccgccgtgcatcgcatgaccgaggacaatcagatcatggtcgccgacgatatagtctttctcatctgatcgcgcattccaaggagcaacaatcgaacgaacgattgcatccatcaatccatcctttatccatcaaccattctagcgcttaagttgtcatttttgttttgtatttatataaaaaaaaaaataaacactttggaactcccattgcaatccacggaatatgtacgttggcataaggaaaggctgcagctgttggctaatgtattatagttaacttatatttgacataaacaatttaagcgatatacacacaaagttgcacaacggttttaaaagaaacaaactgaaggtataaccaactggcttcacaactcccattcacaatcagtaaaaagctggagaggaagggactgcaatgttgtggttagtggtttcaagctgcagccacatagatattattggcatggttttcgacattttgagacatgagcattgttttcgcatggatgtgaaaatatggaagggacacatcgattacatttaatacttgacttgtagtttgaactaacaacattcatcgcttcgcttggattcactttagaattaaactagacacaaatacggcgactaatcgccgattaaaatctatttacactgataaagagcaccgccaggcacaatcacacaatcacaggatactagcagacagatgtggagcagccaaagtgataagtggcagaagagaaggaggaggacgaggattgagctactaccatcaaagattcaccacattcttgagatccggcggcagcaagcccttcatgcactcaatctgggcgcgtatctgctgctgagttgagccattgttgccctccagctgcgtggctttgtcgccatagagattcagtttttgcttgagcttgagtatcatatcgatgatctccacctcctgcttgtcgtgcgcccagtgctcgagattcgccacggatagcgcctgcagctgtagatcctgcagcgttagctgcagctcccgatgacgtgcaccgtaccagccgcgaaaattgggcgatcgaaagaagcgtctgtacaggcccttccagtcgcccttcagcggcgacgttagctgcggcccagcggtttccagcgtgcccagaaagtcatccagcttaaagctgttggcattcggcgccgacttaaacggactgatgtccttttgcagcggcatcagtgatgccatataccgttccagtggtatcataaagctttgcgtcagctcgagcagatggcgtcgtatcagtgcggtttgcacatgctccggccgcttggtcttcatgcccagcagcacctttttgatcagcgccttgtcctttttcaggtacggcctatatttactgtgcaggcccgcggacgaggcatcgcccgagccattgctggaactggagctgccattgagattggtgttcgatttcagtgctatacggccaccgagttccgttgaactggaaaatgatgtggccgatgcgatgttccttgcgtgtttttggcccagcagcagatgctgttgctgctgcatgttcttctgaaaacgagcaagacggatatattttgtattgcgttaactgggattgggacactcacctggttgtccaccagtcgcagcatgtgcggccaatccttcaggagcttcacaaagaacggattcgtgacgcccaaaatgcaggcgggcagtgtggtcttgctgctgcactcttgtgtgaattcgcgaaattcgctgtcgtgaatggtgaagtagggacgcgcctcggcgcaatactccagcggagcaatcatggccagaagggtctgcaccatgtgggagcagtcggcgggtgaggtgccaacgacaacaatgggctcggcggtgatgaccagctcccacagcgtgtacagttgctccatgacaaagtccagggagcggaagagttcgatttcattaacggaggccagcactttggctgccgggcaagcagccatggctggtggcgattccaccgcaccacctgcgatgcctccatcggccgtcgactttcgactgctgctggtccgcggtatgcagatctgatagctgcaatccagcagaggcagctggagcggcttacccactcgcaggccgggccactggcgattaatttgctcgctggccagacgcaggacgtcggtgccctcctcaaagtagcgcggcgccagctgggagagtatgtcgtagtacagattgaagaacggcagtcgtgtaatgattataaagctcttctggaagtaaccacgcggcagattcgcgtcccgcttctggcgaaagtagacgaagccccagtagtgggagccatcctgtcgcagcgccggcgagcattccgcattgtagcccggcaaggaatcccgacgcgttgtgcagcgcaatcgcatgtggaacttggtgtcgcccatgcagccggaatttgagtccgggaaggccatgtagcaaatgttgctaacctcctggtcgctgggcatgaaagccggcggatagacgtgctccagcgcctgcccaagatttagatcgaaggtgaccacgcagaagcagtgcatccattgcgagaagttcacccaatcgctggcactgggctccgagttcgagttggtggcatccacgttctggtgctccctctcccgttcggtggtgtccagcgatggcgccatctgcttgattctcgcatccgcgctcattctgtattttgttgatatttatttatttatttgccagcgacattgacaaggggaatcagggaagggcgatagttgttcactgcttgcagttaccgttattatcgccagtcaccatttaatgcgatagtatttgctaataaacaatcatttgtttttaaatataataaattagcgcagtcatactgttcgttagcttttcttaacggtttgttattatttttatatattactaaatatttatcttgtttcttgtcaccgtttgcaatcactgctcatctctatgtgcaaatttatcatttcaaaactttcaccttttttttgcttttcaccagcgctgccactttggcgatttaatctcttgaataatataatataatataatgaatataatgaataatataatataatataattataataacctttgcaaacaaaacagatctttagcattttcttaataaacgtaatgaaataaagttgaattgaagtgaccagtgttggttaaccaattaactagctagtattttgatatggtgacgaagagaccatatttagcgatatccagctaggctgtcagcacagctagtgatgggcaattagtgcacacaatacaggttttatttttgaaatagttggttaagcaaaatcagcataattcaccgcccatcatcaaaagataaaagaaataaacaaacattctagcgcacatggcaacacatgcaaccgacgcaattccctttcgacaatcagtttaatcgcaggcgcaactgtcggcaaagcaatttgccgcaaaatcatcggcgtctcagtgtaaattcatgcgacttgcgaaatgccaattgcgcttttcaagtccgtacgcgaagtgagcagcgaagatgcggtgagtaatgctcctatataacaaatgtacatctatataactatgcaatcccgctggccaggtgcacgtagcggcgaatctgctcaaggaaaacgccggcaagaagtggcgaaccaaggcgccgggagagaaatccgcatacgttgtgctggagttcgaggagccgcaacagattac

SEQ ID NO: 6179 - DNA, 1965 bp, DROSOPHILA
cctgattccccttgtcaatgtcgctggcaaataaataaataaatatcaacaaaatacagaatgagcgcggatgcgagaatcaagcagatggcgccatcgctggacaccaccgaacgggagagggagcaccagaacgtggatgccaccaactcgaactcggagcccagtgccagcgattgggtgaacttctcgcaatggatgcactgcttctgcgtggtcaccttcgatctaaatcttgggcaggcgctggagcacgtctatccgccggctttcatgcccagcgaccaggaggttagcaacatttgctacatggccttcccggactcaaattccggctgcatgggcgacaccaagttccacatgcgattgcgctgcacaacgcgtcgggattccttgccgggctacaatgcggaatgctcgccggcgctgcgacaggatggctcccactactggggcttcgtctactttcgccagaagcgggacgcgaatctgccgcgtggttacttccagaagagctttataatcattacacgactgccgttcttcaatctgtactacgacatactctcccagctggcgccgcgctactttgaggagggcaccgacgtcctgcgtctggccagcgagcaaattaatcgccagtggcccggcctgcgagtgggtaagccgctccagctgcctctgctggattgcagctatcagatctgcataccgcggaccagcagcagtcgaaagtcgacggccgatggaggcatcgcaggtggtgcggtggaatcgccaccagccatggctgcttgcccggcagccaaagtgctggcctccgttaatgaaatcgaactcttccgctccctggactttgtcatggagcaactgtacacgctgtgggagctggtcatcaccgccgagcccattgttgtcgttggcacctcacccgccgactgctcccacatggtgcagacccttctggccatgattgctccgctggagtattgcgccgaggcgcgtccctacttcaccattcacgacagcgaatttcgcgaattcacacaagagtgcagcagcaagaccacactgcccgcctgcattttgggcgtcacgaatccgttctttgtgaagctcctgaaggattggccgcacatgctgcgactggtggacaaccagaagaacatgcagcagcaacagcatctgctgctgggccaaaaacacgcaaggaacatcgcatcggccacatcattttccagttcaacggaactcggtggccgtatagcactgaaatcgaacaccaatctcaatggcagctccagttccagcaatggctcgggcgatgcctcgtccgcgggcctgcacagtaaatataggccgtacctgaaaaaggacaaggcgctgatcaaaaaggtgctgctgggcatgaagaccaagcggccggagcatgtgcaaaccgcactgatacgacgccatctgctcgagctgacgcaaagctttatgataccactggaacggtatatggcatcactgatgccgctgcaaaaggacatcagtccgtttaagtcggcgccgaatgccaacagctttaagctggatgactttctgggcacgctggaaaccgctgggccgcagctaacgtcgccgctgaagggcgactggaagggcctgtacagacgcttctttcgatcgcccaattttcgcggctggtacggtgcacgtcatcgggagctgcagctaacgctgcaggatctacagctgcaggcgctatccgtggcgaatctcgagcactgggcgcacgacaagcaggaggtggagatcatcgatatgatactcaagctcaagcaaaaactgaatctctatggcgacaaagccacgcagctggagggcaacaatggctcaactcagcagcagatacgcgcccagattgagtgcatgaagggcttgctgccgccggatctcaagaatgtggtgaatctttga

SEQ ID NO: 6180 - protein, 634 aa, DROSOPHILA
MSADARIKQMAPSLDTTEREREHQNVDATNSNSEPSASDWVNFSQWMHCFCVVTFDLNLGQALEHVYPPAFMPSDQEVSNICYMAFPDSNSGCMGDTKFHMRLRCTTRRDSLPGYNAECSPALRQDGSHYWGFVYFRQKRDANLPRGYFQKSFIIITRLPFFNLYYDILSQLAPRYFEEGTDVLRLASEQINRQWPGLRVGKPLQLPLLDCSYQICIPRTSSSRKSTADGGIAGGAVESPPAMAACPAAKVLASVNEIELFRSLDFVMEQLYTLWELVITAEPIVVVGTSPADCSHMVQTLLAMIAPLEYCAEARPYFTIHDSEFREFTQECSSKTTLPACILGVTNPFFVKLLKDWPHMLRLVDNQKNMQQQQHLLLGQKHARNIASATSFSSSTELGGRIALKSNTNLNGSSSSSNGSGDASSAGLHSKYRPYLKKDKALIKKVLLGMKTKRPEHVQTALIRRHLLELTQSFMIPLERYMASLMPLQKDISPFKSAPNANSFKLDDFLGTLETAGPQLTSPLKGDWKGLYRRFFRSPNFRGWYGARHRELQLTLQDLQLQALSVANLEHWAHDKQEVEIIDMILKLKQKLNLYGDKATQLEGNNGSTQQQIRAQIECMKGLLPPDLKNVVNL

SEQ ID NO: 6181 - DNA, 5319 bp, DROSOPHILA
actaagttccctttacttcacgtacttcatgaaggaaaccaagggcaagtccatgttggatgactgagcaagtgaatgaatgtgaaaataatatttcaataaaaacatgcaaatgattgaacagaagtcaatcgtaatggaacggcaaatcgtttttaccatccatttgtagtcatttaaattagcttagtttgtcaaataaaaatcaggatattcatgtgttcagtttacattttcatgtatatttaaataagtttagttacatataattagataatataaacaaaatacgatttatgccgtaggctcaaacattctgatgctaatctattttcattttttaattacatagttggctatacaattcatcggacaagcacaatccactaatgctgcccatttaaaactaattaaaaaactagcatactaaatcacagtgttttttcccaagcgaaaaaaagtttgcaatattctacaaaattactagcatttcattataaacatacaatattgtatatatgtgtgcgcgggtggtgtggaaatagggcagcctgcagcaatatttcttggggcttttaaaacgtacattaaaacaattaaagttgggcattccacctgctctctctctctctttctctctctctctcttgtgtttcagcggcaaaatagcgattaataacataaacggccaacaattaaaatgcgtaaaacaaaacaaagataaacgtttacgaaacagttctttcgcactgccctaccgcagaccacgtttaaactataatagtaggtgtaaggataatggtagttatactcgcagtaattgctaagcatacatggtgtggcttgaaagtaatttaatcacaaaattggcgccctatagcaagtttgttcagttgtagcggcttagcaatggtgggcactactctaattacgtatcactggttcgatgtctgctcaaaatagatatagatatggatatggatatatacatatatagatatcacgtctttttggggcatcgcaggaagcgcaacaccgcgtatcccaggcaccggaataccaggaagaacatcatcaggatcagcgtgttcagccagagcggtgatgtcgagttttgggctttgagtatttcctcgtatggaatgaattcggttgattgctgtttgcaaatctcgtaactgctgggcgagccacaactgaaagacatatcataatattcattaatcatagttaattagtcaattaggattagcttacccaatagccgccccctcgcggaactcgagaatctgcatgttctggtaggcgtagtggatcatggaggtgtaccggatccagctgagcccctccggaatgcgcgaagacagatatccgccgaacagctgggtggccagcgtgtacagggcactcagggtgatgctcacgttcatgtccatgcagcaggctccgatgaagaagcccacgctctgggccacgatcgtgttgatcagcagaaagatgagcatcaggaagaatagcttcaagctgttaaggtacattaagcatgagctatgcagttcctagttgttcataggaccatgctcacctggtgcagcccagcatggggtagctgatcatgaggtagaccgtgggcaaagtgatcaccaagggcagctcggcacacattttggccaaataataggcggatagtcggtaggccccggagcgacgttccttgctcaccacctcgcgctccgaggggactgtaaagaacaaagatcaataaaggacaatgatttccgttcgcaatcccatccagactcacatgaattaagggccccgaagagggcgaagagcatccagtaggtctgcgagaagaacatccatccctggaggtcgtgcaggaactcctcggttctgggcagctggaaccaaatggcaccggccatcagagccagtccgatagtttggaaccaattgagtttggacagcatgcgcggcttagcctcccggaaattgcgacttgagaggacgcagaactgggtgtggaagctggtgggataggacagccagtcgtcatccgccgaatgtcctggcccactgccagcactataggaatgacaatcgctggaggcgcaggaactgaagttggactgcgagtccgcggcacaccacaccaggtgctgggccgcctcctcgtcctcctccacccggcagccgttgctcgtgtggtgcaggttctcgtactggtgatggtgccggttggagcgttgattgtaatagttatttattatgtcgtcgatcaggatgctatccgcttgcttcttgcccttcgcacccgaaacgctgacctggttatggtggctactcgtgatgcagttgcggttcagatagttgccgtgcgattccttggcggctatgaagagtttctcgcggatatccggatgcgatttcagttgctccactgaaaagttaaggaaaacattaaatctcgttttaaataactaagtactatttcagtacttacacacaaaatcggcgggattgtagtgcggcttgatggtgaccccgatgtcctcgaagtggcggtagatgttttgcacgtccccaaagtacgcagtgcgtccttggtggagcagaagcagcttgtcgaacatgtggaacatctgggacgaaggctggtgcacgctgatcacgatggtcttctgctccagctgggcgtaccgcttgagtactttcatcagcgaaatggccgagtggctgtccagtccagaagtgggttcctgtcggggaacacccaaaacgaatcattgaatctgcacttcaaaaggaaaactagcaacttacatccaggagcatgagcagcggattggtcagcagttcacaggcgatattcgcccgcttcttctcgccaccggagagtccacggttgaggtagtccccgaacttggtctgctgacagcaacccaattccagagcctccagtatgtggtccacctggcgcatcttctccgcccgcggcattgattccggcagtcgcagcagcgcagtatagaccaccgtttcgcggagcgtcaattgcgggaagaagatctcctcctggaggacatagccgatccttcgacgccactttttggtcaggggctcacggttgaggaacacactgccgctgtcaatgtgccgctgaccactgaggcagtccagcagagtggtcttcccgctgcccgaaggacccatgatggccaggacctcgcagggactacaacagagaggatggaaaagtacacacggtttggattattcgttacggacttttgggtaatgcataggctgccaacattttcacttgctttaaaaatgcaattacaattttgagttcatatattgcagcttgcagctgaaatccatttgtagattattcaaatttcattcgtacgttgttcaattcattaaaatactgccatctgtatgatgggttgatgggttgttattcttttgttaaagcttgaaagcgcacaagtgaagttggcagcacagcattcaatgaattattcgtgcttttgagtgctcttgttccgttgatcttgttacctgacgaatccactcacatcggaaagtatttggcgttcgttgtgcaaaacgttcaggttctggaaggtcagctgcaaactgtgctggggctgattctgggagtggtgatgtgggtggtggctgttgcagatgtttatgttgtgatgctgcttctgttggttcgccgccgcagacttctcaaagtggtaagacaaggaagctggggagttactgcaaataagatagatattatagttattattatatatattttttttttgcttaagtatatttcctctaccgactcccttcatctctgccagctcttatcattcaacttttcatacttattattttgtgtgtattatcatgctgtggaacagaacgccacaaaccttttgttgatgttcgtgcgaaacaaaacaaaacgcaagtcaatgtccccgcgggcaggcaaaagtaaaatcagtgcgacaaaagtcgggggatatggcagtacaatacagttactcggtgccgctcttgttcccactgtcaactgttatcgccgatatcacgttcgcatgtgtggcggtcgcattatcactcactcgaacgcacacacgcacacagccgcacaccaacgcacacacatggaccttaagagagcaagatgatcggcagggaaatggaaaatggaaaatggagctgtgcgtgctcgtaattctctgccgataccctgtattcggattgagttgggcatatgtggtttcgggatctgacttatccatctatctcatatatctttatttcttatctagctgtcttgattgtccagtttttttccagtgtggattgtttttttaatggcccaagcaaatataatttgagtggtttggaagtggagtatcatggagtcggaaaatcttactggctttcttccgtctctcgactctcggtcaatgtttcgactttactcccactacacagatacaatacacgcacacagatacagcgcgcacacacacacacacaggcagataccaagacggagtcaatagcctcttgtacgctggattctaccccgttcttgtgtacctatcaaatttatttaaatatttcactctactggcagcagatgggccctcagccttatgaatagaccatagataacgccgttatagttataacatctatttctggatctatatcatcgcggccctccatcagcatcaaattattcgaccaagagcagcaaatttcatttacaaattatacagaaatgtaaatttctgccgatcgactccggtaggcgccgaaagtaaatagagagtccggtcgagtgcattgaaccacacacgctccgtgagtgcgagcgagacgaacgaggcggtacaggggggcgggggcggtgtcggtgccgcgcagagggaaagggacggctataggggggcccgagtgggggtcaatgcagtcagcagacaacaacgacaaacaaagccaacactcacagatacccacgcacaccatcgcagccagcgcacgcactcgcacaggctgcatgcaaagtatctgatgaatacattttatttttatgtgctttttctgcctgccatcagcattacccaagttccccaagttccctcgttccacagtttattacaatagccaatgtccgggtcggatagcgagcaaaagacatagaggtcctcaatctaattgtcttttgaatgttttgaaattgaacttttgataaagatacaatagaaaatccttccgaaaagtcttacc

SEQ ID NO: 6182 - DNA, 2190 bp, DROSOPHILA
atggataagtcagatcccgaaaccacatatgcccaactcaatccgaatacaggtaactccccagcttccttgtcttaccactttgagaagtctgcggcggcgaaccaacagaagcagcatcacaacataaacatctgcaacagccaccacccacatcaccactcccagaatcagccccagcacagtttgcagctgaccttccagaacctgaacgttttgcacaacgaacgccaaatactttccgatgtgagtggattcgtcagtccctgcgaggtcctggccatcatgggtccttcgggcagcgggaagaccactctgctggactgcctcagtggtcagcggcacattgacagcggcagtgtgttcctcaaccgtgagcccctgaccaaaaagtggcgtcgaaggatcggctatgtcctccaggaggagatcttcttcccgcaattgacgctccgcgaaacggtggtctatactgcgctgctgcgactgccggaatcaatgccgcgggcggagaagatgcgccaggtggaccacatactggaggctctggaattgggttgctgtcagcagaccaagttcggggactacctcaaccgtggactctccggtggcgagaagaagcgggcgaatatcgcctgtgaactgctgaccaatccgctgctcatgctcctggatgaacccacttctggactggacagccactcggccatttcgctgatgaaagtactcaagcggtacgcccagctggagcagaagaccatcgtgatcagcgtgcaccagccttcgtcccagatgttccacatgttcgacaagctgcttctgctccaccaaggacgcactgcgtactttggggacgtgcaaaacatctaccgccacttcgaggacatcggggtcaccatcaagccgcactacaatcccgccgattttgtgttggagcaactgaaatcgcatccggatatccgcgagaaactcttcatagccgccaaggaatcgcacggcaactatctgaaccgcaactgcatcacgagtagccaccataaccaggtcagcgtttcgggtgcgaagggcaagaagcaagcggatagcatcctgatcgacgacataataaataactattacaatcaacgctccaaccggcaccatcaccagtacgagaacctgcaccacacgagcaacggctgccgggtggaggaggacgaggaggcggcccagcacctggtgtggtgtgccgcggactcgcagtccaacttcagttcctgcgcctccagcgattgtcattcctatagtgctggcagtgggccaggacattcggcggatgacgactggctgtcctatcccaccagcttccacacccagttctgcgtcctctcaagtcgcaatttccgggaggctaagccgcgcatgctgtccaaactcaattggttccaaactatcggactggctctgatggccggtgccatttggttccagctgcccagaaccgaggagttcctgcacgacctccagggatggatgttcttctcgcagacctactggatgctcttcgccctcttcggggcccttaattcattcccctcggagcgcgaggtggtgagcaaggaacgtcgctccggggcctaccgactatccgcctattatttggccaaaatgtgtgccgagctgcccttggtgatcactttgcccacggtctacctcatgatcagctaccccatgctgggctgcaccagcttgaagctattcttcctgatgctcatctttctgctgatcaacacgatcgtggcccagagcgtgggcttcttcatcggagcctgctgcatggacatgaacgtgagcatcaccctgagtgccctgtacacgctggccacccagctgttcggcggatatctgtcttcgcgcattccggaggggctcagctggatccggtacacctccatgatccactacgcctaccagaacatgcagattctcgagttccgcgagggggcggctattggttgtggctcgcccagcagttacgagatttgcaaacagcaatcaaccgaattcattccatacgaggaaatactcaaagcccaaaactcgacatcaccgctctggctgaacacgctgatcctgatgatgttcttcctggtattccggtgcctgggatacgcggtgttgcgcttcctgcgatgccccaaaaagacgtga

SEQ ID NO: 6183 - protein, 729 aa, DROSOPHILA
MDKSDPETTYAQLNPNTGNSPASLSYHFEKSAAANQQKQHHNINICNSHHPHHHSQNQPQHSLQLTFQNLNVLHNERQILSDVSGFVSPCEVLAIMGPSGSGKTTLLDCLSGQRHIDSGSVFLNREPLTKKWRRRIGYVLQEEIFFPQLTLRETVVYTALLRLPESMPRAEKMRQVDHILEALELGCCQQTKFGDYLNRGLSGGEKKRANIACELLTNPLLMLLDEPTSGLDSHSAISLMKVLKRYAQLEQKTIVISVHQPSSQMFHMFDKLLLLHQGRTAYFGDVQNIYRHFEDIGVTIKPHYNPADFVLEQLKSHPDIREKLFIAAKESHGNYLNRNCITSSHHNQVSVSGAKGKKQADSILIDDIINNYYNQRSNRHHHQYENLHHTSNGCRVEEDEEAAQHLVWCAADSQSNFSSCASSDCHSYSAGSGPGHSADDDWLSYPTSFHTQFCVLSSRNFREAKPRMLSKLNWFQTIGLALMAGAIWFQLPRTEEFLHDLQGWMFFSQTYWMLFALFGALNSFPSEREVVSKERRSGAYRLSAYYLAKMCAELPLVITLPTVYLMISYPMLGCTSLKLFFLMLIFLLINTIVAQSVGFFIGACCMDMNVSITLSALYTLATQLFGGYLSSRIPEGLSWIRYTSMIHYAYQNMQILEFREGAAIGCGSPSSYEICKQQSTEFIPYEEILKAQNSTSPLWLNTLILMMFFLVFRCLGYAVLRFLRCPKKT

SEQ ID NO: 6184 - DNA, 4067 bp, DROSOPHILA
gaaatccgattaggaaaagggaaagctgcagcgctgctcctgtttgccaaatattgattcgcaagtgtgccgctgaaaaatcgattattaaagccactttccacacagctggtggttgttgttgccgtgaggatggaggtggtgcttggggtggtggttgcatagggttgcgtgccgcgatgtgggaaatcaacagcaacattggcacatccacatccagatccagaggcacacttccaactgttttgacgtggtcgggttccaatggcgctgacactaccgaatgctgcagcgcagccttgcagccatccagcggcgacgcgttgcatgtgcagcagcaacagcaacagcagcagcaacatcagcagcagcagcagcagcaacagcaacagcagcaacaacagcagcagcagcaggatacgaaaacgaggatgacaacgaccacaggcaaacgcggaggacacagatacagaagcaggctcagtcaccgaagcacagcaacaattgctgcatattaggcagtaaagtaaagttaaacacaacccaaaaccgaaaagactagcccaaaatttactcaaaaaccaacacaagtggaaagcattaatcggaatgtcgaactctatgcatcgcacaaagttacgttaagtatacgacgcgtatttccagctgcaaaacgaaccaaaaacgaaccgaacgaaacgaaacgcacaggtgcatctgcagaccccactacgcccctaaaagcccactccccccccttttcgaaccctcagcccctcattaggccaccccctctggggtatctacaccaattgacaagcaatcgaggcaatgcagtatgaatgaacttgtttagtcgacaattttttaagtgcactttcgtaaggctgattttcaatttatttcgatgttgtgcttctacacccaaaaaaaaaaccaaatataacaagtaacaaatacaagcataaaagaacccaagaaattcaagcaatgaaccaagtgaaagtgtgagtgtttagtgttttaagcgaaggcgaaatccggacatttgagagcctttgtgagtaaacggccgccacaacggataggcccagagatctcctgctgatacagcaggccaagcccgccggcggcagcaaatcctccagcggtggtccaacgtatatcggcaccgatgccgccacagcagcggcggtggccaatctgcgcagcaaggtgccctccatctcaataatcccgctgcccgtctcgaccaccattgtggcacgcagtggtagcggtgcctctggcactggcggcagtggaggagcaccgccagcactgccccagctgatccagtcgtcgcggagtgtgtccaccaaatccacgggcacgtctccaccattggcctttataacggaaggttctggaacatcgggtgctcccgccctgacactgctgccacgaccccagcagcagcaccagtaccagcagaccgacaagtgcacggtcctcaaactggacgtactgaagcagcagtcgggtgtggcagccaactccagcagtaatacctacctgcagatcgagcagcagctcagcgaactggaggccgccgacgaggaggaggagaacatggccagtttgctgggcagtgcgccacccgcccaaatcctggccaaccagcccatcatcgtcaagatcgagcccacgcaatccttccacatcgtggacgagggcgacacgagagtactgagcttgcccctcagcgatgctgataagctgggcgccagttggatagatctcaaggatattgccggcctacaggccggtggcggagccaccttgctggacgtctgcttcgagcaggccaacgaggacggcaccatcatagccaccgtgcagccggacttggaaaacgagctcgaggctgagctaaaggcggagggcgagcccgaggatgagactgaaccagagcctccggcgcccaagagattggcgaccaccaggccagcacagtcgcggccacaacagcagcagcaacagcagcagcagcaggtgaaattcctatcggatccaccggcattggcacgctccagcagcttcagcagtctcagcagctttagcagcatcagcaatatcagttccgtgtgcaagaacatggccagcaataccagccaggagggctccctaaaacgcacaaaggagcgaactcctccaccaatgccaccgctcacgactcacaagcccgctgccacaacaacagcaacatcagcaacatctgcagccgcagcaacatcagcagcaacagcaagtgcaacagcaacatcggccagagaaaacagcagagagcacagcagcagcagcagcggcagtaatggagccatgacaggtatgttccagtgcaactctcaattatattttagtcaatttgggaatatatatactgttcgagacgataatatatctaccaataatatatcttcatatgcaaaagcaatgttcttcgtcactcttgctcttaacaaacgttaaagaattttactaagccattgtgagtgattgtagcaaatatttgaaagaccttaagtcaaggattcccgcgagtgatgagttcgcaccccagaaaactcggcaagaattccacttgttgcgaacaaccgccggctaaccacagcacagtgagcactcgcccagagcgaccaccaacgatcagcgatggttcagataatcgcacccatatcccccagatcccctcccccttcccccttccccattccacgccagaatccgagctatgcaaatgaacgctcgcccattgcgcaagcatcccaggcagcggcaattaacaggctgacacatcagcaacacatcagcagtagcggcagcaacactagcagcagcaactgcaacaacaggtgcactgggtgtacattgcacggtgtacacaccccgtgctaaaaagaatttcaatttacaagcctcgatttattggctattcacctttgtgtggctgcagcagcagcagcagcagccgccgcagcaaagcagcaacaccaacagctacggccatgtggcccactttccatagtcaacaaacagcggcaacagcaacagcaacaaccaacacacatacagtaagaaggcagcaacaaaaacatgttttgacatactaaataagccgctgctaggctgactagcttttggccaagtctagatggcgttctttatcattaggttctgttagctgtttctgcgattctccctgcctcggcatattcgctttactgctgttgcggcacagcagcaaacgccaccaccgttcttctgctcggcccctcatatttttaccgtagcacgaaccttagcggtaaaaacgtcaactacaaactatacagttacctgaatgaaggctcaaacggactgagagcgaaactcaagctggctagaacagaatgaacgtttttacactgaaaaaaaggggctgaagtgttagtccagtctagaaactaaaataatctctataagaacactttgtgtaaataatttaaatttgttctatcttctgctcatgcattatgctttgctttaggacattttattattgaaggttaccttgtttttttttttcagtgtaagcagccgagcagcgaacgggcttagggcgcggggcggctaagctgaaaaattgatttggcagcgccccgggccagcgagttcgagtctgctccctcgactcggttcacttgatgactacaaatgagtgtcagccactgacacgacttctcatgcagaagccctacagttttggccaagattgatctatattttatagttttctgttgatatcttggcgctgggggccgccgtatccacttgcatggctcattagcgggctggggcggtggccaaatatgtcggattttctagtctcatgattgatgatcgaggcgatgaatcgttgttgcctaattgctgtacctgctagaacagacatgacgttcaaggaacagatcaatcgatttgtttctgagattaactgctctcccaattccagaagctgaatgatcgatctgcaaatctaatgaaca

SEQ ID NO: 6185 - DNA, 1478 bp, DROSOPHILA
tgaaagtgtgagtgtttagtgttttaagcgaaggcgaaatccggacatttgagagcctttgtgagtaaacggccgccacaacggataggcccagagatctcctgctgatacagcaggccaagcccgccggcggcagcaaatcctccagcggtggtccaacgtatatcggcaccgatgccgccacagcagcggcggtggccaatctgcgcagcaaggtgccctccatctcaataatcccgctgcccgtctcgaccaccattgtggcacgcagtggtagcggtgcctctggcactggcggcagtggaggagcaccgccagcactgccccagctgatccagtcgtcgcggagtgtgtccaccaaatccacgggcacgtctccaccattggcctttataacggaaggttctggaacatcgggtgctcccgccctgacactgctgccacgaccccagcagcagcaccagtaccagcagaccgacaagtgcacggtcctcaaactggacgtactgaagcagcagtcgggtgtggcagccaactccagcagtaatacctacctgcagatcgagcagcagctcagcgaactggaggccgccgacgaggaggaggagaacatggccagtttgctgggcagtgcgccacccgcccaaatcctggccaaccagcccatcatcgtcaagatcgagcccacgcaatccttccacatcgtggacgagggcgacacgagagtactgagcttgcccctcagcgatgctgataagctgggcgccagttggatagatctcaaggatattgccggcctacaggccggtggcggagccaccttgctggacgtctgcttcgagcaggccaacgaggacggcaccatcatagccaccgtgcagccggacttggaaaacgagctcgaggctgagctaaaggcggagggcgagcccgaggatgagactgaaccagagcctccggcgcccaagagattggcgaccaccaggccagcacagtcgcggccacaacagcagcagcaacagcagcagcagcaggtgaaattcctatcggatccaccggcattggcacgctccagcagcttcagcagtctcagcagctttagcagcatcagcaatatcagttccgtgtgcaagaacatggccagcaataccagccaggagggctccctaaaacgcacaaaggagcgaactcctccaccaatgccaccgctcacgactcacaagcccgctgccacaacaacagcaacatcagcaacatctgcagccgcagcaacatcagcagcaacagcaagtgcaacagcaacatcggccagagaaaacagcagagagcacagcagcagcagcagcggcagtaatggagccatgacagcctcgatttattggctattcacctttgtgtggctgcagcagcagcagcagcagccgccgcagcaaagcagcaacaccaacagctacggccatgtggcccactttccatag

SEQ ID NO: 6186 - protein, 288 aa, DROSOPHILA
MASLLGSAPPAQILANQPIIVKIEPTQSFHIVDEGDTRVLSLPLSDADKLGASWIDLKDIAGLQAGGGATLLDVCFEQANEDGTIIATVQPDLENELEAELKAEGEPEDETEPEPPAPKRLATTRPAQSRPQQQQQQQQQQVKFLSDPPALARSSSFSSLSSFSSISNISSVCKNMASNTSQEGSLKRTKERTPPPMPPLTTHKPAATTTATSATSAAAATSAATASATATSARENSREHSSSSSGSNGAMTASIYWLFTFVWLQQQQQQPPQQSSNTNSYGHVAHFP

SEQ ID NO: 6187 - DNA, 3398 bp, DROSOPHILA
ggcgttcaccagcaaggccttcacgtcggacgtcatgctgccgggatcgatcatgcccttgattttaccactggtctgatccagcacccactggttgattctctcggccgccacagggccattggtcagactaatggactccgcctcggacttgaagggttccctcacagcgaggttgtagttctgattcaggctgtactggtcgttgacgtagatgcgattcgcgagctttagtatgggtccctcctcctgtccctgaagatcgttgaggagagcaccgtacctggctgccaccgcctctttgtcctccgatggtaaacctaaggcgctctgcagctccttggccgtcgagccttctgcgcccatgaagaccatgctaaggatggtctctatggagacgggcgagacgacgaggttctggtttgtatggctcttggaaagtagttggtagatctctttggaggtctgacatgccactgaagtgacccacaggaaaatgcctagtttggggatgttaattatcaattcgttttcagcgttcggaaattctgttcatgcatattaaacttgatattttttacttttacagactaaagcaaatcgaattcaacgaaagcggatagtctttgtaagttaaaagttaatgccatagcaaacgtcttcaccatattgttttattattttctatgaatttaatttaaatcataagttattataggtaatttattgctttgtattttaattcactggctataagcgatcgccacttacacaagtaatacatttgaccgtctacaacgaactcttccccgagataagtatctctgtaaactgagcgccgagtgccaagacgagctcatatatgcactggacatatatgtacctactggcgatacttcattacgttactgagaactgcgcacacagctctctcggattgaaatccaatgacgtctagtgggatttcatagctgagttctattcggtctcactgctgttcttagacattgtacatgttggcatcgaaaccttcccgtgacaagccctcctctcctgatccagatccagacttggggttcgagaatcggccggcgaagaagacggcctgcgggtttcgtatgtaaaagacgaacgggtgatccgccttgaagagcttcttgttcatgttgagcatcatgggtactatcttcatgactgagtgtgggaatcagagttgagattagtacgagcaagtttgagttgcaagcagctgatttcacttacaactgactgctgctgcctccgatcctgcctcatttacgtcgatgtagccgcggtgccttgctgccgagattttttggccactttgcgaggtaaagagcccgtctagcttggccttatcgctgaagacttccgtaatacccagctgagaataaatatcagatattacattgttattaaaacaaagccactattatcggttaaatgtatcttacctgattaagtacctgcttgaggtccacgtcgtactctatgcacatcctgggcagaaagatctcgacatcctgcaaggtcagcgctgcgtcaatatcggctagatccacggtgttgagttgctgctctaactcctgcagaccgtttacttcgttgggcagcagaattagcatgtgaatgtttgagtaatcatagggcagttgcacagctcgagccttcagctgtggcagttctgcgaaccggaacttgtcctcttggtacatcatattcacctgcacgtgagtgtcccggtccacgtggaaatggtcaatcgatgtggtctctggcataaatggtttctgccactttcccttaaagtacaagacattgatgagcagggcgctcgtttcgttgttcacggcatccgattgaagcaggttggtgatcttatgctccgtctcctgttccacccagtcgttgatcagctgcgtagctccctccgaatcggcgaacctcgtcgcctcggccttcgactggaagaagtccacggcgatctcgttgaactcggtaagcagttccaaggaatcgttgacgtacaatcggttcacggacttcaacacgggtcccctgtcgccgtagttacagctcgtgcgccagaactctccgaagtttagggctatgtgatggcgatctcctggtcctagctgaagcccattccttagctcctctgctgtagatccggaagcccccataaatgccaaggtcaatgcactttggacggatgctggagagaaaaccgtatttatgtgggggtctttgctctgttgcagggcatctttggtaatgacatctatcagatttcgcgcaaactgatttctgccttcttggggttcgctcatctcgatctgggcaaaaaaatatatgttttaatttatatttttaaatacttaaatgtaacataagtatacaaaaataagacattttcgggccaaatctcattatctcatttggcattatcgccagctgttaagcgccaacttgatcaatccagaacaatttcgaattcggattcaatctttaataaaataaaacattttcaaaattgcctatgctaattaaaaataaatccgaaatcccagaatgacgtattagcttacaactgctactaggtgctactatttattttaaaataataataataattccctattatatttttaatagaaccgatgtagaaagtaaagtgaagtcaactagaacttgctttcgtcataacaaattgccttatagcaaacgacgcgatagtaattcaaagataaaataacacacgtcacctgataaggttgttgatgttttcagatatttaaaatttaacaataccctctactgcatagaggggattactgcatatttagattaccgtaacttagcctactaagtaagtttcggaatttctttaatttacaaatcatcgatcaatgtggacatgaaacaataaatttctctacgtgcactgataagctattttggatcggcgaaacaggtgagggcgtcgctgaccctatgggtgcgctgataacttacaccggaaaaaacaatctcacggatacaatcggaaggcagccggagaatgagcgtggtttccgtcaaactgcgcggaattgactaacgccgcgaatcgcagtaagtcagaactgaacgaactgcaactcgattagataaattccaagagagtctgaagtggcaagcgctctcgacggagagaagttcctggcgtacccgaaattggaatggtgttgatagctcatctagcttcttattaaaatatttgctcaaactgctgataagtcaatctgaatctctttcgaaaaatgagtactcactgattcttctatcgtagacgcatatttaacatatttaacctgagatcgtctgctttcttcatc

SEQ ID NO: 6188 - DNA, 1259 bp, DROSOPHILA
tatttaaaaatataaattaaaacatatatttttttgcccagatcgagatgagcgaaccccaagaaggcagaaatcagtttgcgcgaaatctgatagatgtcattaccaaagatgccctgcaacagagcaaagacccccacataaatacggttttctctccagcatccgtccaaagtgcattgaccttggcatttatgggggcttccggatctacagcagaggagctaaggaatgggcttcagctaggaccaggagatcgccatcacatagccctaaacttcggagagttctggcgcacgagctgtaactacggcgacaggggacccgtgttgaagtccgtgaaccgattgtacgtcaacgattccttggaactgcttaccgagttcaacgagatcgccgtggacttcttccagtcgaaggccgaggcgacgaggttcgccgattcggagggagctacgcagctgatcaacgactgggtggaacaggagacggagcataagatcaccaacctgcttcaatcggatgccgtgaacaacgaaacgagcgccctgctcatcaatgtcttgtactttaagggaaagtggcagaaaccatttatgccagagaccacatcgattgaccatttccacgtggaccgggacactcacgtgcaggtgaatatgatgtaccaagaggacaagttccggttcgcagaactgccacagctgaaggctcgagctgtgcaactgccctatgattactcaaacattcacatgctaattctgctgcccaacgaagtaaacggtctgcaggagttagagcagcaactcaacaccgtggatctagccgatattgacgcagcgctgaccttgcaggatgtcgagatctttctgcccaggatgtgcatagagtacgacgtggacctcaagcaggtacttaatcagctgggtattacggaagtcttcagcgataaggccaagctagacgggctctttacctcgcaaagtggccaaaaaatctcggcagcaaggcaccgcggctacatcgacgtaaatgaggcaggatcggaggcagcagcagtcagtttcatgaagatagtacccatgatgctcaacatgaacaagaagctcttcaaggcggatcacccgttcgtcttttacatacgaaacccgcaggccgtcttcttcgccggccgattctcgaaccccaagtctggatctggatcaggagaggagggcttgtcacgggaaggtttcgatgccaacatgtacaatgtctaa

SEQ ID NO: 6189 - protein, 354 aa, DROSOPHILA
MGASGSTAEELRNGLQLGPGDRHHIALNFGEFWRTSCNYGDRGPVLKSVNRLYVNDSLELLTEFNEIAVDFFQSKAEATRFADSEGATQLINDWVEQETEHKITNLLQSDAVNNETSALLINVLYFKGKWQKPFMPETTSIDHFHVDRDTHVQVNMMYQEDKFRFAELPQLKARAVQLPYDYSNIHMLILLPNEVNGLQELEQQLNTVDLADIDAALTLQDVEIFLPRMCIEYDVDLKQVLNQLGITEVFSDKAKLDGLFTSQSGQKISAARHRGYIDVNEAGSEAAAVSFMKIVPMMLNMNKKLFKADHPFVFYIRNPQAVFFAGRFSNPKSGSGSGEEGLSREGFDANMYNV

SEQ ID NO: 6190 - DNA, 4156 bp, DROSOPHILA
ccattttcccgaagttttcgttctggttctttagtcactcggtttcgtttaggcgcagcttaagaattcacgtttgatggtaaaaacagtttttctagcatttagcgcaagcgcaggcgagaaatttttattgttggacagcgatttaatgagagacaacagcggaaaatggctaaataaggccggatgaaaataccgcactgcatctgcagccaccagttggattcggtagtttcagggttggcataactggttgctagctagatctagctaaatgtttaatattttttattttcttttcttgcacttgaatataaacagatactatttttagcttgttaattaatcaattaatatatgtgtaattgaattctatattgaaatgaaaaaaataagaacttgcaatgattttacttgatattaatttcaatattttttatttactttggcaagtttaagctacttttcttaagcaacgcgacctccaacactggctgcttccaaagtttctttctatttagtatttcttttcaagattttcggtaatacaaatcggtcacttttaagaaattcataatttgagcatgtctttgctgtaacgatcacatttgtggtgtatgtcctagataggatggaatgttagatatattatttttatttaaacgaaaggtattctgaccacgatttgattcgttttcaagcgctggcctattaaaaaagaagttacgcttaaataacattgttttttaacttatctgatgtaccttaaaatttttaaaacataaatggagcgagtctctgctaagaataagcatagcctctcacctcggtatatcgcttcttttggcgtttcggtgcaaatgtggcacggtcagatcgaatctactcgatttccaacattggaactgccacttcctttctttttcgttccacgtttccggtgagtgcatgtgcctagcgagcagtcctgaattttgtgctaaaaaccaatattttatttactttcagcgagtatttcgatacgttcgtggtcgtgcttatcacaggtaaagctcacaattccagaaattcacccaaaaactacgcggccggcgaaaatgtgtgcaaaaccaaattttttgtataattttttttctgtgggcttccaaagccggatttaaatgtgccacttaaaagaacaaagtgtaaacaacacgtgaagtacgcagtatactccgaaaaccttttttttttttgtagtgaaattgccaaattccaacccatttgaacaaaaatgtgcgttgcggcatgtttttgtgcatgtgttggtgcaggtgtatggagtgtgtgtgtagaagtgttgttaaagaaaccttaaaacttcaaagttatcaaaatgaaagtaatatttcttcaatttaatgaaaacggagtagatttcttcggaaaatctgcgaaaaaacgtgtgttgtttatacccaattatcacacacacacacacacacacacgcaagcaacatggttttttttttctttccgtacttacatttttcatgcacgtgttttgctggtcgccgaagttttgcgtgttttcccattaactttaccaagtttaaaacgtattaatgtgctaattcttttttagcaactgcttatttcggtagcaaactttaaaaccgcttgaaaatggttgtcaagaaggtgagttatcggcgtaaatttgctgttaactcgaattaacctaatgcgtgttttcattgcgtttacagcccaggccaaagaagaagccagtgaccaagaaggtggctcccgctcctctggctgtcaagaagcccgtggtcaagaaggttgttaaccagctgttcgagaagcgtcccaagaacttcggaatcggtaagtgcacaaaacatattctatatatatgaatattgcagcggaatttcttacatattagctaaatgtatacatattctctcactttgcaggccagaatgtgcagcccaagcgcgatctgtcccgtttcgttcgctggcccaaatacatccgggtgcagcgtcaaaaggctgtgctccagaagcgcctgaaggtcccaccaccaatccaccagttcagccagactctggacaagaccaccgccgtgaagctgttcaagctgctggagaagtaccgccccgagtcgccgctggccaagaagctgcgcctgaagaagatcgccgaggctaaggccaagggcaaggatgtggagcccaagaagaagcccagctatgtgtccgccggtaccaacacggtgaccaagctgatcgagcagaagaaggcccaactggtggtcattgcccacgatgttgatcctctggaggttagtttgactcaattgtcgcagctcaaagcttgcacatcatccaaatatttgcaaatttgcaaatatacatggttctcaatcacgttgcgatgatgaaaaaatttcttcaactcaaggcttctcgcttccggcggctagcaggttatcctgctccggcggagtgggttgctgccatgtagaaatttgactcctgacgccttaattctttgttaaggattgctaaatccttggtttatctttgaattagttgaagagctaacaactagatctaataactaagccaaagataaagttaacatttgaagaattgagggcaacttgattgcatacaatgcgcaagcccacgaaccacgtggttttccaagacgacaattgattaacgcgttaatttccattccagctggtgctcttcctgcccgccctgtgccgcaagatgggcgtgccctactgcattgtgaagggtaaggctcgtctgggtcgcctggtgcgtcgcaagacctgcaccaccctcgccctgaccaccgtcgataacaacgacaaggccaacttcggcaaggtcctggaggctgtgaagaccaacttcaacgagcgccacgaggagatccgtcgccactggggcggtggtatccttggctccaagagtctggcccgcatctctaagctggagcgcgccaaggcacgcgagcttgcccagaagcagggttgattcaatctgaagccggtccggtccgatggtggagacttttaagtacacatggatgaaattagttgggccatgctcactgaatttgataactaataaacttttaagtgtacaattttttttgttttttttttttttaatctaagtgcctgtgagagtgcttttggatgagtcgatgatttggcgtcggcttggattcaataaatctaagatgtatccatgcccatcactcactttgttttccgccaatcgggaagttgtgcctgtgagaaagagaagtcttcttgaattgaatttggccaacttccgcttctttgtaccatttctctctagatgacaacaaatttcacatgccatatgtttcaaacatttagcgaacaaaagacaaaaggaagtacatttagttttccatatttgtttttattttataactagtgataggagcagggcaacgatttgttagattttcgatagatccgtcttgatccccagcttgctgctctgaatggcctcgttcaggatgctgagcaccatgtccacgcgctccacggtagcgttttcgcccattaaaccgatacggaagacgtgctccaccgtgggacccagaccaccgctaatctcaacgctgtacctggaaaaaaagaaaggattcaatacggatctctatcgaggattcgcgtccagttgtacaatactcacttgcgcatggcgtactcggccacctttttccagtcgacgccgaagggcaccttaatcgtgttcaccgtgggcaaacgctcctcctcgcgcgacacaaacatctcaagacccagctcctcgatgcccaactgcagtcgcttggagcactcctgatggcgacgcaccaccgccttgaggccgacggcacaaaagtgggccagtgcctcacgcaatccgtagagcagggtggaggatatggtgtggtggtagatgcggggtgtgccatagcaaccccagtactgaccaatcagcaggatatcgaagtagtaaaccttcggcttggtctttcgctttcggatgcgggtcaaagcacgcttgctgaacgaaatgggcgttagaccggcgggaccaccgagcgatttctgcgaacccgtgta

SEQ ID NO: 6191 - DNA, 1015 bp, DROSOPHILA
actttcagcgagtatttcgatacgttcgtggtcgtgcttatcacagcaactgcttatttcggtagcaaactttaaaaccgcttgaaaatggttgtcaagaagcccaggccaaagaagaagccagtgaccaagaaggtggctcccgctcctctggctgtcaagaagcccgtggtcaagaaggttgttaaccagctgttcgagaagcgtcccaagaacttcggaatcggccagaatgtgcagcccaagcgcgatctgtcccgtttcgttcgctggcccaaatacatccgggtgcagcgtcaaaaggctgtgctccagaagcgcctgaaggtcccaccaccaatccaccagttcagccagactctggacaagaccaccgccgtgaagctgttcaagctgctggagaagtaccgccccgagtcgccgctggccaagaagctgcgcctgaagaagatcgccgaggctaaggccaagggcaaggatgtggagcccaagaagaagcccagctatgtgtccgccggtaccaacacggtgaccaagctgatcgagcagaagaaggcccaactggtggtcattgcccacgatgttgatcctctggagctggtgctcttcctgcccgccctgtgccgcaagatgggcgtgccctactgcattgtgaagggtaaggctcgtctgggtcgcctggtgcgtcgcaagacctgcaccaccctcgccctgaccaccgtcgataacaacgacaaggccaacttcggcaaggtcctggaggctgtgaagaccaacttcaacgagcgccacgaggagatccgtcgccactggggcggtggtatccttggctccaagagtctggcccgcatctctaagctggagcgcgccaaggcacgcgagcttgcccagaagcagggttgattcaatctgaagccggtccggtccgatggtggagacttttaagtacacatggatgaaattagttgggccatgctcactgaatttgataactaataaacttttaagtgtacaa

SEQ ID NO: 6192 - protein, 271 aa, DROSOPHILA
MVVKKPRPKKKPVTKKVAPAPLAVKKPVVKKVVNQLFEKRPKNFGIGQNVQPKRDLSRFVRWPKYIRVQRQKAVLQKRLKVPPPIHQFSQTLDKTTAVKLFKLLEKYRPESPLAKKLRLKKIAEAKAKGKDVEPKKKPSYVSAGTNTVTKLIEQKKAQLVVIAHDVDPLELVLFLPALCRKMGVPYCIVKGKARLGRLVRRKTCTTLALTTVDNNDKANFGKVLEAVKTNFNERHEEIRRHWGGGILGSKSLARISKLERAKARELAQKQG

SEQ ID NO: 6193 - DNA, 6098 bp, DROSOPHILA
gatcccgtccaggaagtgctcggtttcagtgatgatgacgacgacgacgacgacgacgacgaggaggagcagcaggatgtggcggaactgatgcgcgacagtgacatcgagggcgccgaagacgatgaccgcgatctgcccaacaccatggactggggcagcaaacggagcacgtactacaacaccgactttgtggaccaggactacagcagctacaatgcccaggaggaggagcaggcacgcgccgaggaggaggaggccaaaaagatccagctgcgtctggccaagcgcatgagcgaggccgatttccagctggacaatgtagaagcagcgcccgcaggcagcagtgatgacaacgagctgagccatataaccaaagtgaccagcgatctggccggcctatcagaacgcgagcgacgacagctgatgcacagtgagtcgccggagttcatcattctcacccaggattttcaacagcatctcgacgaggtgaagaacctattgaaaccggtgctcaactacgttcgcaaacacgatgtgcccatggtgccggcgctgcaatatgccggactctgccacaccgtgctcaccacctactgctccaatgtggctttctatctgctgctcaaggcacgtcgcatcgacgtcaaggcccatccggtgattaggcggctggtgcaactcaaggatctgatcgaggagcttaagccgcgctacgaggaatacattcgaccgcagctggaggcgctgctggagaggattgaagatggcgatgcattcaccgtgctggatgtggcacagcgcaaggctaagctgcagatactcaacaagtacaacgatggccagcaggcgtcagtgagctccgatgatgatgataatgatgacgatgacgatgctgagagtaaggagaaggatctgcaagaggaggctggtgaggaggaggaagaggaggatgcgcgacgcggcatcacctatcagatggccaagaacaagggcctcacgccgcaccgcaaaaaggagctgcgcaatccgcgcgttaagcatcgcggcaaataccgaaaggcgctcatccggcgcaagggagccgtgcgcacggtgcgcaaggagctgcagcgctacggcggcgaattgtccggcatcaaggccggcgtcacgaagagcgtcaagttccgcacctagtttttatccaataaatccgccaagatcattacattttaatcaactcgatgtttgtacacttgaaacacccatttcatccaaagactcaccggggattagtcaactagctgtcatatgcgaaacaaacaaacatttttcttcacttggttcatcaagaaaccaatttatatgagtcgaaacaaaaatcattgtcttacaacagtttttctctttgtacagtgttctccaaccttgtctgtttaggttgccttaaatctaaaaaaatatatgctccaaatcttcgtcttcgtcttacaaactaaaccatggccgctggcaccgggctcagccgccggcatttgtcgcctaatccttgagaaatagcttgcgaaagtcatcgtttgacttgggcacagcagctggcatctcctcttcttttttctcatctcccttttgctccactccactttgctcctctcctatttgatcatctcctttttgctcctctccttttggctcctctcctttttgctcctctcctttttgctcctctcctttttgctcatctcgttcttgaacatctcctttttgctcctctccattagcctcgcgcttgatggccacgtcgacggatgccgaagtggatgatatgtcccccggctcgggcagaagcaagcgcagcttcttggcagccacctcttggcgcaccagagtcgtgggtataagcgaggtgggcacacgtcgcttgggcgccacacttggcttgacagctgatgtgcccctcggcggtgggtttgaaatggccacagagatctgaaagagttgtgaaatgcatttgctttggttggttcggttaaacatgaaggcacacatcattcgcttacattcatgcccttgaatagacaaccatctcgtccagccactgctcgttgcgcctcgcccggcttctcgaactcaacgtatgcaatgcccttgaactgcttgtttctgtagaggatcaaatagtttaaaatcaataattgtaattgtaatctcgcactcacagcttgtgcaccaggcgcacatctttgatggtgccgaaaggcgagaagagttcgtgcagctcctccttgctgcaagcgggatgcagatttcttacaaagatcttattgatttccatgttggctagaagagagacaactaatgtaagtccttgaaacgcatgtgtccaaacggcatggcgactcacgcgaatacttaaagttcgattccttggcctctgcattcgctggccccttgactttcgatggcggtgacgtagctccaccagatggctcggttctggacttcttaatgccatgcttctgctgctgctgctgttgctgttgttgctcatgcgcctggcgacgtcgctgctcgcgattcagtggctcacgattcgtttgttgctgctgctggcgcggcttaagcttctgctggcgaggataagccgactgtgagttgggcttaatgcgggaacgcggcttcacatactcgacaggcagatcgagggcctggcaggcggcaatggactcgtaggtgccatagcaacgttcatagcggcgaaaaaactcctgcaccataaggccattctcgaggacgggctgcgagagagctttgcgaaggacatcgcgtgtgccgtggccaccattgtattcgctttccatctgggcaaagttcagccagagcaggccgcgtatcgagctgcccggatagcctaaagatgagtagttaaaacattgcttatgcaatcatatttcaaagcgctcacccattatttggcgccaaatctcacggccattgtccggactccccagttgcgtgtactcaacttgggcccacaactgcagcacctcgtacctggtgtccgcctggtcgccgtagagcacggttagctcctcccaagcatgattgaaggcggcacgcagactggcgacctgctgctcatcgctggcattggtgttgcgaatacgataggccagatagtccagatgcagctccacggtcatatccatgtcggtcacaatgcgctgcaatatgagacgtatctcttcatccacttccgccaactcaaagtccgagcgctccattaggtcgaggaaacgatgattcaattgtacactgggatgactgcgcacaccacgattggccaaatcgagttccgtgttgcgcagaaaacctttgcccaagcgtttggcccgtttggctaccatttcggcggttacctcattctcatcctcattctccggcacagtgacgccttcgaactgaatgaactcaatgtaggataaccagagcacatcgacaatgggaaacttggccaccgagcgttcgaatatgaaacggatcacagcgtttttgaggtcatcgtcaagggataatgtctccacatcgtagacatgagccttgtgttgctcagaccaatcccaaccacgcgttgtctcgtccagatgttgcttaaacttgtccacaacggacttgatcatctgccgctgctccacgttgcacgtccaggtgacgcagtgcttttgcagcatttccacaaaggcggcagcctcattttcgtccgtaattgtcgatatcagcgaacgcagcttgtcgccaaagtctggacgctccacgtcgtagtccgccagcagtttggcccacagcacatggttctgtacgttgccctgatccaccaggtagttgacaacgtattcggacagcggtatgcctgcaatatgtaactcgtcaattggtttaactacgaatggattctatctatcgcatactgtagtagtagcccaacgctttggcacactgctcctcgaatgccttgcgctcctcgtccgtttgggtgacgaccaggcgggcctttagatacttcagccacacgtgagccggcacagtggccaaattttgcagctccagcaccgatgactcgatcttttccagatcattcagtttgctgcattaacgagcatcaacattagctaatgccgatattgaaaaaatggaaaatgggagtgggagaagcaggcaaactcacaatgcgattccaatgagcgagaccatttgggcaaactttttgctgggcaacgcattcagctcctgatacgagcgctctagctgatttccgccgccagcgttgtcgctatcactgtcactgtcactggacacctcactgttcgattccaattccgagccttcgatcacgcccacatcatcgctactgctgctggaatcattgcgcgctctgccacggccagcggcattgcctccctcagtctcctccactgacggctcgtcgtccgatgagatcaactcaatggtggtcatatccccgccggcggacgacggtggccaggttgggcgcgatcgttggcgcagctcctccgacttgtgctcctcctcctgctgcggcgactcactgtgcccctgctgcggcgagcccttgccctgatcgggtatcacgatcagatcatactcgtcatacgcatcgtcgtccaaatcctctgccggcatctcgtccagctccttctccagctgcctttccagctgcaatatattgggcatacgcataagggcggcgcctattggagctataatctgacactcacctgcttgtcggcgtccatgcttcaaccgtttattttggtggaaaacttttcgctttccgtggaactgcaatttttcccccccaaaaaaaatacaggaaataaaaaaacaaaaaaaaaaccgcaaacgcagggctggccaatctaatatcgcgttgttgcgcttatcgtggaaaattatttggtttcaggtttggtttccctattgggcactttttcttggaaaaactttccaagcacttactttctgagaattcggttaacgaaaacttatcattttctgtcaagaaacaccggtaaagtgtgaataatatgcgaatttttttttcgttataacagtgtgaccagtgcgtaatatcgatagctgtgcgcactcgatagttgcggcagtccagacaatggctgtgttaccagcagtgcagtgaagactcgtgatgagcaatttgaagactaatttcggtaatatgtggtcaatattaactggtttctttgggcggtcagaaatgtatagcaaagtcaaatgataaactaaatcctaccaagaaatataatttattttaaacatatatatattttatagaaataaataaaaatggaatttattttacttaagtgctatatatatatgtatcataaaatgtaaacaatttctgtttcttttacacaaactatttaataataataaactatttaatacgcagccacatcataaatggattaagtgtagacagtactcaggcaaataataaaaatattataccattatatgaatggattaagtgtggacagtaattaagcaaataataaatatattactatatactataatactataataggaattgattaggtgtaaacagtaataagtcatataatacatatattgtatatattataggatatagtaataataatataataataattaggcaaataataaatacaaatattatactattataagaatggtttaagtgtaataatattatatattatataataattaagcaaataataaatatataatactattataagaatggattaagtttaaacagtaattaggcacataatacatatattgtatatattataggaatgtattaagtgtggacagtaatttagcaaataataaatatattttactattatagcaatggattaaatgtagatattaattaggcagataataaatatatactactattataggaattatttgatagttttctatattgtatgcattacaaattaagtcagatgttcggtggaaacgttttaattataaatttgcatatcaacgtatatttgcttatattagtt

SEQ ID NO: 6194 - DNA, 3652 bp, DROSOPHILA
aaaattcgcatattattcacactttaccggtgtttcttgacagaaaatgataagttttcgttaaccgaattctcagaaagtaagtgcttggaaagtttttccaagaaaaagtgcccaatagggaaaccaaacctgaaaccaaataattttccacgataagcgcaacaacgcgatattagattggccagccctgcgtttgcggttttttttttgtttttttatttcctgtattttttttgggggggaaaaattgcagttccacggaaagcgaaaagttttccaccaaaataaacggttgaagcatggacgccgacaagcagctggaaaggcagctggagaaggagctggacgagatgccggcagaggatttggacgacgatgcgtatgacgagtatgatctgatcgtgatacccgatcagggcaagggctcgccgcagcaggggcacagtgagtcgccgcagcaggaggaggagcacaagtcggaggagctgcgccaacgatcgcgcccaacctggccaccgtcgtccgccggcggggatatgaccaccattgagttgatctcatcggacgacgagccgtcagtggaggagactgagggaggcaatgccgctggccgtggcagagcgcgcaatgattccagcagcagtagcgatgatgtgggcgtgatcgaaggctcggaattggaatcgaacagtgaggtgtccagtgacagtgacagtgatagcgacaacgctggcggcggaaatcagctagagcgctcgtatcaggagctgaatgcgttgcccagcaaaaagtttgcccaaatggtctcgctcattggaatcgcattcaaactgaatgatctggaaaagatcgagtcatcggtgctggagctgcaaaatttggccactgtgccggctcacgtgtggctgaagtatctaaaggcccgcctggtcgtcacccaaacggacgaggagcgcaaggcattcgaggagcagtgtgccaaagcgttgggctactactacagcataccgctgtccgaatacgttgtcaactacctggtggatcagggcaacgtacagaaccatgtgctgtgggccaaactgctggcggactacgacgtggagcgtccagactttggcgacaagctgcgttcgctgatatcgacaattacggacgaaaatgaggctgccgcctttgtggaaatgctgcaaaagcactgcgtcacctggacgtgcaacgtggagcagcggcagatgatcaagtccgttgtggacaagtttaagcaacatctggacgagacaacgcgtggttgggattggtctgagcaacacaaggctcatgtctacgatgtggagacattatcccttgacgatgacctcaaaaacgctgtgatccgtttcatattcgaacgctcggtggccaagtttcccattgtcgatgtgctctggttatcctacattgagttcattcagttcgaaggcgtcactgtgccggagaatgaggatgagaatgaggtaaccgccgaaatggtagccaaacgggccaaacgcttgggcaaaggttttctgcgcaacacggaactcgatttggccaatcgtggtgtgcgcagtcatcccagtgtacaattgaatcatcgtttcctcgacctaatggagcgctcggactttgagttggcggaagtggatgaagagatacgtctcatattgcagcgcattgtgaccgacatggatatgaccgtggagctgcatctggactatctggcctatcgtattcgcaacaccaatgccagcgatgagcagcaggtcgccagtctgcgtgccgccttcaatcatgcttgggaggagctaaccgtgctctacggcgaccaggcggacaccaggtacgaggtgctgcagttgtgggcccaagttgagtacacgcaactggggagtccggacaatggccgtgagatttggcgccaaataatgggctatccgggcagctcgatacgcggcctgctctggctgaactttgcccagatggaaagcgaatacaatggtggccacggcacacgcgatgtccttcgcaaagctctctcgcagcccgtcctcgagaatggccttatggtgcaggagttttttcgccgctatgaacgttgctatggcacctacgagtccattgccgcctgccaggccctcgatctgcctgtcgagtatgtgaagccgcgttcccgcattaagcccaactcacagtcggcttatcctcgccagcagaagcttaagccgcgccagcagcagcaacaaacgaatcgtgagccactgaatcgcgagcagcgacgtcgccaggcgcatgagcaacaacagcaacagcagcagcagcagaagcatggcattaagaagtccagaaccgagccatctggtggagctacgtcaccgccatcgaaagtcaaggggccagcgaatgcagaggccaaggaatcgaactttaagtattcgcccaacatggaaatcaataagatctttgtaagaaatctgcatcccgcttgcagcaaggaggagctgcacgaactcttctcgcctttcggcaccatcaaagatgtgcgcctggtgcacaagctaaacaagcagttcaagggcattgcatacgttgagttcgagaagccgggcgaggcgcaacgagcagtggctggacgagatggttgtctattcaagggcatgaatatctctgtggccatttcaaacccaccgccgaggggcacatcagctgtcaagccaagtgtggcgcccaagcgacgtgtgcccacctcgcttatacccacgactctggtgcgccaagaggtggctgccaagaagctgcgcttgcttctgcccgagccgggggacatatcatccacttcggcatccgtcgacgtggccatcaagcgcgaggctaatggagaggagcaaaaaggagatgttcaagaacgagatgagcaaaaaggagaggagcaaaaaggagaggagcaaaaaggagaggagccaaaaggagaggagcaaaaaggagatgatcaaataggagaggagcaaagtggagtggagcaaaagggagatgagaaaaaagaagaggagatgccagctgctgtgcccaagtcaaacgatgactttcgcaagctatttctcaaggattaggcgacaaatgccggcggctgagcccggtgccagcggccatggtttagtttgtaagacgaagacgaagatttggagcatatatttttttagatttaaggcaacctaaacagacaaggttggagaacactgtacaaagagaaaaactgttgtaagacaatgatttttgtttcgactcatataaattggtttcttgatgaaccaagtgaagaaaaatgtttgtttgtttcgcatatgacagctagttgactaatccccggtgagtctttggatgaaatgggtgtttcaagtgtacaaacatcgagttgattaaaatgtaatgatcttggcggatttattggataaaaactaggtgcggaacttgacgctcttcgtgacgccggccttgatgccggacaattcgccgccgtagcgctgcagctccttgcgcaccgtgcgcacggctcccttgcgccggatgagcgcctttcggtatttgccgcgatgcttaacgcgcggattgcgcagctcctttttgcggtgcggcg

SEQ ID NO: 6195 - protein, 941 aa, DROSOPHILA
MDADKQLERQLEKELDEMPAEDLDDDAYDEYDLIVIPDQGKGSPQQGHSESPQQEEEHKSEELRQRSRPTWPPSSAGGDMTTIELISSDDEPSVEETEGGNAAGRGRARNDSSSSSDDVGVIEGSELESNSEVSSDSDSDSDNAGGGNQLERSYQELNALPSKKFAQMVSLIGIAFKLNDLEKIESSVLELQNLATVPAHVWLKYLKARLVVTQTDEERKAFEEQCAKALGYYYSIPLSEYVVNYLVDQGNVQNHVLWAKLLADYDVERPDFGDKLRSLISTITDENEAAAFVEMLQKHCVTWTCNVEQRQMIKSVVDKFKQHLDETTRGWDWSEQHKAHVYDVETLSLDDDLKNAVIRFIFERSVAKFPIVDVLWLSYIEFIQFEGVTVPENEDENEVTAEMVAKRAKRLGKGFLRNTELDLANRGVRSHPSVQLNHRFLDLMERSDFELAEVDEEIRLILQRIVTDMDMTVELHLDYLAYRIRNTNASDEQQVASLRAAFNHAWEELTVLYGDQADTRYEVLQLWAQVEYTQLGSPDNGREIWRQIMGYPGSSIRGLLWLNFAQMESEYNGGHGTRDVLRKALSQPVLENGLMVQEFFRRYERCYGTYESIAACQALDLPVEYVKPRSRIKPNSQSAYPRQQKLKPRQQQQQTNREPLNREQRRRQAHEQQQQQQQQQKHGIKKSRTEPSGGATSPPSKVKGPANAEAKESNFKYSPNMEINKIFVRNLHPACSKEELHELFSPFGTIKDVRLVHKLNKQFKGIAYVEFEKPGEAQRAVAGRDGCLFKGMNISVAISNPPPRGTSAVKPSVAPKRRVPTSLIPTTLVRQEVAAKKLRLLLPEPGDISSTSASVDVAIKREANGEEQKGDVQERDEQKGEEQKGEEQKGEEPKGEEQKGDDQIGEEQSGVEQKGDEKKEEEMPAAVPKSNDDFRKLFLKD

SEQ ID NO: 6196 - DNA, 6522 bp, DROSOPHILA
aacttgcggagttatcatccatgtacgagagacctggcgcgtagaagagggaacacccgattccacctatgaactgggcaatgaagaacagcacgatgggcgtgtagtccccagctctttctagacaatttgagtttttttcatggcacagtgagtcgttcttttcggtgatatttagagaagcaccgaaggattcggacattccgtattcttctgtcagccgcaaagcttcttcgccgggtccgtagaaaatgtgaggggtcaacatgagcaggcagaaaatggctataatgatgagacctaaaacagtgcaaaggattggctatctgaagtcaattcggtgatttcaggtgtgttacccaatgcaacccagcgtggacgatgtcctcgactagcgtagtaactcagaaaggcggacgagaaaaccgtgcttatatcattgcccaccgtaatgagacccgatatcttggtgggtatattaaagcgcttctccatcgttgtgatggttccagtgaaataggtaaaggccatggccagaaagcaactagctatcccgtacacaatcacgaacatgtgagcagtcgcaaatctaaagatctagatggtatcacaagaaactcgaaagagagcactgaataatatacctctgtaaggcggggcccctgaaaattgagaagccacatgttgtatccgaagaattcaacctcttttcatcatcagccacatttatgccggcttctttatccttcagaaacttggaggcttcgatctcttcactggccatgatggtcgtccactgtcgaactactgccaaagactgaatcccaaactcagctgcaagctgcatacaattaacttgcctctgggggtaaacaaaataagcttctagatagcgaatagcggccttcatgtttatagctaagtccgtctgagctttatcttactaatcgggatctggtcgttaattgtcagcaattaccatatgagtacacagagctctactgttgcaataccgtttattatggtactggactctacgttggaaatcacacatggatattgacaaatcaaggcaccaagactctcactcacacagcacttaggagtaataataacttaggactaaatctctgtattcttttcgttgttggcctcctcctcgtgctgaacgatcttcatctccacctccttgacgtcctcgtcgaagattttcagatcctttgcgtagtaccagacccccagatcgaaaatggctccaatggcaataaagacagctgcggtgaagttgagagtgtacctaaagaaacgagttttatagatagatatttaagcattatatattaaagctcacctcatggaaagcggatcgtagagccagcagtttcccttatttgtgcaggtcttgccccacaccaaacagaccctatcgaaaacccagccaaagaatataggactaggaataaaggccagcatcgagcacagagtcattccgaatcccatggccgccgtcttgtccttttccggcacacagcgcacggaaaccaggaagttcgaggctctgccgctggctcccacgaacttcaggcaacacatcacggccaaaaaggccacaaattgtgtccaacaatttacgggacatgcgccgggcattgcctgtccattcgctagagcctccaactgactatgaaccgaggtgttctggctaacctcatcgttactcaaatcgaagctggttaggcgcttaaattggctcgtggaattaccagcatcatcgctaggaatgcaggagcaatcgtagaagatctaacaaaaaaaaattgctgcttcatttttctaaaatttgctaaacaaagtaaatacttaccttttttccttcggagttgacgagcaactttttgcacccagcgtggcaggcggagatgtaggtcatgttgttctccccgcataccggggaatagcggacgtagtcacaggagcaggccgaattgcatgtggtagtgttgccagctaacgagctgtcgtgaatattgacgatcacggaactctcatttcccggacagccgatgaaggcgtaggccaggattccggcaactgtgaggaagcccacaatcacgttccaagcggccatatagcgagccctcggcttatagcgagagatgataaaaccggagagcagcactcccacggcggagaaggccagggccactgtgccggtgaccatggatgaagtggccgctgactggcgatactgaacctcgatgtacttgggcgtgaatatccagtacggcgtatagcccactaggtagaaaatgctcgagagtgtattgcacatgtaggtcttgttggtgatcaggcgacgaaaggttttcagcatgtcctggaaggaggccttcgcttccgcggtagtcttctgatccagttccgcagtaaggcgttccttctccgtactcttcaccgacagtcgttccttttcgcgtcgtcgattctcctccaccttccggcgggccactgctctgggcaattctttgggaaacatggagaggaaaactcccgagaaggagagcaggccgcccatcaccagccagcccagccaccaggcgcccagccagcggggatccttgttgttgatcaccggatgcatttgtggtgcgatatacaggcgcaggcagaaggatgccagggcgtatccaatggcaggacccaacatgcgcaaaaagtatgaaagaccttaaaatagatgcaaagaatattgcaattttcaaagcctctactgaagtcattttcatgtgtgattaaattatggctatcttcttcgagataagcgtatctttgaggttagtaacacaaaacgttcatcattagtttgtctggcgctaataaaatattttttcaaagtctgtaaacagatcatattattatcttatgttaaacatagacctctattgaagtatgaaagcctgagtaaaatatatttttttatatatcgaaaagtatctaacaatgcatcgtttttaaatgttccctcgaaacattttattatacctcataatccatgagaaactgagtcagccctaatgattcggcacttcctcggaagattacgaaaactttatgtaatcttagtaaacacttagaggctaaaactgtttagatacaggggattagccgcctgctctatcattgctgtgtaagttcctattccggttggttaatactggtttagcgctactcactcaacaaagccggagttttggattttttagtattatcgtccatgtaggacactcccaacgtgtagtatagcgatcctccaattccagatatgaactgcgctacgaagagcaaaagttggggcgcaaagtttccttcaccgacctcgcactccgctcctcctccattcaagcggcatagggtcttggatcgctgctcctcgatagcctccattgtggcattttcatcgggcatcccgccgaactccgaggtcagagcaagtgcatcctcgccgggtccgtagagaaagtgcggtgcggtggtcagaatgcagaaaaatacgatggtaagaagacctgcgcagtaataaaaggataattatacgttaacctccgattattatatatatccttctatataacttaccaaaaccaatccatcttggccgatggccctttcccgcatagtaggccaaaaccgccgacaccaaggtctgacttatatcgtttcccaccgagataatgcctgtattcttcgatggtatcttaaagcgcttctctattgtggtgatcgtgccgttaaagtaggcatatgtcattgaaaagatgcagcccacgattccgtaaagtaaaacgtaagcagtttgattggcaaatctacagggttacaaatgaatcaaggataatgttgtaatccatatgcttgaatgtcacttttctttagagcccacttacctttggtaaaacgttcccttgaatatccagaagccgcaggtaacattcttctccagcggggattccgccagcagcttgttaatttccgcggtcatgagacgatcctgctcggatttctgtttcttcttcttagatttccctgtcttcggagtggtctcttcaccgtcctgattgcccgcctccttttccttgtcgtagctctttccattgttcagaagtctggactcgacgtcggattcatcccgggactcccgccttccgtgctccaagtcctgcagctcggctcccaggctactgggattctcgctctgcaccatactagttgcggattgactcggattgcgatctcacttggcacattggtttcttccgttttcgggtaccgaactcacacacacacacacacacacaagtactgtagcagagtctcttagattgtattttttaattttcgccagctggcttcgtgggggtatccggagatctaaaaggcaacctggcacgtggatagaagcggatcgagtggcatgatgaggttctgtagccgctgatcttaactgtatcgacggacaaccgtatccaggtagactctcgaaagatttggaccaaaatagcgacgttccgacagtttgtggcaaatattttatgaaaatattatctcgctcccgtcttatcactcccctcgggccaataaactaatcttggtcggttcgcgaggcacgacgttgatgtccgctcatgctgcttctgttgatgcctgcaaaatttacaatttctttgcgttgggctgagttcggctattaaaattataaaatagacagctaaagtgtgtgataaggcggctccagacggaagatgtgcatcggatggcagatcttatcttagagcgccagtgattcggtgggtttgcacattgatgagcacgtaaatctcagcagagtcattgcctgagattttcgaggaactgcgagatataaacctacacacacatccacgcccaccagcacccacaccacccacaccatcccttgggtaaacactagatctgcatgctcattgtttttgttacggattaaggacaggatcaatgtgatgtacttagttcagttactattgttatcttttgacgagcgccaaattagtttagtcagagagctggtgagcgaattcgttttttattgtcagtcagtcagtcccgaatgggattttcttcacacccccgccgaatctgtcgcgatcccccaacttttgctctattatttaatgtatacccccaagtgagtgtgtgtgtgtggagcttatgtgtcgccacaattcacttagcatatttaaatttatgcgcagcttatcacttgaactttatcttgattgcgctgttcttgataagtatttgaatagcaactttgtccacaacttcgccccttgaactttattcgccgttttcacacacagtttgggctaatttttgtaatttatttgcccttgcataacttacaagtgggcactattaatttgatttgtttgatttcgatcgcgcctctcgattttcccaagacgccgctggctgcaagacgatctcaattcgtacaagaccgtaaacgaactaaactaaactaatctaaacgcagcgtgttgtggttgctccgcgaaatgctcgctcatctcaggaagatttcccccatatattccattcgccgagaccactcagaaagcttgggtttagctccgacttggactcggattcggacttggattcgggttcggattggggttcttgagcttcgcattttgactgtgtcactgacatcaattcaccgtcaaaatagttggcatccatatgtatacgagttttttttttgtgtacctaccgtcaaagcaaaatattcactcttctaaattggccacgcgtactcacattcgaatcggcggcgtctgaatgacagtgaatgaaagtgaaaccattgggtaattatgggcatttacaaagggcatacgtttcatattcagaacatattcggcgctgcgtagtcagaagaaaagtcaatagagctgcagaaaaaattacatttttccataaatttcagctgtccatataaacactcgaagatattgggtggtatttcaaatagccaagaaatcaactaatacatagcagcatgccttttatgaagcatttccacgaggaagcaaatcgacagctccagctaaacagttgccaatttgtggtattatactatatatagatttatggggactgcggttgccagcggcatcaatccatcccccaagatatgaagatgttcagggtggggtgtatcgggtttccgagaaagcttccacttatttttttagatcgtaaacgataagcaataagctataagctgcactatgccaatgttttgcccaacattattaaattgaactcaaagtgcaattacagcgaccacatatgtgggaagcaatggtggcttaaaaataatcccaagacatgacttcagaaaaaacatacgtgtactatacatatccttaaagggaacatcatatgtttcgcgagggcaataaaaatcaaaggcataat

SEQ ID NO: 6197 - DNA, 3015 bp, DROSOPHILA
agatcgtcttgcagccagcggcgtcttgggaaaatcgagaggcgcgatcgaaatcaaacaaatcaaattaatagtgcccacttgcatcaacagaagcagcatgagcggacatcaacgtcgtgcctcgcgaaccgaccaagattagtttattggcccgaggggagtgataagacgggagcgagataatattttcataaaatatttgccacaaactgtcggaacgtcgctattttggtccaaatctttcgagagtctacctggatacggttgtccgtcgatacagttaagatcagcggctacagaacctcatcatgccactcgatccgcttctatccacgtgccaggttgccttttagatctccggatacccccacgaagccagctggcgaaaattaaaaaatacaatctaagagactctgctacagtacttgtgtgtgtgtgtgtgtgtgtgagttcggtacccgaaaacggaagaaaccaatgtgccaagtgagatcgcaatccgagtcaatccgcaactagtatggtgcagagcgagaatcccagtagcctgggagccgagctgcaggacttggagcacggaaggcgggagtcccgggatgaatccgacgtcgagtccagacttctgaacaatggaaagagctacgacaaggaaaaggaggcgggcaatcaggacggtgaagagaccactccgaagacagggaaatctaagaagaagaaacagaaatccgagcaggatcgtctcatgaccgcggaaattaacaagctgctggcggaatccccgctggagaagaatgttacctgcggcttctggatattcaagggaacgttttaccaaagatttgccaatcaaactgcttacgttttactttacggaatcgtgggctgcatcttttcaatgacatatgcctactttaacggcacgatcaccacaatagagaagcgctttaagataccatcgaagaatacaggcattatctcggtgggaaacgatataagtcagaccttggtgtcggcggttttggcctactatgcgggaaagggccatcggccaagatggattggttttggtcttcttaccatcgtatttttctgcattctgaccaccgcaccgcactttctctacggacccggcgaggatgcacttgctctgacctcggagttcggcgggatgcccgatgaaaatgccacaatggaggctatcgaggagcagcgatccaagaccctatgccgcttgaatggaggaggagcggagtgcgaggtcggtgaaggaaactttgcgccccaacttttgctcttcgtagcgcagttcatatctggaattggaggatcgctatactacacgttgggagtgtcctacatggacgataatactaaaaaatccaaaactccggctttgttgagtctttcatactttttgcgcatgttgggtcctgccattggatacgccctggcatccttctgcctgcgcctgtatatcgcaccacaaatgcatccggtgatcaacaacaaggatccccgctggctgggcgcctggtggctgggctggctggtgatgggcggcctgctctccttctcgggagttttcctctccatgtttcccaaagaattgcccagagcagtggcccgccggaaggtggaggagaatcgacgacgcgaaaaggaacgactgtcggtgaagagtacggagaaggaacgccttactgcggaactggatcagaagactaccgcggaagcgaaggcctccttccaggacatgctgaaaacctttcgtcgcctgatcaccaacaagacctacatgtgcaatacactctcgagcattttctacctagtgggctatacgccgtactggatattcacgcccaagtacatcgaggttcagtatcgccagtcagcggccacttcatccatggtcaccggcacagtggccctggccttctccgccgtgggagtgctgctctccggttttatcatctctcgctataagccgagggctcgctatatggccgcttggaacgtgattgtgggcttcctcacagttgccggaatcctggcctacgccttcatcggctgtccgggaaatgagagttccgtgatcgtcaatattcacgacagctcgttagctggcaacactaccacatgcaattcggcctgctcctgtgactacgtccgctattccccggtatgcggggagaacaacatgacctacatctccgcctgccacgctgggtgcaaaaagttgctcgtcaactccgaaggaaaaaagatcttctacgattgctcctgcattcctagcgatgatgctggtaattccacgagccaatttaagcgcctaaccagcttcgatttgagtaacgatgaggttagccagaacacctcggttcatagtcagttggaggctctagcgaatggacaggcaatgcccggcgcatgtcccgtaaattgttggacacaatttgtggcctttttggccgtgatgtgttgcctgaagttcgtgggagccagcggcagagcctcgaacttcctggtttccgtgcgctgtgtgccggaaaaggacaagacggcggccatgggattcggaatgactctgtgctcgatgctggcctttattcctagtcctatattctttggctgggttttcgatagggtctgtttggtgtggggcaagacctgcacaaataagggaaactgctggctctacgatccgctttccatgaggtacactctcaacttcaccgcagctgtctttattgccattggagccattttcgatctgggggtctggtactacgcaaaggatctgaaaatcttcgacgaggacgtcaaggaggtggagatgaagatcgttcagcacgaggaggaggccaacaacgaaaagaatacagagatttagtcctaagttattattactcctaagtgctgtgtgagtgagagtcttggtgccttgatttgtcaatatccatgtgtgatttccaacgtagagtccagtaccataataaacggtattgcaacagt

SEQ ID NO: 6198 - protein, 789 aa, DROSOPHILA
MVQSENPSSLGAELQDLEHGRRESRDESDVESRLLNNGKSYDKEKEAGNQDGEETTPKTGKSKKKKQKSEQDRLMTAEINKLLAESPLEKNVTCGFWIFKGTFYQRFANQTAYVLLYGIVGCIFSMTYAYFNGTITTIEKRFKIPSKNTGIISVGNDISQTLVSAVLAYYAGKGHRPRWIGFGLLTIVFFCILTTAPHFLYGPGEDALALTSEFGGMPDENATMEAIEEQRSKTLCRLNGGGAECEVGEGNFAPQLLLFVAQFISGIGGSLYYTLGVSYMDDNTKKSKTPALLSLSYFLRMLGPAIGYALASFCLRLYIAPQMHPVINNKDPRWLGAWWLGWLVMGGLLSFSGVFLSMFPKELPRAVARRKVEENRRREKERLSVKSTEKERLTAELDQKTTAEAKASFQDMLKTFRRLITNKTYMCNTLSSIFYLVGYTPYWIFTPKYIEVQYRQSAATSSMVTGTVALAFSAVGVLLSGFIISRYKPRARYMAAWNVIVGFLTVAGILAYAFIGCPGNESSVIVNIHDSSLAGNTTTCNSACSCDYVRYSPVCGENNMTYISACHAGCKKLLVNSEGKKIFYDCSCIPSDDAGNSTSQFKRLTSFDLSNDEVSQNTSVHSQLEALANGQAMPGACPVNCWTQFVAFLAVMCCLKFVGASGRASNFLVSVRCVPEKDKTAAMGFGMTLCSMLAFIPSPIFFGWVFDRVCLVWGKTCTNKGNCWLYDPLSMRYTLNFTAAVFIAIGAIFDLGVWYYAKDLKIFDEDVKEVEMKIVQHEEEANNEKNTEI

SEQ ID NO: 6199 - DNA, 5117 bp, DROSOPHILA
atttcttcgccgctgaagacgtcgatggtcgctcacaagtccccaggcagtggggactccagattccttcgcagccaggggggcaggacttctttggttttgttaatgctggtgctggtgctggacatgcctggtattttggaacttcattaattgtgggtatatttttaatattatctgagtgagttttctcgagcttatgggtctttaattcttgctgatattgcaacaagtggtctagctctgcatgtagctttagagctttcgaccaaaccggtggcgtttgctgaccgtatattagccaccttacgtgggctatacgtttattcagcttagttttcaaaccgccacggtgtttgcccatactcaatagaactctactcactcagatttttccttggtttttgcagttccatttaattagtccagtcttcttccagtccagtgttcctttgttcctttgttttcaccagctttggtcaattcgtccagcgttggacgactgtcacggtcgccatgtaatgatgaactccaattaagaacacaagtccgttttaagttgaaggcagccgtcgggctgacatatatttattcaattttacttcttttgattttagagtaggcagaaatggttctgtcagctcaacgtctacagagtctctctgattttacagtttttaatatatttggacttaggctaatccgcgtagctgcgctgccgggtacgccagcagcggagcggcgttcttatgtatatcttatatatctaggcttatcgggagagcgagatatgtatgtacgtatgtaatatgtatttggtcggcgtgtgaatgctgaccatgcacttatactttttgccttcgagtgggtgatcatgttacatccgccctggcctaactgcgtgcataaacataaacataaacatagcaacaaagtgctgccataagttaatatgctattttatttaattgttcttaatattgcataggcacatactacaatcgctccttccattcacaccattaatcttgctccgaatcccagccagagaacaagagatccccgtgattgagtaccctacctagtgtttatcaaagcaaagtcaaactaaaagccaaacagtgccaaatacaaacaaagattcgtcggcggcgaagtaaacaaaatatcgcaaaacgtgcgcgccaacaaaaaagcgaaataatcgaaataagggaaaaattcgccataaattttcccgacatcccgataccccctttccccccgccgccgcctccaccgccttgtagaacaaaagaaagcgttttgcaataaacaaaaccagaaaggcaacatggaagtgcagaagctgccggaccagtcgctgatatccagcatgatgttggactcccgatgtggggtaagtgtggctccagccacccactctttgcaccagcagctcctccaccgagctgctctataaataccagtggggcatccaataatagacgagaacaatggggtaaacatcattttcctgggggccaaggcagccacttctgtaatttggcatgtgcgaattttccaaattcaaattccttctggatcggtttaatggcccctcctcagcgagtgcgatcggcatttatggggcatcagtcaatggaacgtgattttatgaggtggcaactatgaggaacctcaaatccaataaatcacttgaatctgttttgaagcaggcctaaatataagtgtgcctcgaaatattcccaagacagctgtataaacaaattggctatcttaagtatactccctagatgtcccaccagttttaactaataatagaactaataattaaagtaaactacatctgctagaactgcgaccttagtttcggttctataatttatggctcctgtcgctggcgaacatgaaaacaaaatttgaataacatggtcggtggaaaatggatgtggaaatggaaatgcacgggttcgccatccatgagctgcgaaatatacaaaacaaattaagctgcctttcatctaagagccataaataataatgtttcctatgcgccgcccgactttcctccgaccgcccatccatacatctaagcatccaaccatccctccatccatcgaaagtatctgaacgatttgtttttctggcgctttgcagctgaacgacttgtatccgatcgcccggctgacacagaaaatggaggacgcattgaccgtctctgggaagccagccgcatgccccgtcgaccaggactgcccctacaccatcgaactgatccagccggaggatggggaggcggtgatagccatgctcaagacctttttcttcaaggtaagtgcgctcccgcccatcgtacattgtattataatcagggggctgcttgggagattggtgtgcatatcgtaggagccaatcaagccgaacacctggctccggaatttataaccgcttgccgaataatttgaatcgaaaggcggcgcacaaaggtgaatttgaatagtttccagcgaatttcaattagctgcgcgttcgtcttaattaggctttaattcagatcgaaattcgcacactaaacttgaattaatgcgtgttggccaatccctgggaattccagcctccgccgggagcttgccccgttttggggcatgtggaatcttgtggagtccgtccagtattcggctgtcgtgagatgtcttgacatgatccatgtcacggctagctttcagctggtcttgcatcacgactcttggcgatctgaatctcaatctcaattggaatctgaatccaatgcgctcgcttgatcttgactggatcaggttccagttctcgatggggccggccaatgagaatgctccctgcacagacccagaccaattgggcactcaagacctatatttatacatatgtacattgcatatacatatgtacatatgtatatactgcatattgattagtatgcatgccacgcccgctggccacagccgcccccctccggcgttgagatgttgatatgcaaatcgagttccgttcgccattccccagctgcctccataaattattggaaaatctttagccgatgcaatgcgtgcataaatcacttgaattgccgatcaattgcacgatcgtgtcgcctaatagcgccgccaatttgttcggtcagcagatccccagattgacgagcaatcggatccaaatgggtgggccagtgcactgatgtctgaaatctaatccgttttcctattccgcacaggatgaaccgctgaacaccttcctcgaccttggcgagtgcaaggagctggagaagtactccctgaaaccgctacccgacaactgctcctacaaggcggtcaacaagaagggcgagattatcggtgtgttcctaaatggacttatgaggcgtccggtaagtgaacccattaagtatgatatgaatgatgcatgacttattgtgctccatctatgcatagtcccccgatgatgtgcccgaaaaggcggccgactcctgtgaacatcccaaattcaagaagatcctctcgctgatggaccacgtggaggagcagttcaacatcttcgacgtgtatcccgacgaggagctcatcctggacggcaagatcctgtcggtggacaccaactaccggggcctgggcatcgcaggccgcctgacggagagggcgtacgagtacatgcgggagaacggcatcaatgtgtaccacgtgctctgctccagccactactccgcccgggtgatggagaagctgggcttccacgaggtgttccgcatgcagttcgccgactacaagcctcagggagaggtggtcttcaagccggcggccccgcacgtgggcatacaggtgatggccaaggaagtgggtcccgcgaaggcggcgcagaccaagctgtagacgatctgagttcggattttgtactatcgtatgtgattctttagtttgtagttcggtggcgggttcccagtagtgtatcaacgttcgattcagcgtagtgtaaacaaacagtacaagttacgtatttatctaatttaatcttcccgtcgcgacggtaaacttaagtgttttgtgtttagaacgagctcaaaataaaaccttgtcttaataacataaccgactggacaacaacttagcccctgctggcacggcgggagttcgacttcctgttcttgccggagcgcttggcctggctccgtttggcctgggtcttcttggcgttcagtttccggttgctcctggtcctggaactacggctggtgctgctggcggtggtggtgcccacacggatcttcctcacaatcgagtacgtcaagttggacaggtacactttcttgggcgtgctggacgagctgtaggtgggactggtggaagtggaggaggagttctgtgaactggagaagtccaggcagcagatcacgagcaccacgatgcacagggtgccgatttgaatagttgacttcatgttggtagtaggattgcttttaatatgcttcgatggatgcggccggagtgcttaagtagtcgccctggttgtttgcacagtttgctcaatcgcctacgaaggccgacgaaattgtttaattttggcaaaacacactggcgcttaagcaatcgctcttgagtttgctttgccttgaaccaaaacaaaatattcaaaaatagctatatgctttcacgtttaatttgaccaaaggaaatggggaaatgggattacttagccgaagactggttgaaaggactccgcgacatacggtccaccatacgacgcacttgctcctcgttgccgtacttctgggcatcggccacaacggcggcatgatgggaattagcctctgctgagatttcgtcctggatctggcgactcagtttaaaggacgacctgttggggatggtgaaagttcagtgtgactacttaaattctctggttcataatcattaacctgacggaggtgaagccaaagagtgccccgacgaagcctagggccatcagaaccacggccacctgccagttggagaccctcttcagaccacggatgccatagtacggtcctggattgggatcgtagttgggcctcacatcccacgcctggccgggattgaccgtctcgc

SEQ ID NO: 6200 - DNA, 1373 bp, DROSOPHILA
atcgctccttccattcacaccattaatcttgctccgaatcccagccagagaacaagagatccccgtgattgagtaccctacctagtgtttatcaaagcaaagtcaaactaaaagccaaacagtgccaaatacaaacaaagattcgtcggcggcgaagtaaacaaaatatcgcaaaacgtgcgcgccaacaaaaaagcgaaataatcgaaataagggaaaaattcgccataaattttcccgacatcccgataccccctttccccccgccgccgcctccaccgccttgtagaacaaaagaaagcgttttgcaataaacaaaaccagaaaggcaacatggaagtgcagaagctgccggaccagtcgctgatatccagcatgatgttggactcccgatgtgggctgaacgacttgtatccgatcgcccggctgacacagaaaatggaggacgcattgaccgtctctgggaagccagccgcatgccccgtcgaccaggactgcccctacaccatcgaactgatccagccggaggatggggaggcggtgatagccatgctcaagacctttttcttcaaggatgaaccgctgaacaccttcctcgaccttggcgagtgcaaggagctggagaagtactccctgaaaccgctacccgacaactgctcctacaaggcggtcaacaagaagggcgagattatcggtgtgttcctaaatggacttatgaggcgtccgtcccccgatgatgtgcccgaaaaggcggccgactcctgtgaacatcccaaattcaagaagatcctctcgctgatggaccacgtggaggagcagttcaacatcttcgacgtgtatcccgacgaggagctcatcctggacggcaagatcctgtcggtggacaccaactaccggggcctgggcatcgcaggccgcctgacggagagggcgtacgagtacatgcgggagaacggcatcaatgtgtaccacgtgctctgctccagccactactccgcccgggtgatggagaagctgggcttccacgaggtgttccgcatgcagttcgccgactacaagcctcagggagaggtggtcttcaagccggcggccccgcacgtgggcatacaggtgatggccaaggaagtgggtcccgcgaaggcggcgcagaccaagctgtagacgatctgagttcggattttgtactatcgtatgtgattctttagtttgtagttcggtggcgggttcccagtagtgtatcaacgttcgattcagcgtagtgtaaacaaacagtacaagttacgtatttatctaatttaatcttcccgtcgcgacggtaaacttaagtgttttgtgtttagaacgagctcaaaataaaaccttgtcttaataac

SEQ ID NO: 6201 - protein, 275 aa, DROSOPHILA
MEVQKLPDQSLISSMMLDSRCGLNDLYPIARLTQKMEDALTVSGKPAACPVDQDCPYTIELIQPEDGEAVIAMLKTFFFKDEPLNTFLDLGECKELEKYSLKPLPDNCSYKAVNKKGEIIGVFLNGLMRRPSPDDVPEKAADSCEHPKFKKILSLMDHVEEQFNIFDVYPDEELILDGKILSVDTNYRGLGIAGRLTERAYEYMRENGINVYHVLCSSHYSARVMEKLGFHEVFRMQFADYKPQGEVVFKPAAPHVGIQVMAKEVGPAKAAQTKL

SEQ ID NO: 6202 - DNA, 3080 bp, DROSOPHILA
tatgtggtagaaaaatccgtagagctggatggataggaagctgacgacaaattgcacgagactgaggtagtagcgatctgcgagaaattccttcaggggagtgctgaaaaagaggagcaattgaaaggtctgtcaaaagccgcagggcaagagcatggatcactactcacatctccatcgccaccgagacctgaatctgtccgatgacgagcataattatggttactctgtacgtgggtcccacccaactcttttggcgcggtggggggttttcgcgcaacatatgtacagacgctctagttctgaaactgtatttggagtggcttgtttcgattcacatctaaatttatgagaaaaacatcaaactatcagaaaaataaatgccaactgttctgtccgccagcgggatcgcggtaggttggattggtccgttaatcgttaccttccggttggttttgaggtgtgaaaactcatttgcggcacgtaaatgaccagcaaagtacggccatacaaaaattttgcgaattctgtatgttgtgtaactgcctaactcccattttacattttgcaatgaatgattttatattcattgaaagtattcctacaaaaccctagatatctatgataaaacatacattttttgaactagtttttgaaatcaagtcactataatcattgaaaaaggtgagcatataggtgaccatagaattgcgtgcttgcttttaaaatgtaaaactgaaaataattgaatcgtatgctcgtattttcactatacatgcttctttcttctgagtgcgcagagtatatttagtgaactaatagagtttactaatagaattaaatatcttggtgtagtgggtatctttcatcgcagtggttgctggccacccagcttcacatatcagagtggcctggacttctccattaggtttgaaattagttatcgtttgttactgaattccatactccaacacgatacccgggccacgcccacaccgccatggaggaccgccgccagagaatgcgggcatatcggcgggcccgccgaaagtttgcctgcgtcgtctacatggtgaccatagcctggatggtcctggctatcttgcaatggctcctggtcagcctgatgtgagttgggcagctgagtttggggttctttaccgctgtaaccgctgttctttcagatcggacataagtatgaccttcacaaacttttactggattagcgtgatcttcttcgcgctggccatggtgatggtcacggtgttcatattcttcgagaaggtccgattcatcattggcctcaactggctgatcaccgtgcttatagtgagtatcctgcgaacacattccgcatgatctttcaccttgaattccttggctaggtggagtttataataattggtatgttcgctctggtggcaagaactctctggcaggacttgataatgtggtttatcatctgtgtgctgtttgtcttcatgtttgtgctgctgggatccattataccagtaagggtgtttgcatatttgcaatatttttgcttgaatttgtattcccagcacgatcttacattggacgttgtaatattgtttgtaatggcatttattttcctgatcatcaccgtattctttgtcatgatgcacattctgatcgatatgccgtactcctttgtggtattccagatcttcataagccttattgtgctcttggtaaaaattgaacgttttacttatcgagccattagtatgataatatataatttccttagttcgtgatgtaccatgcccagacgatcaatggtggacgctttgccgagatgcggctgaacgatcacctgttggcctcgctcatcctcttccacgacttcatcatcatcttcctgctcaccttctatgcacagattatctaccggttcgcttcgaatgccgcgaaaaccacgggatctccgttagagggcagttgggttcagacgacaccgattaatggggatgacgtcgtggaagacaatgacgaggacagcgaggatggaccgtcggcagtgggcagtgagaattccccaggtggaaatgcatcataaccctccaaagggggcaatgtattcatctagaggcgaagagactacttttctccaggagtaatgatcgagggcatcaaattgcaggatggcttggtacttagtcgacttgtaattagtgccaattaatacccaaaggtattaaggagacatatttggtatcctgaaaacgcgaaaaatgctgtgacttatacaacaaagaatccaaaaatgggcttagaatagcatattttgtccataataaaacagatatattacttgtgttgtaactagaactttgaaactttaatcacactgaaattgattagacatggagatacatatgtaagccggtaagtttttgagttttgagtcttgaccgattgttagcttaaaataggaaatttatagtattatggtatgggcatgcatattttgtagagtaacgtacggcacaacattgattggaattacgattgattgcattattgattgattgcacagcagcgttcgatgatttacccctctttcccaatcacacatacatatatacaatgaactgaggtgtcaaataatattgaataataacgtaagtcatgggatccaaataaaatgtgtaacttcagattgagtaagctaaacaaataagatgtatagttggatcattaccaactacttcttggtttaaacaaagagaaaaagattctataattaggtactttttctgtccttagattcattgtatagtaaaacttaatatggaatttttaaggctatcactaaagcgactccatcgatgaggttgtcgaacaaacggtggcatccgagtcgctgccctgctcccgctgaccctcgccaatgccatgggcggagagcatcggctgcgagggggatgcgaatgagagcagcagtggtgtcaccaattcatccaggctgctcatgggagtgggcgtgggagtggccccgccgctgagactgctgctctccgtcgaggagttattgcccagggactgggactgcgagg

SEQ ID NO: 6203 - DNA, 732 bp, DROSOPHILA
atggaggaccgccgccagagaatgcgggcatatcggcgggcccgccgaaagtttgcctgcgtcgtctacatggtgaccatagcctggatggtcctggctatcttgcaatggctcctggtcagcctgatatcggacataagtatgaccttcacaaacttttactggattagcgtgatcttcttcgcgctggccatggtgatggtcacggtgttcatattcttcgagaaggtccgattcatcattggcctcaactggctgatcaccgtgcttatacacgatcttacattggacgttgtaatattgtttgtaatggcatttattttcctgatcatcaccgtattctttgtcatgatgcacattctgatcgatatgccgtactcctttgtggtattccagatcttcataagccttattgtgctcttgttcgtgatgtaccatgcccagacgatcaatggtggacgctttgccgagatgcggctgaacgatcacctgttggcctcgctcatcctcttccacgacttcatcatcatcttcctgctcaccttctatgcacagattatctaccggttcgcttcgaatgccgcgaaaaccacgggatctccgttagagggcagttgggttcagacgacaccgattaatggggatgacgtcgtggaagacaatgacgaggacagcgaggatggaccgtcggcagtgggcagtgagaattccccaggtggaaatgcatcataa

SEQ ID NO: 6204 - protein, 243 aa, DROSOPHILA
MEDRRQRMRAYRRARRKFACVVYMVTIAWMVLAILQWLLVSLISDISMTFTNFYWISVIFFALAMVMVTVFIFFEKVRFIIGLNWLITVLIHDLTLDVVILFVMAFIFLIITVFFVMMHILIDMPYSFVVFQIFISLIVLLFVMYHAQTINGGRFAEMRLNDHLLASLILFHDFIIIFLLTFYAQIIYRFASNAAKTTGSPLEGSWVQTTPINGDDVVEDNDEDSEDGPSAVGSENSPGGNAS

SEQ ID NO: 6205 - DNA, 1750 bp, DROSOPHILA
ggagcagggaatcggttatgtgaccacaatgcttgcactccggcaatcgtacttacatacatatgttgtcgttatgttcggagtgtaatggtacttttgcctagtgctccagaacggcattctcgtcgtgggcggacacctcattaacgttgttgttgtcgttgtcgctttcactggactcggcggtcagatcgacaatgcattcgccatcgatatggacggccttaacgtcggccgcttcatcggtataaacgccgggcatgcttctccatcaatttggccagcttatcggaattgcagccaacgaagagctccagcacattgccgcccttgatgaacacaaaagtgggcatgctattcacattgtattcgaccgtaatgtcctcgttctcgtccacgttcaccttgagtacgacgacacggtccgagtactgctgcgccagttcgtccagcttgggtgctattatcttgcaaggtccgcaccagtctgcataaaaatcaattaccaccagcttgtcctcggcgaggattagctgctggtcaagatcgtccttgttccgcactgggtacaccatgactttaactaaattccaaacggattgcaaatcgaaacgaaacaaaaaaaaaaaaaaatgggaagagaagaaagaaaaaaaaaaggaaaatgttagaaaatcttgttttgggtgtaaaattcacttgatttgttttgttacttttgaattttaatggagctctgccctcgccgagatatcagcccgaaatgaaaattgtagggcggcaggcgttcttttatacagttttcgccaaatattttgcggccttcttggattgaaaaaaaagtgttttcaaatgtcagcggcgcggtgtgttgaggtgagtttggcttcgaacctaccacggctatggcaacactcgaggaaaatattagtactatgtcgtgtgacgccattattttgccataattacgataataatattcatatcgatatcgatagacctgccgtggtgaataagtatgttccccaccccccaacacactcggttggctttcccaacgacctggcaaccctaacacgcccgccattttgcactctccatgggccgccattttgtttagcggccacgcgagaattcagcatgcaaattggcgggaattccactctacacaccgccacttggagacccctataaagtcgcctacgcagccgccatttcaatcagttcacaatttgcagcgaaagcgccaacagccccatcacgtcaagttctttaatttaaaaaaaagaagaaaaacactttgctaatcctcgcgacataaaaatggcatccgtacgcaccatgaacgactatcacaagcgcatcgaggcggccgacgacaagctaatcgtgctggatttctatgcgacatggtgtggtccctgcaaggaaatggagagcaccgtcaaatcgctggccagaaaatactccagcaaggcggtggtgctcaagatcgatgtggacaaattcgaggagctgacggagcgctacaaggtgcgcagcatgccaacgtttgtctttttgcgccaaaatcgacgcttggcctcctttgccggcgccgacgagcacaagctgaccaacatgatggccaagctggtgaaggcgtaagcagcaatcctgcccagcaattagcaatcagcagcgcatctttttttttttacttatttaactcatcttttaaacatgttcgcctcatttgtgttcgtttatg

SEQ ID NO: 6206 - DNA, 561 bp, DROSOPHILA
ctcggcgagggcagagctccattaaaattcaaaattaaagtcatggtgtacccagtgcggaacaaggacgatcttgaccagcagctaatcctcgccgaggacaagctggtggtaattgatttttatgcagactggtgcggaccttgcaagataatagcacccaagctggacgaactggcgcagcagtactcggaccgtgtcgtcgtactcaaggtgaacgtggacgagaacgaggacattacggtcgaatacaatgtgaatagcatgcccacttttgtgttcatcaagggcggcaatgtgctggagctcttcgttggctgcaattccgataagctggccaaattgatggagaagcatgcccggcgtttataccgatgaagcggccgacgttaaggccgtccatatcgatggcgaatgcattgtcgatctgaccgccgagtccagtgaaagcgacaacgacaacaacaacgttaatgaggtgtccgcccacgacgagaatgccgttctggagcactaggcaaaagtaccattacactccgaacataacgacaacatatgtat

SEQ ID NO: 6207 - protein, 111 aa, DROSOPHILA
MVYPVRNKDDLDQQLILAEDKLVVIDFYADWCGPCKIIAPKLDELAQQYSDRVVVLKVNVDENEDITVEYNVNSMPTFVFIKGGNVLELFVGCNSDKLAKLMEKHARRLYR

SEQ ID NO: 6208 - DNA, 4652 bp, DROSOPHILA
agctcgtactcgttgttcagcggcagtccatgcagaatttctgcggcgcccacctgcttgcgaatatagctgctgcagtcgtaatggtgacccagtggtgcagttggtggccccgcggtggtttcttgcaattgaagactgccatttgatggcttggcagtgctgcgattattctgtagaaagaggatttgagtgcggagagccaggacttcctgtttcagccgctcaatttccgcctctcgttcgcttaaggtgtaactgaatccgctggattcactcggattattggcttgagtttccctcgtcgtcagttcatcgaatccgcactttgtgagcaccacaatggaggcgccggtcaacaaggcgaagagcagcaaaagccgcagcagcaacttggtcaccagggagttatgcattttccatagtttcttacaaaattttcaacctattgaaaataataaaataattagttatctaagtgcaatagtaaaatgcaaacacacatttgagactgtaaaaaaaactagtaacgaattatcacaaattttatacattgctgtggaattctacatttttattacatattatacatgtacatggctcggtagaacagtttattggtttttgtctctgctatttaggcaacagtgcgttattaataattttcgctgatcttttgtaaaagtattaaagataaatcagttaagagcaaacaaaaatttcattttggcttgcggcactggtaatttaagtaataaaataagatacaataatataagacattgatttgaaatcaaacatcatctgcaaggaactaaagaaaaatggaatgcaagtgcttgttaacaataatttgtgcgccgatacacatactaaatataccaattcatgttttttataagctagataagtattatctttttatatttgcaaggggttttcaggaaacatcgatagtatcgataaggtatcgggcttggttccagctctaatagttcaacggtcacactgatcacaagctgatatttctataaaaaaaaatagtgctatttaaaaagcagccgcagttttccgtggaaaacccgaaatacacagcagtattctacaggcacattgtcaaggtgagtgctcgggggtggtgggtggttgggggtggcgttccacccatgtaaacagcgtttgttggcagtgcggcatgcaacaagttcttttttcgagcaaaggtgatggcattcctataaatcgagtgattcataggccgaatagataaggcgtgtgctgcgttttgttttcttttcttttcggccctgtaatctaaacaatttcgggtgtgtgtgtgtgatggaacatgcattctccccatttaaagaaccagacatccaataaaggcctttctctgcttcgctttctttccgcagcaaattcacaatggagaacaacgaagccccctccccctcgggatccaacaacaacgagtaagtggtggaaatccatcgaatcaacaggctcagcgcacaaaagcaaggaaaatcccatacagtgacgtcacctgagtcatatgggccacagcgaaccggaagtaaagtcttcggacttcactttcggacattggaataccgtaaacgtcatgctgctgcccaagcggtagcttcagttgtagtttgaaatcaattagggtcattaaaagcattcagttaagttgagatattgtaaagtcagttgctatcttagatggaatattaatgtgaaatggcaaattaactcgaataacaaaaaagtattaattatattcgattctaaattgtaaaacatttgcaagtagcttataatcagaaacagaatttgcttattaatcactttatcgcaaatggtaactgaacatacttaagtatgtttcatttaacatctatgaaaaacaaatgaatattactcattttatatttttttttgtcaatggaatttcaacagcacttgagattgtgaagttttattagtctatccgaatttaagaagaaagaaagtatttataggacacaagtcccattattaaaacgtgaaaggtgaattggcatagataacgatggcatgatataccaagactcgtgcttttgtgcgttgcagcttgatgatccatctgctgctcttaataagtgtaagcaacccccacaaacacacataatattgtacagttttcccatacttccgccaccgccgaacgcgaatgacaactacaatcaattcggtgaccatcaaatcaggaacaacaatgcagcccagaagaagctgcagcagacccaagccaaggtggacgaggtggtcgggattatgcgtgtgaacgtggagaaggtcctggagcgggaccagaagctatcggaactgggcgagcgtgcggatcagctggagcagggagcatcccagttcgagcagcaggccggcaagctgaagcgcaagcaatggtgggccaacatgaagatgatgatcattctgggcgtgatagccgttgtgctgctcatcatcgttctgggtaagctaaccgattttataccgcttcggctttttgcctcttgctggtgcttctttctggttgcggtttttctcgatcaggctaaagatcagtagtgtagctaggtggctggtttggtttggtattgttatatctataacgcaagtcgacgccctgcaaacgccctaatcttgctcaacctgtggtttcggtcctaacaacttgtccatgtggcttgcagctaactaatccaataacagatactcctactcgtactgatgacaaccccttgtgaatttctgtttacttgcagtgtcgcttttcaattgatacaattaaacacacactcacagaaaaacaaaagcaaagccaacaaaaatcatgtaattccgtttcccaatcagcaaagttaaggttcagattaatcgtttaacacgtttgtgtacgtgtactggctcctactatatactccttaaattgtttattatattttataaaagtcttaagctaagcaactctaaagctctaaaggtaattgttgttcttgtgcctgtcctaagtgttaattatcgttatatttgtttagtctgtagtgtgcgaagattagaacctccatgtcatacgtgtgtagactataaagttcatacatatgtatatagcttcagcaaagctattaagaagttaaaaatggttatatctacagtgcaatgttggggctagggctctgttctatggagaaatttcattttaaaaagtcatttcgattttattcaaattaaactcgcgtaaaaagtattaaataagaatgacaatacgaaatccgtgctgacatcgaaaggtatgtaagatagtaagcgggaagataaaatctgactttaaaagttgttaattaataaataactgaagaaatctttcgtcaacaaaacgctcagtacaatgtgctgggtggttagaacttttacttaaaaagaccgcgatttcatttaaatgcgagataggatatgaaatccttttcatatctcgttgaattgatataaacatagctctaatatctgcgtatttccctttttagtgtccgtttggccgtctagtagtgacagcggcagtggtggaggaaacaaggccatcacccaagcaccgccgcactaaaggcctcctagggagtgaggtaaacacatggatacgaaatggaaaaggaccaaacaaacacaactgggacggaaacctttctggtcttttcgcgcaatgagagaaggggagatgaagaaaatcaaaaggataacttactaaaattgcgtctagcatatatttaaccagaatgtaattattaaatcttaatgttaaacttaacatttttacgtgtcgtagccgagaccagaggtcccattaatgtgtattgcattatatacaattatatatacgtgtatatcatccaattgaaaatacatcatgccacctacactttaaccggacccatcaagtccaccgaagttttatggaaacgtttcgcggacagagccatttatttacattcagcgtttttgcttaagatgcgcgtgccatggaaacagttatcgattttccggcaaaccgaatcgaaacaagacgacagcagtcgcgggcacccagacaaacttgccccatcgacatcgaggcactgaccaattgccgcaggaactgaatcgtctcgcataaacattctgtcccagctgttccgatagtccacgcatgcgttccactcattcgatgttcttccgatagaacaggtacacgaatatatcatgaatgtccgcgcgccatcccatcaattctataaacgaggctgtcgtccacacatagcccatatatagggcaaaaaagttgaggtagtacagctggccgatcagtatgtagtccccggtcgactcctggcggtagaagttcggctttcgcatggaagcgccaaagactatgacaaactgtgggcaaaattggaggaatactgtgtcgttattttaaaaatgggaaagtaggtgtatcgtttcgtttccctgaggcttaccacgctcgagagaatggtgtatactagcagggttggaaactctatgataacacgcttcatctcggcacacacgatgatgccaaagcaggtgaggacaaatatgcgctc

SEQ ID NO: 6209 - DNA, 521 bp, DROSOPHILA
cggtcacactgatcacaagctgatatttctataaaaaaaaatagtgctatttaaaaagcagccgcagttttccgtggaaaacccgaaatacacagcagtattctacaggcacattgtcaagcaaattcacaatggagaacaacgaagccccctccccctcgggatccaacaacaacgagaacaacaatgcagcccagaagaagctgcagcagacccaagccaaggtggacgaggtggtcgggattatgcgtgtgaacgtggagaaggtcctggagcgggaccagaagctatcggaactgggcgagcgtgcggatcagctggagcagggagcatcccagttcgagcagcaggccggcaagctgaagcgcaagcaatggtgggccaacatgaagatgatgatcattctgggcgtgatagccgttgtgctgctcatcatcgttctggtgtccgtttggccgtctagtagtgacagcggcagtggtggaggaaacaaggccatcacccaagcaccgccgcactaa

SEQ ID NO: 6210 - protein, 129 aa, DROSOPHILA
MENNEAPSPSGSNNNENNNAAQKKLQQTQAKVDEVVGIMRVNVEKVLERDQKLSELGERADQLEQGASQFEQQAGKLKRKQWWANMKMMIILGVIAVVLLIIVLVSVWPSSSDSGSGGGNKAITQAPPH

SEQ ID NO: 6211 - DNA, 8927 bp, DROSOPHILA
agccatcctcatctcctgcatctgcatccactccactgtcatctctggcagctcgagattcttcctgttcctcatcatcctcttcttcgttctcccgatttttatttatacccaaatcgtttccccacagcgttcgcgacttgtcatgcgcctctagaaactcttggaattccggatcgtctttgtgtctgctcaaaatttggtccaccttgtcaactttatctttcttcttctttttctcagactccttagccttggcagccgcctccctttccttctccttcaatttgtctaggttcttcttgctgtccttggcgtacttgctccaagattgtggcttatcttcgctgcccaaggcagcacaggattcgacgcgcacccggctggtctgaatgcatgtgttgtcaaagtgccggatggccgattgggcctcctcctcggtgctgtaacccacgaagcaaaattgccgaaactttccatcgggcgtgtattttagttgcagatccgtaatcgtgccctgggcaccaaaaatctgacgcagtttgtcttcggtgatctacaatttcagtttaagtagatgcttttttttaacaagtctacatactcacatgcttgggcagctgtttgactataattcgtgacatcttttgtggctaatttgtcggtctgcagctaaaaactcatttaagaaaacttttgtttacaaacaaattgaaacaacacgtgcattagatatgcaaaacgagcgatagtagcatcagtagtatcgaaagtcgaaatttgtatactatcgaaaagtctatcgtttcatcgactctactttacgttacattttacatgtagatattcaaatttatatattttttaagttgtgtttcgattataatgggtgatggcaaatcaaagctgaatgaaaaagtaaaataacctcgacttcaaaacgtcacttcgcttgagcatccttatatttccccagttcaagtttaaagggtggatttttacaaacttacaacgttggaaaagttatattttgaaaggaaactctttaagcgacttatacacaaagatacatggtaattgtattggcacattaaacgtagatgacaaatatgttaatatataagtgtttagaatagacttcaggtggagctacggtagagatatagatatgcgattggattgtcggattgtgggagtacaaggtcttgtgtgtttcgtttagtgtctcatttttaacatataatacagtccgttgctggcttgaaactggtgaagcacagttggcagttgattctcgatgtggccatcatccatcctcttgtatccgttgtatcattatagtatatggcatacagtaggcgaacgatgatgcgttaaagcttaacgttgctcagttggtctcctttgtggatccttggatccttgggctgggtcactaaacagaatatttcggctaaggcactaaaattacataatttcattcaacgtctacgttctatcataaatctgatttgttcgtctcgtctcagatcttcgttcttagttaaaattgaagtagttgttatgggaagtggggttgttcgcagagctctagggttccaggcgattgcgactgaagcagctatcggggagagccttggaaataagtccaatattctggacttcatccttgagctccctcagctcggcatcgtacttgtcgatcagattcttctgaatggtgcgctgttcccggtacttttcgatgcgtcccgtcaggttgacgcgattgatctcaccctccacagtggccaaacgattctctgcgagattaattagattactcataagtaaattcagattagagaggtttctgtttcttacccaatctatccaaatcgcccgtgttgatgtccttcagattctccagctcatccttgatggccgtcaggtcggcattggccttctcgatctgcttctgggcctcctgggtatcggccttggcctgacccacctttcgcttggcgtcgtccaccagattgtcgtccttggtcgagctctcctccagcttgaagatgtccatttcggtgagtttcacgcgatgattcagttggtcggcctcttcgcgcagattgcgggcagccaccttggtctcattggctttgcggcggatcagctcagcatcctgtcaagaaattttacgaatttagtaaggataataagatgtccctgaatgacttaccttggaagcctgttcggcatacttcagctgcgcctcctgggcattcttcttggcctcgttggcattcttattggctccatcgagagcctcctccgcctggctgatcaggctttccgcattctgaatctccttctcgatgttgggcaccgtctgcagggctttctccgcactctcagaagagcgctggacatccgactggaagccggccaacttctcgtaggtattgttggcctcctttagggtattgtcgccctgttccactgccttggtagccttgtcgtgggcagccttggctcgctctagcagctcgatgtcctccagttgctgctgttcagctctgaaattatagatcaagttagaaaagagttaataaggataaggcgtggagcacccacctcttaagcagcgcctccgtcagttcctgttccgtttcgaaatccgcaaagagttcgccgttgctgttggacaattcagttatctgcttgagtagctcatccgctcgttcattggcggccactgcatccttcttcaactgactgatatcgatttccggttgcgtctgacgattgacatcattgagcagggtcaatgctgtatcgtagacctcgttggctttgcgaagagcctccttggaggtctgcactacggtgcccagggattgtttcacatgactcagctccagaccaacctccgaacggagctcggtgccgatctttagctgcaaatcgatggcactcttggccagctgatgggccttctccaccgcatccttggcatccttggcgttcttcaaatcgaactgggcctccgactccagtttgtcggccagggcacgagcctcccgcgagatgtccgagatctgttccgattgctgtccaaattccacagacttctccttggcccgggccaaagcctgagcaccttcgtcattcaggaggtcgagggcctgctgcagttccttcttggcgttctcggtgatctggtccagaatggtatagttctggcgcgccctgtcgatctccccattggcatctgcctggaacttatccgcgctcaccagatgctctctcacgctgtccaggtgcttgtgaagatcatcgatgacctctgcgtatgtttgaccaccatcaccggaattatcgcgtgcatcctgggccaggacagccaccttctcctgcaccgccttcaacttggcctcgaactcatcgtcattggtcaccggcgtgcgagcaatctcgtccagcgtttgactgagattgaacaacttggcacgatgcaaatcggcggcatcttggacgaggttatagcaatcggggcaatcgatgcaaccccgatgcctgtcgtacttgttctccttgcagcgatcgcaacgacgtccttccacgttatcattgcaaggacactgaccattctggtcgcactggaatccctttgagccgctctcgtcgcattcgcatggcttgcagccctcgctggagaatccgtagaaatagttctcgcactgatcgcaccgctgacccattacacctggtcggcagtgacactggccagagtagcgatcgcaggtggagttgtagctgcccaccggatcgcacaggcagttctcgcagccattgcccgatcggatgttgaaatagcccggctggcactctccgcaatcccttccaattacattcggcttgcactggcactgaccagtgacttggtcacatcgcgtgatactctgttcatcctgctcggttccagcctcgtagcaactgcagcgatcacagcgtccatgaggcaaggccagaggatcaccaaagtgtccggacaaacactgatcacagtgctctccggctgtattgtggatacactttaagcactcgcccgtagtccggttgcaattgcccacggcattgggatccacgttgccattgcagtcacagctcttacaagtctgcacctcacccaggagacccgtgggatctccgaagaagccatcgctacactgctcgcaacgggaaccaaagtaacccttcgggcactccgtacagatgaccgtatcttcgttgatctgcaggcaggcaccatcattgggacaggggcaacgcttgcagtcgttgggagttccgcccagggcatttccgtagaatcccttggcacactgatcgcagttatcgccgtgggtgttgtgctggcaaatgcacctgcccgtctccgagtcacagatgtccgcatgaccatggcaatcgcaggggatgcagggcatgaagggaccgccgcgagcgggactgtggcgatagcctggagcacaggactcacagaactggcccaggtaaccctccggacaggtacactgctcgatccaggtggccgggtggccggcggctccacgatgtgccgtctgcagctcgacatcatccaggatggcctcaccctgcaccgagtacgtggccctgatcttaatggccgtcagattggacagaatcgaaaggaatccacgagccgactggcttggttgccactggtaatcatgatgttcatgcagacggaaggtatactccttaactccctggtcgggtattccattgccctgggcgaagatgggcagggagatgcggctgccagcaccctccaagatcacgtcactcactccggtattggccacctgaccaactagctggagcttgaatttcagatccctgttgtaggaggcacgctgatcgccgaggaagcgatccggtgcctggaagtagacgtgctcatttccctgagcggtggttccaatgcttcggctatactggttgtacttgatgtccacctcgcgttgattcaaatcggcggccgtccagcgttccttgaatttgttaaaattggaggtgaccgaaacaatggagtatcctggggcagtcatgcactcggaggtgtgcccatagcagaagcagggtgtgcaaccaaatcgattgttcttgtccagattgaagaagcctggcttgcatctatgacagaaatcaaaagtttagcagagatattaagctgggattgtctactgcagattaactcactcattgcagcgtctgccctccacattctccttgcagaagcagattccagtctcggtatcgcaggcgggtgtattctgatgggatcccccactgtcgcatccgcactgctggcatccatggggaccgaattggtagtagttgttatcgcagcggtcgcacttgtcgccagtcacacccggcttacactggcacttgccgtggctgttgcactgcagcgatctggagccaacgggatcgcaggcgcagttgacgcagtagccatcgtcgcgcatatagaagttctccttgcagcgttcgcagttgggtccatcgcgattctcgcggcagtccaggcagtgacctccatgacccgtccgattgaacagattcgcgtcgaagaagcacttgtccgccaatccattgcagttgcaagctaagaattacaatatactttagtgcatttccttcaactcttctagaactatttatacagttgatcaggtaccaatttggcacttctggccctataagattggtctccaaactgtaatcatgcgaccagccttggacaaaaggcagcaccaaaaggatgaccgctggcaagctaggcgcaaacatgactgatagatggactgtcttcgcttctctcaaacaaaactgactctaacggcaaagtggtctgtccttataaagaagctctagactggatgcagtgtccagctaattgaaaacctgaaagaccatctcccccacctcgctgaaagtgcagttgggtaaaactagtttgacaaatgtagttccttattatgaaagagtttttttgctaggtcagcaatcgaatttattccttttttagaaaaatttagtttcattcaaatattcatatgagaatgcatagaagtggaaggaactataactttactctaatatttaagttgattgcacccacctttgcactcgttgacctccgttgaggtggatctcttccacttgaggtcgttgtagagtggcagacagcgatcgcaatcgggtccatccgtattgtgccggcactcgcagaccagagtcctctcgccatgcattcccgtgctcggtacacacttgctggcatgtccattgcacttgcaacgcgcacccacggcaatgtcactgatggcatagaagtacgacttgagcacctgggaatcaccgaagagttcgtcaccgaaggtgttcagtcggtccagcgtgatacggatatccgtggccgtgacccactcctgcagttctccgctgcgctcaaaattgatgccactgggacgaccctccagcgtggagaaggcaatctcaccgtccctcaacggcgagatatcactgtattcgctggtacacagagcatgggcctcgccctcacccttgcgaatggctcgcgaatctggcagggagtaggtgtcgcgacaggtggcactgtagaactggtagggaatccagggtccactctccgaggtcctcttgtaaatcgtaaaggattcgggtcttggtgagcggaagagaatgcgcacgtaggtgatgtcataggattttcctgggtttcagaagatgtacacatattgaaaatattgtttttaaactcatcatctattatgcttaccaaggtgcaaagtcagattcacatagttcgggtgctgaatgccctcgaacatggtctccgattgccaccacgttggactttgcggatcatgcaaatccgtcaagaaggatggattatgatcattgtatctataaacaaattttttaaattaattatttatgaaggaattgtaggactttttctttactaacttgcaaaattcgcagtttttgtgattttggttcatggtttgtatgcagaagtggttgtcattctgctcaccacaggtattagttgactcaatttgcagttgataggcagcattgataaattctggcagacatttctaaggaataaaaaagcaataataataataatttaatacctacaaattaaaatatatatgtaattactcgtacaactgaaagtttactaaagaaagaacaatactattcattaaaattattctgttttgaccactgtaattgatagattcccagaacttcccccgatttctttccttcctacgaaactgtcgcttaattactcaattagttggcatctctcactcgaattgacccagcccaaaagctgaatgcccgaccactaattctcaattcttctcaattggtttgtggacaaacaatgagggtaaacagtggctccgagtgctagtcccttacctgtggcctgccgtatggatcgtagcactccagggccggcatgaaggtggttccgcgcagttcgtgacctccggcggagttgatggggggacgctgggcacccaggatggcggtggaacagctggcgaacaatactccgatcagcaggagtcgagccgtggaggagccactgtggctccaccggctgcgcttcatggtgggttcggttttgggtggctcgttgggctacaggtgggcttgggtgtcactaggacgagtggagaaattccaaagtctgtgtggctctctgggctggtgggttgttccttcgaggttgtactttggtgtctcgctcgtcaattcattacgaaatcctattcttgttggtgtgcctgagcgacttcatatgctggaaaatgcacgagattatgaatcagtttagatataaccaaatcgcagaacatgtgtgccacatattgctccatgttccggggccgatttttaattagttcgccgagcaaatcgcttgaaaaataaactttagtggccaggccggcaatgagttcatttgcttttcgggtaaacaaaacgagaactgcaaatgaaaattttaaacaacaagcagagacataaataaacgctcgagcatgagctccagtcgagtgaagtacatatatatgtgcttgtactgcccaccatgcgtatctttgctattcggtaacttgaagtaattctatgcgatgatttcatctactcctcaactcattctcattctcaactttgagctgcaaccgccacaattagtaatgaggtttttagttcttagtatttatgagcactgcactagttgcaaggttggattaattgagattctgcagatccaagctctaagattcatgtgtgtcttttctatgaattcagttaagtagaggcactaattagcaaatatttgcccagtatttgcggcaagatgatatcacatcctctgaaaacgaatgcaatatgagagcaaactcaaagattcccttggatacaggaaaataccagttctcgtgggtgagatgcggaattcaagacatcatccagctgaaggaacttatagagaagtatttcattctggtatttcattcagtgataccgatatcgtggatcccagtccgaatatgaatataagttcctagaaatgccggctcgttctattccaaaagcattgtctgctcgaaatcacaaaccgaatcagggttagattcgttttatttttaaacaccgaatcacgaacagtacacagccaaaattttgttgagttatattaattgtttgcacataagtcctatgtttatcaatggcacccatttatttcccgcttttgttgaatggtctgtcttatcagccgttgggctctttacggt

SEQ ID NO: 6212 - DNA, 5703 bp, DROSOPHILA
catatgaagtcgctcaggcacaccaacaagaataggatttcgtaatgaattgacgagcgagacaccaaagtacaacctcgaaggaacaacccaccagcccagagagccacacagactttggaatttctccactcgtcctagtgacacccaagcccacctgtagcccaacgagccacccaaaaccgaacccaccatgaagcgcagccggtggagccacagtggctcctccacggctcgactcctgctgatcggagtattgttcgccagctgttccaccgccatcctgggtgcccagcgtccccccatcaactccgccggaggtcacgaactgcgcggaaccaccttcatgccggccctggagtgctacgatccatacggcaggccacagaaatgtctgccagaatttatcaatgctgcctatcaactgcaaattgagtcaactaatacctgtggtgagcagaatgacaaccacttctgcatacaaaccatgaaccaaaatcacaaaaactgcgaattttgcaaatacaatgatcataatccatccttcttgacggatttgcatgatccgcaaagtccaacgtggtggcaatcggagaccatgttcgagggcattcagcacccgaactatgtgaatctgactttgcaccttggaaaatcctatgacatcacctacgtgcgcattctcttccgctcaccaagacccgaatcctttacgatttacaagaggacctcggagagtggaccctggattccctaccagttctacagtgccacctgtcgcgacacctactccctgccagattcgcgagccattcgcaagggtgagggcgaggcccatgctctgtgtaccagcgaatacagtgatatctcgccgttgagggacggtgagattgccttctccacgctggagggtcgtcccagtggcatcaattttgagcgcagcggagaactgcaggagtgggtcacggccacggatatccgtatcacgctggaccgactgaacaccttcggtgacgaactcttcggtgattcccaggtgctcaagtcgtacttctatgccatcagtgacattgccgtgggtgcgcgttgcaagtgcaatggacatgccagcaagtgtgtaccgagcacgggaatgcatggcgagaggactctggtctgcgagtgccggcacaatacggatggacccgattgcgatcgctgtctgccactctacaacgacctcaagtggaagagatccacctcaacggaggtcaacgagtgcaaagcttgcaactgcaatggattggcggacaagtgcttcttcgacgcgaatctgttcaatcggacgggtcatggaggtcactgcctggactgccgcgagaatcgcgatggacccaactgcgaacgctgcaaggagaacttctatatgcgcgacgatggctactgcgtcaactgcgcctgcgatcccgttggctccagatcgctgcagtgcaacagccacggcaagtgccagtgtaagccgggtgtgactggcgacaagtgcgaccgctgcgataacaactactaccaattcggtccccatggatgccagcagtgcggatgcgacagtgggggatcccatcagaatacacccgcctgcgataccgagactggaatctgcttctgcaaggagaatgtggagggcagacgctgcaatgaatgcaagccaggcttcttcaatctggacaagaacaatcgatttggttgcacaccctgcttctgctatgggcacacctccgagtgcatgactgccccaggatactccattgtttcggtcacctccaattttaacaaattcaaggaacgctggacggccgccgatttgaatcaacgcgaggtggacatcaagtacaaccagtatagccgaagcattggaaccaccgctcagggaaatgagcacgtctacttccaggcaccggatcgcttcctcggcgatcagcgtgcctcctacaacagggatctgaaattcaagctccagctagttggtcaggtggccaataccggagtgagtgacgtgatcttggagggtgctggcagccgcatctccctgcccatcttcgcccagggcaatggaatacccgaccagggagttaaggagtataccttccgtctgcatgaacatcatgattaccagtggcaaccaagccagtcggctcgtggattcctttcgattctgtccaatctgacggccattaagatcagggccacgtactcggtgcagggtgaggccatcctggatgatgtcgagctgcagacggcacatcgtggagccgccggccacccggccacctggatcgagcagtgtacctgtccggagggttacctgggccagttctgtgagtcctgtgctccaggctatcgccacagtcccgctcgcggcggtcccttcatgccctgcatcccctgcgattgccatggtcatgcggacatctgtgactcggagacgggcaggtgcatttgccagcacaacacccacggcgataactgcgatcagtgtgccaagggattctacggaaatgccctgggcggaactcccaacgactgcaagcgttgcccctgtcccaatgatggtgcctgcctgcagatcaacgaagatacggtcatctgtacggagtgcccgaagggttactttggttcccgttgcgagcagtgtagcgatggcttcttcggagatcccacgggtctcctgggtgaggtgcagacttgtaagagctgtgactgcaatggcaacgtggatcccaatgccgtgggcaattgcaaccggactacgggcgagtgcttaaagtgtatccacaatacagccggagagcactgtgatcagtgtttgtccggacactttggtgatcctctggccttgcctcatggacgctgtgatcgctgcagttgctacgaggctggaaccgagcaggatgaacagagtatcacgcgatgtgaccaagtcactggtcagtgccagtgcaagccgaatgtaattggaagggattgcggagagtgccagccgggctatttcaacatccgatcgggcaatggctgcgagaactgcctgtgcgatccggtgggcagctacaactccacctgcgatcgctactctggccagtgtcactgccgaccaggtgtaatgggtcagcggtgcgatcagtgcgagaactatttctacggattctccagcgagggctgcaagccatgcgaatgcgacgagagcggctcaaagggattccagtgcgaccagaatggtcagtgtccttgcaatgataacgtggaaggacgtcgttgcgatcgctgcaaggagaacaagtacgacaggcatcggggttgcatcgattgccccgattgctataacctcgtccaagatgccgccgatttgcatcgtgccaagttgttcaatctcagtcaaacgctggacgagattgctcgcacgccggtgaccaatgacgatgagttcgaggccaagttgaaggcggtgcaggagaaggtggctgtcctggcccaggatgcacgcgataattccggtgatggtggtcaaacatacgcagaggtcatcgatgatcttcacaagcacctggacagcgtgagagagcatctggtgagcgcggataagttccaggcagatgccaatggggagatcgacagggcgcgccagaactataccattctggaccagatcaccgagaacgccaagaaggaactgcagcaggccctcgacctcctgaatgacgaaggtgctcaggctttggcccgggccaaggagaagtctgtggaatttggacagcaatcggaacagatctcggacatctcgcgggaggctcgtgccctggccgacaaactggagtcggaggcccagttcgatttgaagaacgccaaggatgccaaggatgcggtggagaaggcccatcagctggccaagagtgccatcgatttgcagctaaagatcggcaccgagctccgttcggaggttggtctggagctgagtcatgtgaaacaatccctgggcaccgtagtgcagacctccaaggaggctcttcgcaaagccaacgaggtctacgatacagcattgaccctgctcaatgatgtcaatcgtcagacgcaaccggaaatcgatatcagtcagttgaagaaggatgcagtggccgccaatgaacgagcggatgagctactcaagcagataactgaattgtccaacagcaacggcgaactctttgcggatttcgaaacggaacaggaactgacggaggcgctgcttaagagagctgaacagcagcaactggaggacatcgagctgctagagcgagccaaggctgcccacgacaaggctaccaaggcagtggaacagggcgacaataccctaaaggaggccaacaatacctacgagaagttggccggcttccagtcggatgtccagcgctcttctgagagtgcggagaaagccctgcagacggtgcccaacatcgagaaggagattcagaatgcggaaagcctgatcagccaggcggaggaggctctcgatggagccaataagaatgccaacgaggccaagaagaatgcccaggaggcgcagctgaagtatgccgaacaggcttccaaggatgctgagctgatccgccgcaaagccaatgagaccaaggtggctgcccgcaatctgcgcgaagaggccgaccaactgaatcatcgcgtgaaactcaccgaaatggacatcttcaagctggaggagagctcgaccaaggacgacaatctggtggacgacgccaagcgaaaggtgggtcaggccaaggccgatacccaggaggcccagaagcagatcgagaaggccaatgccgacctgacggccatcaaggatgagctggagaatctgaaggacatcaacacgggcgatttggatagattggagaatcgtttggccactgtggagggtgagatcaatcgcgtcaacctgacgggacgcatcgaaaagtaccgggaacagcgcaccattcagaagaatctgatcgacaagtacgatgccgagctgagggagctcaaggatgaagtccagaatattggacttatttccaaggctctccccgatagctgcttcagtcgcaatcgcctggaaccctagagctctgcgaacaaccccacttcccataacaactacttcaattttaactaagaacgaagatctgagacgagacgaacaaatcagatttatgatagaacgtagacgttgaatgaaattatgtaattttagtgccttagccgaaatattctgtttagtgacccagcccaaggatccaaggatccacaaaggagaccaactgagcaacgttaagctttaacgcatcatcgttcgcctactgtatgccatatactataatgatacaacggatacaagaggatggatgatggccacatcgagaatcaactgccaactgtgcttcaccagtttcaagccagcaacggactgtattatatgttaaaaatgagacactaaacgaaacacacaagaccttgtactcccacaatccgacaatccaatcgcatatctatatctctaccgtagctccacctgaagtctattctaaacacttatatattaacatatttgtcatctacgtttaatgtgccaatacaattaccatgtatctttgtgtataagtcgcttaaagagtttcctttcaaaatataacttttccaacgttgtaagtttgt

SEQ ID NO: 6213 - protein, 1639 aa, DROSOPHILA
MKRSRWSHSGSSTARLLLIGVLFASCSTAILGAQRPPINSAGGHELRGTTFMPALECYDPYGRPQKCLPEFINAAYQLQIESTNTCGEQNDNHFCIQTMNQNHKNCEFCKYNDHNPSFLTDLHDPQSPTWWQSETMFEGIQHPNYVNLTLHLGKSYDITYVRILFRSPRPESFTIYKRTSESGPWIPYQFYSATCRDTYSLPDSRAIRKGEGEAHALCTSEYSDISPLRDGEIAFSTLEGRPSGINFERSGELQEWVTATDIRITLDRLNTFGDELFGDSQVLKSYFYAISDIAVGARCKCNGHASKCVPSTGMHGERTLVCECRHNTDGPDCDRCLPLYNDLKWKRSTSTEVNECKACNCNGLADKCFFDANLFNRTGHGGHCLDCRENRDGPNCERCKENFYMRDDGYCVNCACDPVGSRSLQCNSHGKCQCKPGVTGDKCDRCDNNYYQFGPHGCQQCGCDSGGSHQNTPACDTETGICFCKENVEGRRCNECKPGFFNLDKNNRFGCTPCFCYGHTSECMTAPGYSIVSVTSNFNKFKERWTAADLNQREVDIKYNQYSRSIGTTAQGNEHVYFQAPDRFLGDQRASYNRDLKFKLQLVGQVANTGVSDVILEGAGSRISLPIFAQGNGIPDQGVKEYTFRLHEHHDYQWQPSQSARGFLSILSNLTAIKIRATYSVQGEAILDDVELQTAHRGAAGHPATWIEQCTCPEGYLGQFCESCAPGYRHSPARGGPFMPCIPCDCHGHADICDSETGRCICQHNTHGDNCDQCAKGFYGNALGGTPNDCKRCPCPNDGACLQINEDTVICTECPKGYFGSRCEQCSDGFFGDPTGLLGEVQTCKSCDCNGNVDPNAVGNCNRTTGECLKCIHNTAGEHCDQCLSGHFGDPLALPHGRCDRCSCYEAGTEQDEQSITRCDQVTGQCQCKPNVIGRDCGECQPGYFNIRSGNGCENCLCDPVGSYNSTCDRYSGQCHCRPGVMGQRCDQCENYFYGFSSEGCKPCECDESGSKGFQCDQNGQCPCNDNVEGRRCDRCKENKYDRHRGCIDCPDCYNLVQDAADLHRAKLFNLSQTLDEIARTPVTNDDEFEAKLKAVQEKVAVLAQDARDNSGDGGQTYAEVIDDLHKHLDSVREHLVSADKFQADANGEIDRARQNYTILDQITENAKKELQQALDLLNDEGAQALARAKEKSVEFGQQSEQISDISREARALADKLESEAQFDLKNAKDAKDAVEKAHQLAKSAIDLQLKIGTELRSEVGLELSHVKQSLGTVVQTSKEALRKANEVYDTALTLLNDVNRQTQPEIDISQLKKDAVAANERADELLKQITELSNSNGELFADFETEQELTEALLKRAEQQQLEDIELLERAKAAHDKATKAVEQGDNTLKEANNTYEKLAGFQSDVQRSSESAEKALQTVPNIEKEIQNAESLISQAEEALDGANKNANEAKKNAQEAQLKYAEQASKDAELIRRKANETKVAARNLREEADQLNHRVKLTEMDIFKLEESSTKDDNLVDDAKRKVGQAKADTQEAQKQIEKANADLTAIKDELENLKDINTGDLDRLENRLATVEGEINRVNLTGRIEKYREQRTIQKNLIDKYDAELRELKDEVQNIGLISKALPDSCFSRNRLEP

SEQ ID NO: 6214 - DNA, 5019 bp, DROSOPHILA
aagtatttagttgaattccaacagcaaatagtcatagttttagaaaaattttgttgtaaagactgaagtacctcagaagaagtcaataaacgcaagagaagatgtttttgaaaatcgaaactaattttcttcgggcttcgaaaaattgaagtttgcaagattcgaaatagctttaacttgatttttagaacagaaacgagtatgaacttttcatacgatcatttttatcgcacctattgtgatttaatgggagataggaggagaccaattgggatatgcaaaaataacgcaactattattatctttgtatgtacgattaattttaatctctaaagagtcaaagtacttcaataattttacaaatctgtcggagggaatgtaagcttgcccaaatcaaatggaagctacaatcgttgtcagatggagatattttatgttagaaggaatatctcggatacgaaatatttaatttaaaattccttttcatattattctttttaaaaaataataagtcctgtatgtatacaatgcaatacataaaggtagagtatgtcctaaaaagaaaaatatctttccgaatatatgtatataatttataaaataagtggatacatacatttttcgtaagtatcctagaagatttgccaacgtatcaggtttacaaaaattgattacctatgtgcagttaacttaacggcagtgcactaactaatctgatttgtgaaataatgcagatataaaacatttttaaatagaaatatatttatacatctgattcttcaacatctaagcactcgtatagagtgctttgaatatattctaaatacattggcatgatccaagttttaaatcagccaaaaacttgctccaaaaacaggaagattctacacaaatcgcctcgcccttaaagtttctgccaagtatttgggtgcgtgcggatcagttccggccttcacttaagttttgcaatctttccaaagtcaagaaataaaacaagtcgtttgtaggcatcggtacagatcgattttattagactcaggtcaaattaagattcaaattcgggcgacagtaaaaaccgaaactaaagtgtgtccttgatcccaaaccttgcaatttaaatacgcacacgcaataatttttattaaacttcatcgctatgtcgtcattattacactaattatgtgcctaaacaaatcccttgtgtcacacgataattcaaacacacaatcgctcgacgttaaatctaaaaatgttcgttcggttttgggttcgatttacataaaatttcaagtgacgatcacgttcgctagagataatatgtttagaaaattgtatttgtaatttaaacacatacatatgtatacatagtggtaagtagtagctgacacaggacaagtacaattgctcctgccgtcgcctgcgctcaattaatgtgtagttaatagtacatattagtttcggtatggtttcgcgctgctgtgataggtaacttcttattgtaggttaaagtaatattaggttaattgctacaccgaatttgcttgctttgcactacttatgaacagaactgcggaaatcagagtgacggttagtattaggatcgatgtccttgttgctcgagtttagttggggatgtctgaagtctggatcgggatctggatctggagctggttggctacgtacctaatacatatttgcttaaattgtttatcgaattggatcacggttaggatcatacaaacgcactactcgtcattcctcaccattattgttattacagaattagttattataattacgatttcgtggatccgccatcggtttcgcttgttttattattattgtgtggtttccgttttaatttattatatttaaattttgtttaattgtataataaaataatgattcacaatcagagttattcagcagcaaccggatttggtgttttccactggacgtccttgatcgattttcactttgctagcgttgtcagtggcgctggacggcggcccgacgcgattcttgatctccgccgccatcgtcatgaaggcctgctcaacgttggtggcgctcttggccgaagtttcaaggaatggaatgcctaactgggcggcgtactcctggaattttggaaacaaagacccagattagtatatacgtgcatctatgattcccaggactaaaccagcaatatacgcaccgcagctgtggtgtggtcgactactttcttggtggtcaagtcgctcttgttgccaaccagcaacttgttgacattctcacaggcataccgctcgatctcctccagccactgcttcacattgttgaaagactcctggtccgtgcaatcgtatacgacaatgatgccatgggcgcccctataatatgaagacgtgatggtgcggaagcgctcctggccagcagtatcccactgtaaacagactaattagctctggactagattgcctctggcgtttttatgcttacgatttgcagtttaatggtctttccgtcgagttctatagtcctgattttctgcaagataaaggtttatgagtcagacataaagaattttcacaaatttccggttggcttacgaaatccactccgattgtgctgatataactttctgtatatgtgtcatcggcaaatcgcaacagaagacaggactttccaacgcccgagtctccaataagcagcaacttaaagagataatcgctgtggatttggagatagttaatatagttaatgttataaaatagttatatagttaataaattatagttaatttaatagttaatgatataaatttgtgctgcgatgtgggaatagttcagaccctatgctgaaacatataaaacttcagagaaatctaaataaaactgatgatgcatatttgcgatagtgatattacaagacgaaatgtttaaaatcagagtgtaaaaggtttagtatacatttaaagggaaataagttggatgacaatcagttagaaatcattgattcaagcaaaacatttagagaggtgttttgcgggcatagtttagtcgggcagatactaatatatacataaaaccggtttggtttaggctttatcttatcatgctatgtccaacatcaacccccaattgctgaatgatatgcgatagtgttccaatcctctgcacacatgtatgctggctattgaaggaggctttctggagagtgcgaaccaagatcggttcagatttaattgccttgagtgagagcggcaattaagtagcactggaatggcctttgattacgtagcactgcgctgggggtgggaaaggctctccacgcaggtgactcatccgcccgactagcgatttggcccgtcaactgggatctcgctgtatatatgtgtggactttatacatatgcagattccgatgagagtttcgaacgcgcttttcatcgcctcgcccgtgggcactacattgaaatccagctgaaacacacagttttggttatggtttctcgattgggtcggttgttaggtccgagtgtgtattttgtttttagcaaatggtctgtttttttggagttgccaacgagggcaaaagggagtggagtggggctgctcgataatgaatgggaatgaaacgtagcagaaatgacgtcgcagaaaaaataaaagaaactattttcgaaggccagaaaaggaagtggaagcccagtcactgttttaactccagataactgcgcataattacgtgtgacgacttactattccggattcacagatgacattttctggctttttcacaagattatatatttgccacgaacaaatattcgatttctggccctggactggctgctgttcagagtgtttttatttgatttgcgcgttccgaaatactggaaatcgacacgcactcggcttgtgttgtgttttgcagttcgctattgtaattattgcagcgaatttaaatgggaaatacgtttatttccacaaattcgacggccgagaacgagaacaatggcgactgaaaaaatgacgaagtggcattagcggcagtgttggaaaatgcgcggggccctcttccaaccagggctacacattatcttgtctacggaggtgagtgggcggaaccagagaagaaaatatatggattatcgccaaatgacccctaacacaccccatataaaaacaaaaatacttaacttttgcatacaatctcttatggtacatcatttgtttctaaacacggcctttaacatttgagtgtttgcatagagaacacattaaagataataataataatacgcgtaatagtatatgaaagaagattcgataggcgggtgtagcgcctgggggaatgcatctggcagatccgatatacatatgtatgaattgggccgctactccagcgaatttagcgtgagcagctgcttgagcaccttcgtctgcgaggtctcccggatctcgcccgccaggaacatctcgtccaccacactgtacaccttgtagaagttgaagaccagatccagctcgcacacattatggaagtattcgttgagcacctccacgaagttgtgaatggcctccagatagcacaggttgttgtcgtttacgtccacgcagatgcagaagtacagacccgcatagcgtcggtagacgatcttgaagttgcggaactacaaaggcaaaagtgtgataaaagggtgattcaaaagaacatatggactcgatcccacctccacaaagttggtgtgcttggcatcgcgcactgtgaccacggcatgcacctcctcaatcagtttctgcttctcgtcgtcatcgaagttcatataccacttggccaggcgagtttttccagctcggttttgtataagtatgaatcgtatctgggcgaatggaaggtcaaataggggtctaagcttatagctggctagttgcttaccatttttcgggaaattggttaaaccgtttcctgcttatttacaactttttttgtttcgagaatgggggcgaaaaactgattatgagcaaattgt

SEQ ID NO: 6215 - DNA, 1791 bp, DROSOPHILA
tcattttttcagtcgccattgttctcgttctcggccgtcgaatttgtggaaataaacgtatttcccatttaaattcgctgcaataattacaatagcgaactgcaaaacacaacacaagccgagtgcgtgtcgatttccagtatttcggaacgcgcaaatcaaataaaaacactctgaacagcagccagtccagggccagaaatcgaatatttgttcgtggcaaatatataatcttgtgaaaaagccagaaaatgtcatctgtgaatccggaatacgattatctctttaagttgctgcttattggagactcgggcgttggaaagtcctgtcttctgttgcgatttgccgatgacacatatacagaaagttatatcagcacaatcggagtggatttcaaaatcaggactatagaactcgacggaaagaccattaaactgcaaatctgggatactgctggccaggagcgcttccgcaccatcacgtcttcatattataggggcgcccatggcatcattgtcgtatacgattgcacggaccaggagtctttcaacaatgtgaagcagtggctggaggagatcgagcggtatgcctgtgagaatgtcaacaagttgctggttggcaacaagagcgacttgaccaccaagaaagtagtcgaccacaccacagctgcggagtacgccgcccagttaggcattccattccttgaaacttcggccaagagcgccaccaacgttgagcaggccttcatgacgatggcggcggagatcaagaatcgcgtcgggccgccgtccagcgccactgacaacgctagcaaagtgaaaatcgatcaaggacgtccagtggaaaacaccaaatccggttgctgctgaataactctgattgtgaatcattattttattatacaattaaacaaaatttaaatataataaattaaaacggaaaccacacaataataataaaacaagcgaaaccgatggcggatccacgaaatcgtaattataataactaattctgtaataacaataatggtgaggaatgacgagtagtgcgtttgtatgatcctaaccgtgatccaattcgataaacaatttaagcaaatatgtattaggtacgtagccaaccagctccagatccagatcccgatccagacttcagacatccccaactaaactcgagcaacaaggacatcgatcctaatactaaccgtcactctgatttccgcagttctgttcataagtagtgcaaagcaagcaaattcggtgtagcaattaacctaatattactttaacctacaataagaagttacctatcacagcagcgcgaaaccataccgaaactaatatgtactattaactacacattaattgagcgcaggcgacggcaggagcaattgtacttgtcctgtgtcagctactacttaccactatgtatacatatgtatgtgtttaaattacaaatacaattttctaaacatattatctctagcgaacgtgatcgtcacttgaaattttatgtaaatcgaacccaaaaccgaacgaacatttttagatttaacgtcgagcgattgtgtgtttgaattatcgtgtgacacaagggatttgtttaggcacataattagtgtaataatgacgacatagcgatgaagtttaataaaaattattgcgtgtgcgtatttaaattgcaaggtttgggatcaaggacacactttagtttcggtttttactgtcgcccgaatttgaatcttaatttgacctgagtctaataaaatcgatctgtaccgatgcctacaaa

SEQ ID NO: 6216 - protein, 205 aa, DROSOPHILA
MSSVNPEYDYLFKLLLIGDSGVGKSCLLLRFADDTYTESYISTIGVDFKIRTIELDGKTIKLQIWDTAGQERFRTITSSYYRGAHGIIVVYDCTDQESFNNVKQWLEEIERYACENVNKLLVGNKSDLTTKKVVDHTTAAEYAAQLGIPFLETSAKSATNVEQAFMTMAAEIKNRVGPPSSATDNASKVKIDQGRPVENTKSGCC

SEQ ID NO: 6217 - DNA, 3463 bp, DROSOPHILA
tcgtcgagtctgcgccatcggcgactcagcgatgtcgatgttccgccgggcacggaaaagtgccgataccgtgctgcccagctgctgccagcgttcgaaggcccgggattcggtgtgcggcgcatcgagcattactttggacgacatcactgatgccgacaattcagcgatctgtgcagcagcagcagcagcagcaatgtctgtgctgttggtttccggttgaggttgctgttcagattccagattgaactgagattgggactggaggtcgggctccgtttccggctcagatttgccaggagatggcaagtcaacggacagctcatcgggtggcggcattgtctgactgaagatgagcacctcggcgcgctcctcgcgagcatcatcctcgctatcctccaggggcagggcgtcggtgctgccgctaactaaatcccgcacgtgcgcaaaactggaagcgatgcgacgcagtgaggggtcatccttttcctttttcgtcggcattgccggcgcatcggcattggtttccaccggcgccttcttgctgtaggcagcatccattgtggttgctttggtggcgatgacatcgccggcattggtcgtctgcttctggcgcatcctatgcagatttatgctggaaaatttgttaccatagctttgacgcatctcggcgcgcttgcgacgcgcctcctcctccgtcctggccgcctgttggtccctggccatcagttgctgcgcctttgacatcgtctaactccaaacaggaaaacgaaatacggcaaatctttagttaacactagcaaaaaggaaaaaaaaaaaaaaaacaaaacaaaacacggaccgaaacgagcgctgagaatttcgagagtttcaaatgtgcgtcgattgacttggttaccaatttgttttcagaaatataaatacggtagcgtgcactggaacagcttttgcacaacctaccaggatcctatgtactactaattaactactcaattttcgctcgctttcaatcacatctttaatagatcatcctcaatcatcttaagcatagtcttaacaactcatgttgggtggcgaaaaggttttgccaagcgagaaaaattcatatcaattagaatggagtggagcttttggagtggatgcaatgcatccttaagcctttcaatagaacttattgtgcatgtctgcggtgaacaacgtaacgcgatcacaaacatcaatgttataatggaaagtgtgtgttaactgagtgagtgtgtgtgggtgtgtgtgtgtgtgtgtgtgtgtgtgtgtgtgctagaactgcagccgcttcttctgggccaatccattgcccctcaccgtagtctcgaccagcttgcgcttgagcgcaggcttcgtgtcgccggtctgcggattggcgccctccttggcggccagaatggccgacggcattggcaacttgggacccactgtgggcgccggtttgttagcgaaatacggcatgctcagtgcctcgcggcaggacacacgccgcagcggattcatggcaaacaggcgttgcatcagatggatcaagtcattgcccgcggcggtgaatatattgtccaatggtgtgcccggaaagttgcgaaactgcagatagtcgtgcagtttgctcaaatgcggccattcagcttccgtgggtgttcccagtgtggaaaagatccgtgtcagctgatccagatccgaatcgcccggcatgaacggcactcgcagcataagttcagccaaaatgcagccaactgcccacatatccacaccggtgccatattgtcgggcgccaaagagcaattcgggcgaacgataccagcgtgtgaccacgtggtgcgtgtaaatgcgattgggcgaaccgaaggacttggccaaaccgaaatcgccaatctttaggatgccatcgctgttgaccagcaaattgttgggcttcaaatcgcggtgcagtatccaattgagatgcaaatactccagaccctttagcgtcatgatggcataggccttgatgttcgcctgcgttaatataatcttgttatccttgatgatcacctccagatccgtgtccatgaagtcgaaaaccagcgagacattcgaaagttgaccgaaaacgtccaccaagccaatgatattctcgtgctgcagctcctgcaatatcttgatctcacgcagcgctgtcctgttgataccgtcgcgtgcatcctcgcgcgatcccttcttgatcttctttacggccacaatttggttggtcaccgtgtcgcgcgccttgtaaactgtggcaaactgcggtgcgaaagtggaatgcgcacattgttatggatcgttgggttgatattccgtggcggcggactcacctgaccctcgccgaggaaggatagcttggcatagcgttccgttttgtcattcgcattgggcagcatcgtttaggagcctcataaatagcacgaaaatgactgaaatgctgcgaggccgaatcaaaacaattcaagttcgcaaacgctatcgatggccgataaccgatggacgccggtagggcctatcgcgcgccccaaaaaaaatactagatttcagagtctattaagaataatgcaaaaacagcgtattgctcctttattgctaatcaattttatagtttaacaagttatgcaaataatacacaactgtcaatttaaattagctgcatgtgattgtcatttaattttagctacttttagctatgtgcagtttaacaacactgccaaacaccggtgcgataacatatcgatagaccgccccaaacgatgccttctgctatcgatgacagactcgttttttttctcaacaatacagagcaaattggttgatttttgtcgaattaagtgaataaaacgcacgacaggatggagatgctacccaaccaaacgatttacatcaacaatctgaacgagaagatcaagaaggaggagctaaagaagtcgctctatgcgattttctcgcaattcggccaaattctggacattgtggccctaaaaacgctcaaaatgcgcggccaggcatttgtgatcttcaaggagatcggcagcgcttcgaatgccctgcgcaccatgcagggcttcccgttctacgacaagcccatgcagatcgcctactccaaatccgattcggatattgtggccaagataaagggtaccttcaaggagcgccccaagaaggtcaagccaccaaaaccagcgccgggtaccgatgagaagaagtgagtatcccaattgctaattgggcccgtttagattcaatcatttgttgccaacggccatggtgctaccatttgttgctccctgttgcctcgcaaaaacccaatgttttcattcgcacgcctgaaatcctttttgctactaaaaacatttccgcattaaccaatgttagtttttggccagaattatggacttgaaaaccaagaggtgtctcaagtcttcat

SEQ ID NO: 6218 - DNA, 1392 bp, DROSOPHILA
gtcattttcgtgctatttatgaggctcctaaacgatgctgcccaatgcgaatgacaaaacggaacgctatgccaagctatccttcctcggcgagggtcagtttgccacagtttacaaggcgcgcgacacggtgaccaaccaaattgtggccgtaaagaagatcaagaagggatcgcgcgaggatgcacgcgacggtatcaacaggacagcgctgcgtgagatcaagatattgcaggagctgcagcacgagaatatcattggcttggtggacgttttcggtcaactttcgaatgtctcgctggttttcgacttcatggacacggatctggaggtgatcatcaaggataacaagattatattaacgcaggcgaacatcaaggcctatgccatcatgacgctaaagggtctggagtatttgcatctcaattggatactgcaccgcgatttgaagcccaacaatttgctggtcaacagcgatggcatcctaaagattggcgatttcggtttggccaagtccttcggttcgcccaatcgcatttacacgcaccacgtggtcacacgctggtatcgttcgcccgaattgctctttggcgcccgacaatatggcaccggtgtggatatgtgggcagttggctgcattttggctgaacttatgctgcgagtgccgttcatgccgggcgattcggatctggatcagctgacacggatcttttccacactgggaacacccacggaagctgaatggccgcatttgagcaaactgcacgactatctgcagtttcgcaactttccgggcacaccattggacaatatattcaccgccgcgggcaatgacttgatccatctgatgcaacgcctgtttgccatgaatccgctgcggcgtgtgtcctgccgcgaggcactgagcatgccgtatttcgctaacaaaccggcgcccacagtgggtcccaagttgccaatgccgtcggccattctggccgccaaggagggcgccaatccgcagaccggcgacacgaagcctgcgctcaagcgcaagctggtcgagactacggtgaggggcaatggattggcccagaagaagcggctgcagttctagcacacacacacacacacacacacacacacacacccacacacactcactcagttaacacacactttccattataacattgatgtttgtgatcgcgttacgttgttcaccgcagacatgcacaataagttctattgaaaggcttaaggatgcattgcatccactccaaaagctccactccattctaattgatatgaatttttctcgcttggcaaaaccttttcgccacccaacatgagttgttaagactatgcttaagatgattgaggatgatctattaaagatgtgattgaaagcga

SEQ ID NO: 6219 - protein, 353 aa, DROSOPHILA
MLPNANDKTERYAKLSFLGEGQFATVYKARDTVTNQIVAVKKIKKGSREDARDGINRTALREIKILQELQHENIIGLVDVFGQLSNVSLVFDFMDTDLEVIIKDNKIILTQANIKAYAIMTLKGLEYLHLNWILHRDLKPNNLLVNSDGILKIGDFGLAKSFGSPNRIYTHHVVTRWYRSPELLFGARQYGTGVDMWAVGCILAELMLRVPFMPGDSDLDQLTRIFSTLGTPTEAEWPHLSKLHDYLQFRNFPGTPLDNIFTAAGNDLIHLMQRLFAMNPLRRVSCREALSMPYFANKPAPTVGPKLPMPSAILAAKEGANPQTGDTKPALKRKLVETTVRGNGLAQKKRLQF

SEQ ID NO: 6220 - DNA, 2621 bp, DROSOPHILA
attaactgagtatcactttgagattcgataaatatctaagcttgcctttcgagctgctgactaagccaaaatctgagtattcgtcaccctcgtccaaatggatggtggattgtaaaccggaatcgtcgtcttcctcaccaaaatcgatgggcgggggggtgctgcagagcagcggtggtacattcaccataatgccagctgcaaaattcagtaaaaggatcccctaaaattcacttcctgcttcaagaagaacaacaaaaacgctgggaacggttcgatcttctatctctctcgctccactttatcactgtgtgtgtggtgtgtatgtgtgacgcaggtgtggagggcctgcaagtgtgtgtgtgtgtgttagccactcaaggtctgtgttggaattttcttgtttgcatttaacacgcgtcaattttgttgtgtctctgtattatgtctaattgtcgccttattggtggctctaaaaacagatttgccgaatttgcaagtcgcgttttatctgcaattagccatgttttccagaaaacaatactttttcctctgcccacagtgtgaacgtttaacttttggccaaccgacagtgctgaaaaacgttgcgcaacattgataacatacaaaatttgaatcttatctttttcaattcccattttcgatttaaatcattatccatagttcagatagaatagttatattagttatatttctataatagatttttattctttccaattcttttaccgttaaaattgtatttgaaaattattagtaacaagagtaaaatatacatgaaagtctaggctgcagtatgtaatacgtcaaattttgttgggacactaaacaacaaatagtcgtcataaaggcttcttttaaattgttatgatattttccacaatttctgcatacttttttaagcttgctggcaacgccgccaccgtaccaatacaactatcgatagccgcctgtcagttttgacagctgttttaaggttatactgcgctgccgttgcaatcgctccaccaatttggtaattttgcttatttaacatcaaatattgcataaaactaggaaaaccaggaatctgtaaagtggagcgagacggggaacgctattaaggaagtcggataactaaagtacatccttttcttgcagttcacggtcggacaattacataacttgaagaagaaaccatgtcgcaggctcccgttcgcgtttccccgctgatcaagttcggcagatggtccctgctcctggtgggcattgcctacggcgccgcccaccagagccgcctgtccaagaaggaggagaagttgcgcgagatcgaggcacagcagaaggccgtccgtgatgccaagctcgccgaggagaagaagcgcagcgcagaggctgaggcccgtgccttggctgagctttcgaagcccactcccaagcactaggatccttcaggatgcaacatccgcagttcccttagcttaaaaacattgaaaaaccacaacatttacacacgaagttcgcccaaaaggaggagcatcatcgatagtggagccaccatctatcgatcactgactatcgtttttgtgttttcctctgatgcttgtgcaaaaaacagaatgttcgaaattaaatgattgaaacaaaaccattatgtaaatactctcaagtgtttcgtgtttgtgattaagtggtgttcactggaaatatatttatattagcatagtgtttggataggagaggattgagagaatttgagagggtttgagctccaaatttgactaggaagtacatataaatatttttgcaaattgattatcaataattttcctaaattttgttttaaatcttttttgataaacaacaactgatagtttaccttattggatgcccactgtagttgccagctgattggcccacttaagatattggcgccaacagctgatttcaaccggcgtttatttacactttcaattcgctcgcaagtcgtcgcatggctcggctgtttgatcaataatcccccggaatacttccaattccggaggtgttgagacacctttcgtgtttcggggagccattatatcacgcaatcccatcgaggacatgccatcgcatcgcgatgacaaactttctggatcaattgcccaagcatatcagagaaatcgccgagcagggtaagagttttggggttccaacaactttattcaagagccaactaaattcctgtactccagttaatgttctcgcaccggaggaggtgctgacaactcccaaggtgcgattcctggacacccgccagcaatcgctgcacacaatcgtgcgaaaatgcactccggatgatgttagggtgctcaaggatgcggcagccaagtggctggcagagatgccccagtcaggtgattctcagactaatgtataagtagcctcttgtgtttagtttgccactatttattacagcggattccctcttcaagccgcttgtcaatgttagatggtcgcgggtgtcgtttggatgttccgctttagatcgctgcacgggcgggggagtggtcactcgtggaattacagagctatgtggagcagccggcgtgggcaagacccagttgcttcttcagctatcc

SEQ ID NO: 6221 - DNA, 552 bp, DROSOPHILA
atactgcgctgccgttgcaatcgctccaccaatttggtaattttgcttatttaacatcaaatattgcataaaactaggaaaaccaggaatctttcacggtcggacaattacataacttgaagaagaaaccatgtcgcaggctcccgttcgcgtttccccgctgatcaagttcggcagatggtccctgctcctggtgggcattgcctacggcgccgcccaccagagccgcctgtccaagaaggaggagaagttgcgcgagatcgaggcacagcagaaggccgtccgtgatgccaagctcgccgaggagaagaagcgcagcgcagaggctgaggcccgtgccttggctgagctttcgaagcccactcccaagcactaggatccttcaggatgcaacatccgcagttcccttagcttaaaaacattgaaaaaccacaacatttacacacgaagttcgcccaaaaggaggagcatcatcgatagtggagccaccatctatcgatcactgactatcgtttttgtgttttcctctgatgcttgtgcaaaaaacagaat

SEQ ID NO: 6222 - protein, 81 aa, DROSOPHILA
MSQAPVRVSPLIKFGRWSLLLVGIAYGAAHQSRLSKKEEKLREIEAQQKAVRDAKLAEEKKRSAEAEARALAELSKPTPKH

SEQ ID NO: 6223 - DNA, 3882 bp, DROSOPHILA
ttttctatagctcaaatgtaaaaaggggaaatgacaaaggcacatctgagtgagtttttgttgtgcgtcccttactaactctaaaaacttctacgtgatctttatgtggtgtaatattcctgcaagtgcagtttttatgaaggctctaaaaaacacaagcggaagtggtcataagcattaaaaaatgtcctttaacggtcaacacatagttctgattttttatgttttattactgactagaaacgtaaaggtcataaaaccctctactcagcgaagataattcgcatcgacaacctatgttaaaaaaccacatcgtccatatttgactctaactgactatatatcttttgcattgaaaggaacctctagctgtctcattcgcaccaatttgcatatgaaaaattagcacttttaggtataaaaaggaatcgatgaaatcaactcactcaactcagcgaagtacccagtttttactttacctgctcaggcttggggatcgtttttcgctttcgccgtgatgatttcccttcctgtctgcacccttatttgcgtgcgtgtgagcgggagagccaattgagtcccggcgtgtgtgcgtacgagggtgagtgagaatctttcgccgagacagagcgtacttatagttagctcacgcagcgaatttgtatcagtcgtgatttggctctgtcagcgaaaggaacaaccatttgttgtgccacacacaaccgcgagtaatataatcgaatcaaatttcaactacctcattttgctaaatcggtaaacttttataaaagacaatttttgtgaaatctctctacctcaaagtacaaaagtgtgtacaaaaattattcatatccctgaaagtgcacaaattgctcaaatgaaattttgttgtctaaaaaactgaagctccaaaaccacgaaggcgaatattataggtgttttctgtgtgcgggaaaacattgcgcgagcacaaaattaggagcacaagaagaatttgttgatgtccatatcaatgcttcaagacgcacaaacgcgaagtaagtattagaccaaattaaaatattccccaagtttgtaaactatctagaagttctagagtccccgatcactttctcattattaaacagtccgatgtctttaggatagaaaatacaaatgtaatgtaattgcacacataccgattagttagaatttgtttacatgtttggacaggaaccggcacttaactcgttatcgaccaaaacaaaaactagttagacgaaaatagagagctgcgaaaacactaagagttctctccgtacgaaactttctctcacacatgtatcatatgtaaaatttttttctcttttaagccgttgctcttaagacatttccaaatgaaaacatactaacttatgattttttttttagccttagctgctgcattagctggcataaaacaagaggacgttcatctagaccgttccatgtcgctatcgccccccatgtcggccaacacatcagctacaagcgccgctgcgatttatccagctatgggtctccaacaggcggccgctgcctcagcttttggaatgctctcacctacccaacttctggctgcaaaccgtcaagctgccgcattcatggcccaactgcccatgagcacattggccaacactctctttccacacaatccggcggctttgtttggggcttgggctgcccaacagtcgctcccgccccagggtacgcatttacattcgccgccagccagcccgcactcgccgctgtccactcctttaggtagtggcaagcacccattaaattcccccaacagcactccccagcaccatgagccagcgaagaaggctcgaaagttatcggttaagaaggagtttcagaccgagatcagcatgagtgtaaacgatatgtaccatacatcgggaggcccaatatctccgccttccagtggcagctctcctaattcaacgcacgacggagcgggtggaaatgctggatgtgtcggtgtctccaaggatccatctcgcgacaaaagcttcacctgtaaaatctgctcacgcagctttggctataagcacgtgcttcagaaccacgaacgcacccacaccggtgagaagcctttcgaatgtccggagtgccacaagcggtttactcgtgaccatcacttaaaaacccacatgcgtttgcatactggagaaaaaccatatcattgctcgcactgcgatcgtcaattcgttcaggtggccaatcttagacgacatttgcgagtccacactggagagcgtccctatacttgtgaaatctgcgatggcaaattcagtgactccaatcagcttaagtcccacatgctggtacacaacggtgaaaagccgttcgagtgcgaacggtgtcacatgaagttccgacggcgccaccatctgatgaatcacaagtgtggcatccagtcgccgcctactcccgcgctttcaccggccatgagtggagattaccccgtggcaatctccgcaattgctatcgaggcatccacgaatagatttgcggcaatgtgtgccacctacggaggttcgaatgagtcggtcgacatggaaaaagcgacaccggaggacgatggtccattggatttgtctgaagatggagccagctctgtggatggccattgcagcaacatcgcacggcgcaaggcacaggacattcgtcgggttttccggctgcctccaccgcaaatccctcacgtacccagtgatatgcctgagcaaaccgagccagaggatttgagcatgcactctcctcgctctatcggatctcacgagcaaaccgatgatattgacttgtatgatttagatgatgccccggcttcttatatgggccatcaacaacattaggccagtaccacaccgaattgtacatagccctaatcagttttcatttgatgaaattgactggcatttattaacacaaaattgaaaattttgctatttcaaagtggaaagtaaaaattgttgcaacaggaatataatgataagtacaagtttaaaaaaaaataacatacaaaaaagtcgaaattgtacaaagtaagccataccgtatgcttgttaccgccaaaccccaccaaatcaaatcgaaaatgtcgtgccattctttaccttaaatttaagttatattcttaggttcggaatcttaaattgtacatattcagcttacacagctgccaattgtaaagtaatcggcgctctaaacatgcattgttgcagaaaaataaaagacacgaagtttaattaggaaatctataactaattttatttaatttattagcttaattttttataatttaatcaaattctttaagaaaacaatgccaataatcttcaaatcaaaactaactttaagttaaataataaaaaacatttgtttgataattgttctgtttgcattctctatttaaaactattattaaatataaaaatttagttaatcctgtttttttaaagatcattcttaaatgtacacttttatatttatacttcaataaatatttggtttaattgttgctgcttcaaatataaacaataaagaaaaaagaaaatcaatggtaacgttaatatttaactgattccgcttttatttcatattgccataacttaaacacagtttacgcatccatttttgaaaatctttttttttttgttgcaaactataagaaacgttaatatatattccaaaataataacctaatgtagatcaatgcgtatcgaaagtatagtaatcccacttatcttaacactcgtaactattagttttaattgtaagacttgaaccaaatacacaggaagaaattgctataaccaaatacctccaatacctctgtatcgaaattgttgtgag

SEQ ID NO: 6224 - DNA, 1509 bp, DROSOPHILA
atgtccatatcaatgcttcaagacgcacaaacgcgaaccttagctgctgcattagctggcataaaacaagaggacgttcatctagaccgttccatgtcgctatcgccccccatgtcggccaacacatcagctacaagcgccgctgcgatttatccagctatgggtctccaacaggcggccgctgcctcagcttttggaatgctctcacctacccaacttctggctgcaaaccgtcaagctgccgcattcatggcccaactgcccatgagcacattggccaacactctctttccacacaatccggcggctttgtttggggcttgggctgcccaacagtcgctcccgccccagggtacgcatttacattcgccgccagccagcccgcactcgccgctgtccactcctttaggtagtggcaagcacccattaaattcccccaacagcactccccagcaccatgagccagcgaagaaggctcgaaagttatcggttaagaaggagtttcagaccgagatcagcatgagtgtaaacgatatgtaccatacatcgggaggcccaatatctccgccttccagtggcagctctcctaattcaacgcacgacggagcgggtggaaatgctggatgtgtcggtgtctccaaggatccatctcgcgacaaaagcttcacctgtaaaatctgctcacgcagctttggctataagcacgtgcttcagaaccacgaacgcacccacaccggtgagaagcctttcgaatgtccggagtgccacaagcggtttactcgtgaccatcacttaaaaacccacatgcgtttgcatactggagaaaaaccatatcattgctcgcactgcgatcgtcaattcgttcaggtggccaatcttagacgacatttgcgagtccacactggagagcgtccctatacttgtgaaatctgcgatggcaaattcagtgactccaatcagcttaagtcccacatgctggtacacaacggtgaaaagccgttcgagtgcgaacggtgtcacatgaagttccgacggcgccaccatctgatgaatcacaagtgtggcatccagtcgccgcctactcccgcgctttcaccggccatgagtggagattaccccgtggcaatctccgcaattgctatcgaggcatccacgaatagatttgcggcaatgtgtgccacctacggaggttcgaatgagtcggtcgacatggaaaaagcgacaccggaggacgatggtccattggatttgtctgaagatggagccagctctgtggatggccattgcagcaacatcgcacggcgcaaggcacaggacattcgtcgggttttccggctgcctccaccgcaaatccctcacgtacccagtgatatgcctgagcaaaccgagccagaggatttgagcatgcactctcctcgctctatcggatctcacgagcaaaccgatgatattgacttgtatgatttagatgatgccccggcttcttatatgggccatcaacaacattag

SEQ ID NO: 6225 - protein, 502 aa, DROSOPHILA
MSISMLQDAQTRTLAAALAGIKQEDVHLDRSMSLSPPMSANTSATSAAAIYPAMGLQQAAAASAFGMLSPTQLLAANRQAAAFMAQLPMSTLANTLFPHNPAALFGAWAAQQSLPPQGTHLHSPPASPHSPLSTPLGSGKHPLNSPNSTPQHHEPAKKARKLSVKKEFQTEISMSVNDMYHTSGGPISPPSSGSSPNSTHDGAGGNAGCVGVSKDPSRDKSFTCKICSRSFGYKHVLQNHERTHTGEKPFECPECHKRFTRDHHLKTHMRLHTGEKPYHCSHCDRQFVQVANLRRHLRVHTGERPYTCEICDGKFSDSNQLKSHMLVHNGEKPFECERCHMKFRRRHHLMNHKCGIQSPPTPALSPAMSGDYPVAISAIAIEASTNRFAAMCATYGGSNESVDMEKATPEDDGPLDLSEDGASSVDGHCSNIARRKAQDIRRVFRLPPPQIPHVPSDMPEQTEPEDLSMHSPRSIGSHEQTDDIDLYDLDDAPASYMGHQQH

SEQ ID NO: 6226 - DNA, 1435 bp, DROSOPHILA
taccttcgttttgtgttcgatttattgtaatgtcgagcttataaaataaatattgggagtgggagcactgttgtgaacaataccactcaaacggacgtggaattgtccaagttggagaaaattcgagaagcggaagaggaaattagttcaccagactttacacccaatcccagtcccaggacaaggaagcgaatgaaagtggaggagccgaacggcaaagtgcaagaggaagacgcgttggaatccaatctcgattcgcgaccaaagaagaccaggaaagtaataactcgtagagcgcccgatccacccgttcgttgtgacgtggagcccaaggtgcgtttgaagttgctcaaaaccgtattggtgggaatggtccagatcgctgttatattagttctcatcatggccatcggatctccggatattatctgctaagctacacaaccatcgaaatattgccaagatgccatagaaaaagaagcagtgaatgcaaaagtaggagagagaaaaactgtagcgggaaatgtggcgataatagcaagtagcgggaaaagcaccgataaccggattcggtgtttgatttcacattatttttcgaatttattgttttcttactcgggcccaagcgaagccacgtcaaagttaataaaatttcatgtgtattgcaaaccgttagcatctaaagcatttcgattcccattcgaatctgtatcggttaagcgaagcggttaagcgaaacaatataaaaagcatttctataggttttaagtttattcaagcatttctttatgtacagcagtgcctgtgcgtgtgtgtaccataaccgtttaaaatcttaaatgtaggcggtggagaaatttacctttacccgttactcgtttgaactctgacccgattcgggcgggattccatccgaacgcgggtgcatagctgtttcgactagggctagaaaaacgtaatcaaatcggtttgcgatcgggtagcgggtaagcgggtaagcggttttaagcaggtatcgggtaagctgtttaacggccaggcggcttagccttgccttgtttgcgtgcatgccgcgtggcattgctagaaaccaaagcaagagttaaaatcgtgttcgcagagctgaacaaagaacacatattctgttagaggaagaacagcgaggagagatggttcaataaagcggaaacggtaaagtatcgtgaaaggtgtgaagtgaaacggttaataagtaactaaagcagaagagaatagcaaaaagataatagaacccaataaactgaataaaaaaggcagaagcggatagtggaaaacagatagcttaaatcctttgtttcgaaatcctgagaactgagaagaaacattgcgtttgctctacttaccgcacaataagtggaaagatgttgttgtccgccggagcacgataatctcgata

SEQ ID NO: 6227 - DNA, 2099 bp, DROSOPHILA
aacagtgctcccactcccaatatttattttataagctcgacattacaataaatcgaacacaaaacgaaggtatgcagggacaggcacaggttcagctgggcggcgaccagggtaatcacgtcggcaacgagggacaagcgacgggcaatcagaatgtccgccgcaagatgacctacaccagaacggagatgctgtcgcgtggcctgcccaccgctggacaggattggaccagtcaattgtcgcccagacatcgttacgcacaaccaccaaagtccggaataccggtccctccgttgttcctaagcagcacccatgcaagcaccaataagaatgtcaccactgccagtcgtcagcgtagtttcctgccccgagtggccaaattgccaaacagagcggacaaatcgccgaggaagaatcaatatcgcgaagctctgaccactgaggtcacggtggagcaatctcagacgttgccattgggcaatcacaaggctaaacatttggtgaatacaccacatgacagcgagagcagcattctgcaggacggcagtgatgataagctaataagcgacagcggcagctcaatggatcacgacaagatcaaattggccaaggccatacgcctgccggatgaggggaacaagagtttcgtctatgtatgcaagccggtgaagaaggtcaaagctctgttgactgccagaaaattgcgcgctagcagcgagcacttgaatggcccaaaggatggtgagtttagcttgcaggaacaggagacattcaagctgcagaggaccatttccgaggaggctctatgcagccgtggcgccggcgagggatacacactctcgcccgtcgagggactggcacagagcacatcgaccacctccagccagttggatagtcccacattggcggccatgctgcagcgccagcagcaattcgagtcgaaggcggttggcagtcaggaccgtttgaggttgcaattggaggaggtgtgccacaggcacaataatcagcgccagctggaaaaggatcagtacgagaaggagcagcgccaattggaattggatcaggtgtcaaagaaactgcccgtgctgcagcatgagatacatatgctgcataaggtgagcgaaaaactggaggcgacactaagggccaccaatatacccaagccgagaagcaacgtaatcattacggatataagccggcaatcatctggacgtttctacacaccgcgcaccagtcccaatcaattggacgagctgcccattaggaaattgtgttgtttgcgcttggaatatataccagctattgagatgcgggcacgcatcattggcaccgtttgccatgtgggctttgtccaagagtttcgcatcgagaccaaaacacttaacgagctaaagacggcggatgagtcgcaatgcttctatttaccggcacccaaagaggaaccgccattggtccagctcaacgaggatgatccattgcagtgcaccaactttcgtcagttgcgtaagaatccgaatatgctgtttcagcaactgcgaaaagtgcccggcgctgggggatcctttaatcttttggatcaggacacaatgttcttcaatagtctggcctatgcggattcaaaaatcatggatgctaacaccgtcgaacagcttgaggtggccacacgcgaggcgggtggcggtggagcaactatggcccattatggcggagccattgcctattcacgcctctcggtgaacaataccactcaaacggacgtggaattgtccaagttggagaaaattcgagaagcggaagaggaaattagttcaccagactttacacccaatcccagtcccaggacaaggaagcgaatgaaagtggaggagccgaacggcaaagtgcaagaggaagacgcgttggaatccaatctcgattcgcgaccaaagaagaccaggaaagtaataactcgtagagcgcccgatccacccgttcgttgtgacgtggagcccaaggtgcgtttgaagttgctcaaaaccgtattggtgggaatggtccagatcgctgttatattagttctcatcatggccatcggatctccggatattatctgctaa

SEQ ID NO: 6228 - protein, 675 aa, DROSOPHILA
MQGQAQVQLGGDQGNHVGNEGQATGNQNVRRKMTYTRTEMLSRGLPTAGQDWTSQLSPRHRYAQPPKSGIPVPPLFLSSTHASTNKNVTTASRQRSFLPRVAKLPNRADKSPRKNQYREALTTEVTVEQSQTLPLGNHKAKHLVNTPHDSESSILQDGSDDKLISDSGSSMDHDKIKLAKAIRLPDEGNKSFVYVCKPVKKVKALLTARKLRASSEHLNGPKDGEFSLQEQETFKLQRTISEEALCSRGAGEGYTLSPVEGLAQSTSTTSSQLDSPTLAAMLQRQQQFESKAVGSQDRLRLQLEEVCHRHNNQRQLEKDQYEKEQRQLELDQVSKKLPVLQHEIHMLHKVSEKLEATLRATNIPKPRSNVIITDISRQSSGRFYTPRTSPNQLDELPIRKLCCLRLEYIPAIEMRARIIGTVCHVGFVQEFRIETKTLNELKTADESQCFYLPAPKEEPPLVQLNEDDPLQCTNFRQLRKNPNMLFQQLRKVPGAGGSFNLLDQDTMFFNSLAYADSKIMDANTVEQLEVATREAGGGGATMAHYGGAIAYSRLSVNNTTQTDVELSKLEKIREAEEEISSPDFTPNPSPRTRKRMKVEEPNGKVQEEDALESNLDSRPKKTRKVITRRAPDPPVRCDVEPKVRLKLLKTVLVGMVQIAVILVLIMAIGSPDIIC

SEQ ID NO: 6229 - DNA, 3200 bp, DROSOPHILA
attaaggaagtcggataactaaagtacatccttttcttgcagttcacggtcggacaattacataacttgaagaagaaaccatgtcgcaggctcccgttcgcgtttccccgctgatcaagttcggcagatggtccctgctcctggtgggcattgcctacggcgccgcccaccagagccgcctgtccaagaaggaggagaagttgcgcgagatcgaggcacagcagaaggccgtccgtgatgccaagctcgccgaggagaagaagcgcagcgcagaggctgaggcccgtgccttggctgagctttcgaagcccactcccaagcactaggatccttcaggatgcaacatccgcagttcccttagcttaaaaacattgaaaaaccacaacatttacacacgaagttcgcccaaaaggaggagcatcatcgatagtggagccaccatctatcgatcactgactatcgtttttgtgttttcctctgatgcttgtgcaaaaaacagaatgttcgaaattaaatgattgaaacaaaaccattatgtaaatactctcaagtgtttcgtgtttgtgattaagtggtgttcactggaaatatatttatattagcatagtgtttggataggagaggattgagagaatttgagagggtttgagctccaaatttgactaggaagtacatataaatatttttgcaaattgattatcaataattttcctaaattttgttttaaatcttttttgataaacaacaactgatagtttaccttattggatgcccactgtagttgccagctgattggcccacttaagatattggcgccaacagctgatttcaaccggcgtttatttacactttcaattcgctcgcaagtcgtcgcatggctcggctgtttgatcaataatcccccggaatacttccaattccggaggtgttgagacacctttcgtgtttcggggagccattatatcacgcaatcccatcgaggacatgccatcgcatcgcgatgacaaactttctggatcaattgcccaagcatatcagagaaatcgccgagcagggtaagagttttggggttccaacaactttattcaagagccaactaaattcctgtactccagttaatgttctcgcaccggaggaggtgctgacaactcccaaggtgcgattcctggacacccgccagcaatcgctgcacacaatcgtgcgaaaatgcactccggatgatgttagggtgctcaaggatgcggcagccaagtggctggcagagatgccccagtcaggtgattctcagactaatgtataagtagcctcttgtgtttagtttgccactatttattacagcggattccctcttcaagccgcttgtcaatgttagatggtcgcgggtgtcgtttggatgttccgctttagatcgctgcacgggcgggggagtggtcactcgtggaattacagagctatgtggagcagccggcgtgggcaagacccagttgcttcttcagctatccctttgtgtccagctaccccgtgagttgggtggcttgggcaaaggcgtggcctacatatgcacggagagttcctttccggcgagaagattgctgcagatgagcaaagcctgcgagaagaggcatcccgaaatggagctgaattttctgggaaacatctttgtggaaaatcacattgaggcagtgagtcgacaaaccaatttgtagccatatgcttatttaatattaatccaaaggaacctctcctggcgtgcgttataaaccgcattccgcgactgatgcaacaacatggcattggcctgatcattattgattctgtggccgccatattccggctgtataatgattatctggaacgagcgagacatatgcgtcgactggcagacgctctgctcagctacgcggataagtacaactgtgccgtggtctgtgtgaatcaggtggccaccagggacggtcaggatgagattccctgcttgggattgcagtgggcgcacctaggacgcactagactgcgtgtttcccgggtgcccaagcagcatcgcatgggtgatcaactgataacggtgcgcaaactggaaatactttactcaccagagactcccaatgatttcgccgagtttcttatcaccgcagaaggtgtggtcaatgttccagagccatctgttcccagcccacccgccaaaatgcgtcgactgtgattgattgaatttattctgtttattttgttatcgtttaatttgttgaatttaaaatgtgtaacggcggagcgttcaattagccatacgattgtcttatactcctgttaaattcagcggaatattttagggtttaataatttaaatttacttagttgccaatcaggtttaggtatcattaaaatatataaaaacaaatttagaaaacatgcttttcttatttcttttcaggaacaaaaggttttctgatgacctgattaacacgataacgcaatcttgtttcaattttttttttaaataaatgtaaagttccgataaatttaacccgagtttaagccattttccgggcataatcatcttatttgttgccttaattccttttttgtacaaacactcaataaatatgtttcattcaattgcaatttacagggtagcagagcttacaggcctacatacatagtatagttcatagttcaagtagtaaaatcaattttgtaatcgcctcgtatacattatcacatgaaattctcaaaagttcagattacaatttgccatagtttacgcggacatttaaatgcgacatttacaaaagcctagccttagcgtttaagtatattaaataaataaaatacaagcctaaaggtgaacggattacgcgacaattaaattacaattaagtaatacaactatgggggttttctttctgtttagttttatttttgtttttcttttgtttattgggatagtttatcctctttgtggatgagcaatattcgactttttggcacaagttaatttgactgtggtttcttctgtttaaatctcccgcatggcgacatcctgatcctgggaatcgtgagcttctatggaatcgccatgctcgctggaggacacctcctcctcctcctcctcttcctcgccgtctccatcgccttcgccctccgatgaggaactttcggttttgaccctcttttccggctgcatttgtttgttggccatggcc

SEQ ID NO: 6230 - DNA, 1026 bp, DROSOPHILA
atgacaaactttctggatcaattgcccaagcatatcagagaaatcgccgagcaggttaatgttctcgcaccggaggaggtgctgacaactcccaaggtgcgattcctggacacccgccagcaatcgctgcacacaatcgtgcgaaaatgcactccggatgatgttagggtgctcaaggatgcggcagccaagtggctggcagagatgccccagtcagcggattccctcttcaagccgcttgtcaatgttagatggtcgcgggtgtcgtttggatgttccgctttagatcgctgcacgggcgggggagtggtcactcgtggaattacagagctatgtggagcagccggcgtgggcaagacccagttgcttcttcagctatccctttgtgtccagctaccccgtgagttgggtggcttgggcaaaggcgtggcctacatatgcacggagagttcctttccggcgagaagattgctgcagatgagcaaagcctgcgagaagaggcatcccgaaatggagctgaattttctgggaaacatctttgtggaaaatcacattgaggcagaacctctcctggcgtgcgttataaaccgcattccgcgactgatgcaacaacatggcattggcctgatcattattgattctgtggccgccatattccggctgtataatgattatctggaacgagcgagacatatgcgtcgactggcagacgctctgctcagctacgcggataagtacaactgtgccgtggtctgtgtgaatcaggtggccaccagggacggtcaggatgagattccctgcttgggattgcagtgggcgcacctaggacgcactagactgcgtgtttcccgggtgcccaagcagcatcgcatgggtgatcaactgataacggtgcgcaaactggaaatactttactcaccagagactcccaatgatttcgccgagtttcttatcaccgcagaaggtgtggtcaatgttccagagccatctgttcccagcccacccgccaaaatgcgtcgactgtga

SEQ ID NO: 6231 - protein, 341 aa, DROSOPHILA
MTNFLDQLPKHIREIAEQVNVLAPEEVLTTPKVRFLDTRQQSLHTIVRKCTPDDVRVLKDAAAKWLAEMPQSADSLFKPLVNVRWSRVSFGCSALDRCTGGGVVTRGITELCGAAGVGKTQLLLQLSLCVQLPRELGGLGKGVAYICTESSFPARRLLQMSKACEKRHPEMELNFLGNIFVENHIEAEPLLACVINRIPRLMQQHGIGLIIIDSVAAIFRLYNDYLERARHMRRLADALLSYADKYNCAVVCVNQVATRDGQDEIPCLGLQWAHLGRTRLRVSRVPKQHRMGDQLITVRKLEILYSPETPNDFAEFLITAEGVVNVPEPSVPSPPAKMRRL

SEQ ID NO: 6232 - DNA, 12891 bp, DROSOPHILA
atgattgaatgtgttttgttcagcgtttattagatacgctaagatgctcactagttacacatgctgggaatatctcaaagtgactcatgttttttagcctagtataagccgaaaattccatatgcagaagaccatttgagcaaacaaaccgttcttgcccgaccagaccatgaatattgaataaccaattgagtaatacgaattagtgtaatttacataaatcagcgcattaattcaatctgcgaagccacctaaaatgggccttccagcaagaacaacaactccattaagcgacgttaagttggaagcgctgatgatcagtcggcttatccgatccgtgcacatatcattacagcgaaaccacagccaggagcaccaggaggggcccccaaagcaggaggggcatctcgccgagaaccgcgcaccaccgaggcacccgggcggcccactaattgcgtgagagctggtgcactaagcacaggggccgggttttactttagcccattgtgccgccgctagttataatttaatttacatttttcttaaccaacgctggctgcgatttatcaatttctcgccgcgagagaattcgcgagagcggcttcctccagggttgccgctccatttggcgcccggggagctgcaagtcgagctggatccgatctggatgtactgctttaatgtcttcaccagctaaaaatgtttctataaaatgtttatatgcttgtatagaaaatcaatcatatacgatcatataatcatataatcctgatacgaatgccacataattttgatacaagttcaagctatgtgtttatattttcgataaatcccgcccagctagcgttccagcgagccgcaagctccaagctgcgatctccgggcgcagtggcaacccccgacagagccgagctccggagagaccgattccgagtccaagcgaacgaggtggaacgggaatcgagcgagcttggggctatcgctcattcgagatttgctgtcgaaccgacttggtgcattcgctccgcggatccaatatcgcggttaatcgggggaatcgagagaggcggctagttggcgcgactttagagtcagtgcatcgagtatacggagcgtaaaacaccgactataaccgacatcgacacagtgaagctacagattcgtaaacaatcccagtaacgccgattcgtgcgagtgtaagtgggtgtgccagtgtgagtgcgactaatttaaaggcgactttagctaatcccagatctacactgatcgcaaaacaaccgcatcccctccgcctccgcgcagtgatccagtgtcttagccaatgcatttaaaagccatgctggtaattacgcaaattctgtgcagaaaagcgagtgaaacatgtgcgatcgagtgaagatgagagtgaagtggcgatttcactagcgtgaaaagtgcttgggcagccactgtggcgtatacgtaaccccctaaaccggccaaaatccgtgcactaccgcacacatctctatagatctgtatctgtaaagcaagcaagacaatgggggcccagcctcctcccactgaaaagccaaatggcagctccccccgcttcgttcgccggagtcgaaaaacaataagaatgcggcacaaacgggtttttattctgcattatttatcgcttctgtttgccgtcgccaagtgcacgtcttcattccattagttcgatcgttatgctctcgctagccggagattactccgatcggagtttggagatctgcgatctgagatctgctactatatcttcgtctcagcctgtgccaagcacacaaaacagcaaaaactcacgagaagatcggcaaaataaaggcaaacagctaaaacgtgtcccatagcccaaaaagacactcgcgacgagccatcgggccaagacataaactcaaccggttggtttgcttttcgagcaccagccacagtaacagaaaaaaaacacagaaaaaacagtaaaaaaaaaaataaaaacaaaaatcagtgaggaaacacacctcacctcccccataaggcccacgaacccaagagcagtatgtaaaaattcagaagaaatgagtctggcaaaaacgcgccgagatacttataaataacagtctagatggccaagaaggcgggtgattgggatatagggggatggggggggctgtttagcatagtttattttggcgctaatgggcgggggaggagggagcagagatccggctaactggaatcaaagccgaaaagatgctaaatatgcgatcaataacaaataagaaataacaaatggaatattccatgccatcccgatcgggcaccgactttcttttctcgcatccgccacatttgcattccaaatgaaatcctacgagcgcactccatttccagttcgatgatgggtttcggtctgaccaccgtgctacgagcacaccgtgctgactcagccacttccactgacgcacttccgaccagggatctcgcaccccacggagccacatagatgcgtggacatatgcgctcggccggatcactgctcccatgtttgccagcttggttaggcaggcggtgctaattgccttgattaccctttattagacgaacatcttgataatctcatctggcttttgggctgggcgggctggtcaaattgaagtcatgggttccagattttggccatagtagcagtacggcggtgtgctggccgtaattgacttgttggccgagtgaatcccatgccagcggcaattagcacaaaaacaacataccaaatacaatttattcatatttatggctcaattccatcgccgcttacgtgcaatagtgttttttttgttttctttttgagccgccgcacgccatttgagagcactatgggtcgttcgcagatttgctttatttgtttattgaaatgctaataaaacgctaaatgccgattcggtgaatgccgcagtcggagagcccccagaagccccaaggatgaggttaagccacaatacacatgcatacatccactagaagcagtccgtcgcccaagtcgcaagtccaaagcccaagaaatcaacttccgactccgtcatagcaccaatcaatagtcggacagctagctacaggtttcatggatttgttttgtttccattgctggtgctactgctgctgctggcatcttcaagtgaaactcgagtcacgatcgcgggtctggtttgggtttcggctgtgtttatttttagttgccctgccgccgactaaatcaaatcacttgagagcattccattttattgttataggaggaagcgttctttatccgacgggcaaacagccccgggatccgccccggcccctccattcgcacaagcgtgcatgaaagccaaggcgttaattcaatcaaatccattgcgacaggcagccatgacaaagcggaggcaaagtctcgcttcagaaaccactttcggtcattggatcgcacgagcgaagagctaaaatcgatccaaggctgcccagtggccattgcgcaacccacaggccacccgaagttctcgatttcggccaacttacgcacatccctccatattgcgcatacgacgcatgggccgcgacaccttttgtagcatacattttggcttatcttcgccgaaatgccgagccattcaacggcgagccattccactactccaggcactctgctggccaaacaaccgggctgtgtgtcactcggggcattcgcatccactgcaaatcgggagtcacgtgctccctgccaatgctgaacatgctaaacattagtggtggagtcatggcgctcggtggcggataaagcaactcacagacgccgcagagttccatcgaaatcgccaagtactacttatctggctctggtttctctttttgcgttgttctggtgccagacagcccagatatcaacttgcagtataaacatgtgcccatatatattttgcatcgcagcagtcacatttgcacgcggaacccgtattttgagtactttccgacttgggggaggattgctttggattgtattcgtggtcgttgtcctgtgccaatttcccaagaaggatcgcatactcaaggatcaggttaagaaaatttttaaaaaaataagagtaagtgacagaatggtagtagatagcgcgttccaaaggttaaaggattacattaacttgccccttttatggcaatcaattgaataataatcttcagactgggaatatccttggaaaaatgataggaactttaaaaaaatataagaatatctttgattaattccgctgtatgtacaaacgagatccataatcaaatcgtttaattaacacgcactatgccatgccatttttaagttcacataataattcgtgttgttgcaattgtgaatttgaaaaatatgtgcgaaattttgcgaaagtaaattttatgcgatcatgtgtcatataagaattagggccttaggaactattactcattatataccctggatttcttggaattaggctctatcggccccttgaacataactctgtttaaatcttgctacttcctgtggcaataaaaacgagatttgcaaggggaaatttttgacataattgctgtatttggcgtgcttatcaccggatataaaagggttgttaaaaaaatatcatttaatccagactttaaacgatatgaggaaaggaaagtgggttttagaagttttctgggcactgaaataccagaactaagctgactttgctccacttagtggatatgcctgataaggttaatcgtttttgtgtagtccacttttaacatttcaacatttccttcaaagtggcccagtctcgcccagtggccacttgaaacgcaacgatcatcgcccgcaactcatggtcacatttctgcattctttatagacccaaccgaccaccagacatgctgtagccaccagacaggatgctctgaagtgactcgaatatggaccttgatttcttcgaactctgtaagtacaaagcgccaaatccattcaattaccaccagtgttcgtacccacgtttctccgcaaggataacccattcgagtgcaaatggagtccttgctttggccctgctgaaggctgggccggctctcctcgtcattgacagccaaagtggatactagaaatagataattcggcgatggggtgcttctgggcccacgaatactcttggtcagaaagggcaacccactcgaggtatccaattgagtggcttaacctattaaaccgattattttgaactcccgccaaaagcaatttttaaggaataaaagagaagggaatgcaggattatagatatatttcaaaaggcaatattcccaatttccaacaaaagcccaattcaaatataaacttattaatacccatacccatagtcatctcaaaaatctaatgttccgacaagagtagttaactgactagttatggatacctacctacgtagaagcaggcggactgaggcatttgggatacatgatagctggaaccgtttaatatattcccatacaattgcgactgcctgggattggcatgccacttgggcggcacacgaaaggagcaggttgtttgatcaataacccgactccggggaacggaagcccaaatatttgcactccggctgagattccgcaggccgcagtcagtgcccagatgtttcctgtccatgtgcgacgtgtcgcgagtgccgagtgactaaagcaaacactagagattgcccatatccccaccaactagcttggcagattgtggaagcaggtttccagaatcaggagcatttgcgaaaatatttaccgcagaacaattgcacaaacagtagctgcgtaactccaagccctgaagacgatgatccgctgctggggtcccgccgatccaagggcacccgttttcattccgagcaattagatttcgtttttatcgcttggttaccatgccgatccgttcgcagtggactccatcgtttgattattagttttacggcccgtttcgggcattattttcgctgctcagccagttgtgaagagtgcatcaaccgtatgctcgctcatacgtgcgttagataattgttccatcggatgcagtggatcgcagccgcagcagcagccgcaacagcaacagaagcatcaaagtcgaattgggcatcccatggtgtgcgcatggatgctggcagttagagccagctaacttggcccacagttcggactaaatcgaagaatcctgcaaacacaaccccccactggctatggactatcccaagaacttgagcggtaactcatcaacataatcatgagcatagcataataatccgagtccccccatccgcggcacctgcataaattacacaactcacttggggcaccagtcaacaatccgtttggccaattatcgatcaaacacagagcgggaatttcagggcttatcagcggcagctccccgcttccagtggcccgaataaaacgaatattttgattcaactataattatctgcgggctggtagacgccccctcagcaacgtgccacacttaatttccccataattgaaatgtttttctgccattctgatttgcagtccgagtagcgggcgattcccggactttgctctacttcgaaagataataaactgttggatgtcaatatttactccttacccccgttcctctggatacagaatttgtatatttccccggaacgaaggtggctacttgagagccaatgggcccaagtggccgtacctaccacgtagtcttgtaaaattaaaccaccaactataactattacaactgagctccatattcagaaccatccagattcgcttggatttcaatgtttcctttgcacacaaacttgagatgaagggaacattacgatacacttgaataaatttgtaccgccttttgaactaaccaccatgtcttacactgttgcagctccccaagatctggatgacataaacagcgatggcatggaccatctggatctgctggtgcagggggctttcgacgatggcatccagctaggccacaatggccacctgtccgctggaggaggagtgcactcacacatggagtcgccgcacacgtcgcccatgaacggcttggatgcccacctgaccaactccggccgcgtgggcagcacgcccgtggcggcacaggcccagagccacgtgcatccgcagctgccggagagtccgccggattcgcagcccgcctacagtccgctgggcgaggcccacgggatggcgatgccgctccagcgagagctaatctatccgggtctggcgcccatgcagcaccaggccaatatgctgcagacggatctgggccagtacgcctcccctccgcagcagcaacaccactttgcagctccgcaggccgatgtgcggatcaagcacgagtccgagctcatcatcaacccgagcaacttgctcggccaacagcaaccgcagcagcagcaaatgcagcagcaacagcagcagctcaacgagcagatgttcgcccagcaccaccagcagcaccaggatagcatcctccaggaccaaatgctctactacgacaatggagccggggcggggatgtacgcgaccggcagctaccagaacctatccacctgcaccctgacttctgccctgggactgggggatcgcgtccaggtgatcggcaccagccagttgtccctgaaccgcgtgtccgctccctcgacgccagtgcactccttgtcgcgcaagcgaaagatgtccacgcagctggattgcccggagttccccagtgctcccaaagtggatgcgggcctgcagatgagtccactgcgcgcctctcaccactcgctagccacgcccactccggcaccctcccactgctccgcctccgtctcgccagctctgtccgccgtgaactcccaggcggacaacagtctggacggacagcccggcggcgtggtcacaggctccggttccggttcgggatcgggctcgggatccggcagcgaggcgggcgacccggcggggggccagtgcattcggttcaacgccttccagccggagaactggcacaagctctttgaccagagcctccaggagctgtctgtgatctactaccgcgtggacgcggacaagggctttaacttcagcgtctcggacgacgcgtacgtgtgccagaagaagaaccacttccaggttacttgccatgcgcgccttcagggcgatgccaaattcgtgaagacaccgtccggcttcgagaaaatcaaatccttccacttgcatttctacggcgtcaagtttgaggcgcccaaccagacgatccgcgtggagcagagccagtcggatcgctccaagaaggccttccatcccgttccgtgagtagatcttcttaaagatgtcgctttcgtatattttcgaactaagctaagagattggaaagagtacttagtctgtaaaagataaaaggatataaaggataagttcctatcttcttgaaacccctaacatatcatatcattcattttaaaatttccttcgaatagaacataattatgtatattataataggatagatgtcatatcactcatgtgccgtccttgacctacaacttcttccacagcatcgatctccagaagcacatcgtcagcaagatcaccgtgggtcgtctgcacttctcggagacgacaaacaacaacatgcgcaagaagggtcgtcccaatccggagcagcgcttcttccaactggtggtgggtctgcacgtgcacacgatctccgggaacttcccggtggtgagtcacgggagcgagaagatcatcgtgcgagcctccaatccgggtcagttcgagtccgacgtggatctgtgctggcagcgtggtctgaccccagagtcggtcttccacacgggccgcgtgggcatcaacacggaccgccccgacgagagcctggtggtccacggtaacctcaaggtgtccggccacattgtccagccgagcgacagtcgcgccaagcaggagatcggcgaactggacacctccgtgcagctgcgcaacctgcaaaagatccggatagtgcgctaccgctacatgccggagttcgctgtgcactcgggtctccggcgggagagcgacacccgagagatcgaggacaccggcgtaattgcgcaggaggtgcgcgaggtgatcccggacgcagtgcaagaggctggcagcgtggtgctgcccaatggaaacgtgatcgagaaattcctgctggtcaacaaggtggggcatattcccaattcactttcttgaccaactgactaaccagcgaacccttctcaaggaccgcatcctgatggagaacatcggagccgtcaaggagctgtgcaaggtgacctgctccctggagacgcgcatcgagcacctggagcgtgccaacattggccaaaacagccagcaactgcgtgccaaggatctgcttgagccgcgctgcatcctgccggagcgagcagctatcacgtcctacggcagtcggcgggacggctacgaggtctgctccagccgctccctgcagatcgtcatcttcctgctgatcatcgtaatggcagcctggtaaattccagttcggataaacatcctcaaggggtagcagatttaaaatttctaccttttgctcatcttgcagcctcgcagcggtgtctactctctactttgtggagcacaacaagcagcagcaggctgacgggttctttggtgccgggatgttccgacaggaggcgggtccaacgcacctgagcgacgaggagcgccactacttccacaacctgcacactctctttaagaacaagacacacggaccctggcctatgcgtcaaatgtacgccaccagcacctcgcgtccgccgggatctcgccaagccgaggaggaggcggaggacctggcggcggtgctgaccaagccacaggtgtcctccggccagcagcagctgagtctcaagcacggggtcatcacgacgacggccccgcgattcagcaacaagaccatcagcagcaaaaagggcaagtggccgcccacccaggaggtgctgcgtcaggcggcgggtcagaaactgcacctacctcagccggtacatgtggttcccgctgctccagcgaaggttcctccagctgccttgaacgacacagtggcctccacggagaagccaccccaggccattcctctgcctcaggacttcgagaacaactccatagacatcgatgcccagcagaagcagtcccagctgaagctggacgagcacatcgtggtggtggggaccatcgccagtcccgcctccgatgcctacgattccaactcaccatccgtcgccgctcatcccattcgcaaattcaatcctggaaccgtctacacccacgtttacaagaccgtatcgcccccaacggccaatctggctctgaccaccaacaaggtgagcactgagcccgcccagagtccactaacacacgctctggatgtgccgcccccggctcttcccgtgagaaacagcagcgacaatcccgatgctctggacctacagaacctgagcaacaccaacgagtccgtggacaatcccatcacccaggtgttcggattcgagtaccaggagtcgggcttgcgggagtccaatctgggcaggcggtctgccaatcagcggagtctggagtggatcagacagaaggacatcaaaacggccatctttggacagccagcggagtgcaatggggatgagtcggttagcgacaattgtcaggtaagcttcagctagagtgatgcgcatccaggtacttattctacatcctgtccagtccgtttgcttcgaggaactgccgccgactcatcctcagccagacaatgtggatgccaatgtgaaggagcagcacgtggaggacgatctgcagtcggcggaggagcaggaacatgatccggacatcgttgagacccaacccgctgtctcaataggcaatgagacctccgccgcgctggaggcccagccgggattcctgggcaagagctcacacggcaccgacgccctgaccaagaagcagaccgaaccggtggtcgcagccaaggacgatcccgtctaccgccttctgcaatccgcctctgggcaggatcaggggccgaaggccgacgagtccgtgctgccgcccttccagctggattgctggagtgtggccagttgcgtcctagcggcccagtacaaccacaccattgacgtggagcagttctgtcccacctcgggcagttccctcaatgtcagctatgtggttccggtatcgcgctatctgcaggccagtagtctggagctccatctgaggttagttgggtacactttatttcattattctgtaacaaatgtattcgaattcggtaagatcttaaagtatcttaaagatacaaatgcagtatgtgtttacatacaaaatcatactgcccttgaacccattcaaagttccattgactcctaatgaattctttacaatcacttattttattaccatctatatccaacagctccaacaagccgctgcagtggtccatctgcgtcgacgaggatcaggccaagccgagtgccaacggccagctgaacgaggatgacgaggccgagtccaccagcggggtgaagatcctcaagcagcagggcaagaacaaactgagcctggccctggatcttcccgcccgcggctacttcctacgggagtttatgctccgcgccagccacgacctggagcaggtgcgttatccggacgcattaacgcgaaatccagcgactctagcctccttttcgttgcagcaaaaactgtgcgacgacaacgctcacccggcaaaccccatactccagtacaactttaggatcgtaagagattgtgattagtattcagcttaatttatggcacggaccgaatctgaactctaaaaccatgtgcgtgtgcagcacgtttcggtgttgcggatgtgtcctggcacctggcgcggaaaaatcgtttgaattaggaaaattcaaaaattaaataatcaaaaactgttgatcagcgagaggaagttgaaaatgcatacatttatacgtatacacaacaaatcatcaataaatgcaaaaaaaaaaaaacaactatcgaccattaaaataaaatatgtagagaaatcttttaaacctgcctttttaattcaattcaagcaatcaaaaacctataaaaatatcttctttcgtcggcctaaccattttataagaaaaccgagaaacatatgtacgtcatattaatgcactttactattaaacaaaggggaaacttaacagataaacgaccggcagagctctaaacggcgaacggctgatccttgccatcctcgtggtacttgatgtatgtttccccgtgggtgaagtccttggttccctccaggcgaccgcggggcggtgccttctcgtagtcgaaggccttctctgacttgccgaacagctggttggccatctcgatgtcctcgcggtaattgcccacgaccaccttcttgccagtgagcgggtccgttatgtcacccagcggatagaccactttttccacgttgtgcgtgatgaggcgggtgaggcgctctggcagttcccgtatcaggaccacgtccccggtcttgcacaccttctgcggatcgtgggcgaagtagaactcgtccttcttaaagtactgcgagcagaagggaaattgtgtgaaatctcctgaggcgagatctaatgtatattatgcacaccatattcaggttcttgtccagctccattcggcgaatgcggatcttggaggcgttctgcttgatgcagggcatgcactggcccattagtaggagtcctcgcctcgacattactttaatttaatttaagagtttagaaa

SEQ ID NO: 6233 - DNA, 4589 bp, DROSOPHILA
tcgaaccgacttggtgcattcgctccgcggatccaatatcgcggttaatcgggggaatcgagagaggcggctagttggcgcgactttagagtcagtgcatcgagtatacggagcgtaaaacaccgactataaccgacatcgacacagtgaagctacagattcgtaaacaatcccagtaacgccgattcgtgcgagtacccaaccgaccaccagacatgctgtagccaccagacaggatgctctgaagtgactcgaatatggaccttgatttcttcgaactctctccccaagatctggatgacataaacagcgatggcatggaccatctggatctgctggtgcagggggctttcgacgatggcatccagctaggccacaatggccacctgtccgctggaggaggagtgcactcacacatggagtcgccgcacacgtcgcccatgaacggcttggatgcccacctgaccaactccggccgcgtgggcagcacgcccgtggcggcacaggcccagagccacgtgcatccgcagctgccggagagtccgccggattcgcagcccgcctacagtccgctgggcgaggcccacgggatggcgatgccgctccagcgagagctaatctatccgggtctggcgcccatgcagcaccaggccaatatgctgcagacggatctgggccagtacgcctcccctccgcagcagcaacaccactttgcagctccgcaggccgatgtgcggatcaagcacgagtccgagctcatcatcaacccgagcaacttgctcggccaacagcaaccgcagcagcagcaaatgcagcagcaacagcagcagctcaacgagcagatgttcgcccagcaccaccagcagcaccaggatagcatcctccaggaccaaatgctctactacgacaatggagccggggcggggatgtacgcgaccggcagctaccagaacctatccacctgcaccctgacttctgccctgggactgggggatcgcgtccaggtgatcggcaccagccagttgtccctgaaccgcgtgtccgctccctcgacgccagtgcactccttgtcgcgcaagcgaaagatgtccacgcagctggattgcccggagttccccagtgctcccaaagtggatgcgggcctgcagatgagtccactgcgcgcctctcaccactcgctagccacgcccactccggcaccctcccactgctccgcctccgtctcgccagctctgtccgccgtgaactcccaggcggacaacagtctggacggacagcccggcggcgtggtcacaggctccggttccggttcgggatcgggctcgggatccggcagcgaggcgggcgacccggcggggggccagtgcattcggttcaacgccttccagccggagaactggcacaagctctttgaccagagcctccaggagctgtctgtgatctactaccgcgtggacgcggacaagggctttaacttcagcgtctcggacgacgcgtacgtgtgccagaagaagaaccacttccaggttacttgccatgcgcgccttcagggcgatgccaaattcgtgaagacaccgtccggcttcgagaaaatcaaatccttccacttgcatttctacggcgtcaagtttgaggcgcccaaccagacgatccgcgtggagcagagccagtcggatcgctccaagaaggccttccatcccgttcccatcgatctccagaagcacatcgtcagcaagatcaccgtgggtcgtctgcacttctcggagacgacaaacaacaacatgcgcaagaagggtcgtcccaatccggagcagcgcttcttccaactggtggtgggtctgcacgtgcacacgatctccgggaacttcccggtggtgagtcacgggagcgagaagatcatcgtgcgagcctccaatccgggtcagttcgagtccgacgtggatctgtgctggcagcgtggtctgaccccagagtcggtcttccacacgggccgcgtgggcatcaacacggaccgccccgacgagagcctggtggtccacggtaacctcaaggtgtccggccacattgtccagccgagcgacagtcgcgccaagcaggagatcggcgaactggacacctccgtgcagctgcgcaacctgcaaaagatccggatagtgcgctaccgctacatgccggagttcgctgtgcactcgggtctccggcgggagagcgacacccgagagatcgaggacaccggcgtaattgcgcaggaggtgcgcgaggtgatcccggacgcagtgcaagaggctggcagcgtggtgctgcccaatggaaacgtgatcgagaaattcctgctggtcaacaaggaccgcatcctgatggagaacatcggagccgtcaaggagctgtgcaaggtgacctgctccctggagacgcgcatcgagcacctggagcgtgccaacattggccaaaacagccagcaactgcgtgccaaggatctgcttgagccgcgctgcatcctgccggagcgagcagctatcacgtcctacggcagtcggcgggacggctacgaggtctgctccagccgctccctgcagatcgtcatcttcctgctgatcatcgtaatggcagcctgcctcgcagcggtgtctactctctactttgtggagcacaacaagcagcagcaggctgacgggttctttggtgccgggatgttccgacaggaggcgggtccaacgcacctgagcgacgaggagcgccactacttccacaacctgcacactctctttaagaacaagacacacggaccctggcctatgcgtcaaatgtacgccaccagcacctcgcgtccgccgggatctcgccaagccgaggaggaggcggaggacctggcggcggtgctgaccaagccacaggtgtcctccggccagcagcagctgagtctcaagcacggggtcatcacgacgacggccccgcgattcagcaacaagaccatcagcagcaaaaagggcaagtggccgcccacccaggaggtgctgcgtcaggcggcgggtcagaaactgcacctacctcagccggtacatgtggttcccgctgctccagcgaaggttcctccagctgccttgaacgacacagtggcctccacggagaagccaccccaggccattcctctgcctcaggacttcgagaacaactccatagacatcgatgcccagcagaagcagtcccagctgaagctggacgagcacatcgtggtggtggggaccatcgccagtcccgcctccgatgcctacgattccaactcaccatccgtcgccgctcatcccattcgcaaattcaatcctggaaccgtctacacccacgtttacaagaccgtatcgcccccaacggccaatctggctctgaccaccaacaaggtgagcactgagcccgcccagagtccactaacacacgctctggatgtgccgcccccggctcttcccgtgagaaacagcagcgacaatcccgatgctctggacctacagaacctgagcaacaccaacgagtccgtggacaatcccatcacccaggtgttcggattcgagtaccaggagtcgggcttgcgggagtccaatctgggcaggcggtctgccaatcagcggagtctggagtggatcagacagaaggacatcaaaacggccatctttggacagccagcggagtgcaatggggatgagtcggttagcgacaattgtcagtccgtttgcttcgaggaactgccgccgactcatcctcagccagacaatgtggatgccaatgtgaaggagcagcacgtggaggacgatctgcagtcggcggaggagcaggaacatgatccggacatcgttgagacccaacccgctgtctcaataggcaatgagacctccgccgcgctggaggcccagccgggattcctgggcaagagctcacacggcaccgacgccctgaccaagaagcagaccgaaccggtggtcgcagccaaggacgatcccgtctaccgccttctgcaatccgcctctgggcaggatcaggggccgaaggccgacgagtccgtgctgccgcccttccagctggattgctggagtgtggccagttgcgtcctagcggcccagtacaaccacaccattgacgtggagcagttctgtcccacctcgggcagttccctcaatgtcagctatgtggttccggtatcgcgctatctgcaggccagtagtctggagctccatctgagctccaacaagccgctgcagtggtccatctgcgtcgacgaggatcaggccaagccgagtgccaacggccagctgaacgaggatgacgaggccgagtccaccagcggggtgaagatcctcaagcagcagggcaagaacaaactgagcctggccctggatcttcccgcccgcggctacttcctacgggagtttatgctccgcgccagccacgacctggagcaggtgcgttatccggacgcattaacgcgaaatccagcgactctagcctccttttcgttgcagcaaaaactgtgcgacgacaacgctcacccggcaaaccccatactccagtacaactttaggatcgtaagagattgtgattag

SEQ ID NO: 6234 - protein, 1423 aa, DROSOPHILA
MDHLDLLVQGAFDDGIQLGHNGHLSAGGGVHSHMESPHTSPMNGLDAHLTNSGRVGSTPVAAQAQSHVHPQLPESPPDSQPAYSPLGEAHGMAMPLQRELIYPGLAPMQHQANMLQTDLGQYASPPQQQHHFAAPQADVRIKHESELIINPSNLLGQQQPQQQQMQQQQQQLNEQMFAQHHQQHQDSILQDQMLYYDNGAGAGMYATGSYQNLSTCTLTSALGLGDRVQVIGTSQLSLNRVSAPSTPVHSLSRKRKMSTQLDCPEFPSAPKVDAGLQMSPLRASHHSLATPTPAPSHCSASVSPALSAVNSQADNSLDGQPGGVVTGSGSGSGSGSGSGSEAGDPAGGQCIRFNAFQPENWHKLFDQSLQELSVIYYRVDADKGFNFSVSDDAYVCQKKNHFQVTCHARLQGDAKFVKTPSGFEKIKSFHLHFYGVKFEAPNQTIRVEQSQSDRSKKAFHPVPIDLQKHIVSKITVGRLHFSETTNNNMRKKGRPNPEQRFFQLVVGLHVHTISGNFPVVSHGSEKIIVRASNPGQFESDVDLCWQRGLTPESVFHTGRVGINTDRPDESLVVHGNLKVSGHIVQPSDSRAKQEIGELDTSVQLRNLQKIRIVRYRYMPEFAVHSGLRRESDTREIEDTGVIAQEVREVIPDAVQEAGSVVLPNGNVIEKFLLVNKDRILMENIGAVKELCKVTCSLETRIEHLERANIGQNSQQLRAKDLLEPRCILPERAAITSYGSRRDGYEVCSSRSLQIVIFLLIIVMAACLAAVSTLYFVEHNKQQQADGFFGAGMFRQEAGPTHLSDEERHYFHNLHTLFKNKTHGPWPMRQMYATSTSRPPGSRQAEEEAEDLAAVLTKPQVSSGQQQLSLKHGVITTTAPRFSNKTISSKKGKWPPTQEVLRQAAGQKLHLPQPVHVVPAAPAKVPPAALNDTVASTEKPPQAIPLPQDFENNSIDIDAQQKQSQLKLDEHIVVVGTIASPASDAYDSNSPSVAAHPIRKFNPGTVYTHVYKTVSPPTANLALTTNKVSTEPAQSPLTHALDVPPPALPVRNSSDNPDALDLQNLSNTNESVDNPITQVFGFEYQESGLRESNLGRRSANQRSLEWIRQKDIKTAIFGQPAECNGDESVSDNCQSVCFEELPPTHPQPDNVDANVKEQHVEDDLQSAEEQEHDPDIVETQPAVSIGNETSAALEAQPGFLGKSSHGTDALTKKQTEPVVAAKDDPVYRLLQSASGQDQGPKADESVLPPFQLDCWSVASCVLAAQYNHTIDVEQFCPTSGSSLNVSYVVPVSRYLQASSLELHLSSNKPLQWSICVDEDQAKPSANGQLNEDDEAESTSGVKILKQQGKNKLSLALDLPARGYFLREFMLRASHDLEQVRYPDALTRNPATLASFSLQQKLCDDNAHPANPILQYNFRIVRDCD

SEQ ID NO: 6235 - DNA, 9321 bp, DROSOPHILA
ggctgcaactggtttgtgcgtatatggattgttgaatatgtattttaatttgtcatccgttctgcatgggctgcttcgctgccgcccctaattaggctattataaaccccctctctcctaaaaaccctcaccacaacctcccgcagtcagcaagacgccctaagaaatgctggatataatgaaactattttataattaagataatttagctgtacagttgtttagaatgtagtaaaggctagcgcttaaacatttagtaaacaggcccgttcgtacatccataaaaacacccattcatccaagcacactggcataatcacctctggctgaacgcttcactggagagcagttggcaaggcggatgggccagaagtgagcgtttggacggatcacataggcacacacacatgcctcacacatgcattttaaaactgcatatatatacctagcttatgtaattgctgtcgagtaaaaagtgtgtaattatcttaccaagcagcataaaatttagagacgctgatcggcgctcgtattcattagaaatctaatgaaaatatatttagttttagatatatatgtatgagtcgcagccaccacagcaaaattaacttaaatcttgaaatgtgtaatagacaaacaataaaactagcatatgtatttatggcttaaatgttaaaacatctgctcttgtgcttgattatggaaaatgtaggtcatgcaaacgtcaactcactcggatattcaaacactcgatcaattgatcaatttggttatcaagtggtctgcgcccaagtggaattctaaagacctattggcgtggtatgtgattgaattttgaaattggctgtaagagcagttgtaataccaataatcattgggaaaataattcctcttatacaatgtataagattgtacattgaaattccgctgggttggaattttggaaagtgccttgcccacggccaagagagcgtcagtgcaatcaaaccactttgtggttaattattgattgttgtgtatttaattgtctggaaatcaaaggcttacaactagtcaacacaaacttacgaaacttctcgctaagttacactatgcctagggctaatactaggtggtaggttatgctagttaactatataatacgtggtgcgggataaattcgctgcagatctggtttggggacacgtccaccgggtggtcgtcctatttgcccacctccttccaatggacaatagcgcgctgctcgtccggtgcatcgccgaatggacggctgccgtcggagtgcacgtactcgttcacctggaagttgagaagcgtcttatagtggtagacatccgccagctgctgcgtcagcggactggtgttggtggtgaagatgccggcgaactgcttctcgcgggccacccgcagaacctcgtgctccataaagtgcatgcaggcgatgttctcgcggggattcaacttctcggcggtgcccatcatgaacgagtgcaggatttggttgagacccttgggcaggtagttatccctgttgaaggctccaagtgagcactcggcgcatggcgtgaaggatttataacttacctgatgggaccctcgcaaaactccagaaactcgaagacaatgagtagcttggacttgatgtccacctcgggctcgttgcgcgcatcaaagttcaacgctgtgccaataatgcgatccgtgttggtatcgtagaccacgaaacttaggtcccgctccaccagcacattccagatatcctatccggcgttacaatgaaggaaatgtatccagttgaagtagtaagatttagttactcacgttcagtatatcgctgtagtcggttctcaaaactccgggcttgagccactgctccaggtcggccttgttatagaagctagccacaataatgctaaaacgggtgtcacaccgattagtaattccacttccggtcgagctttggctagtaagtactcactcgatgacttcctggcggtgctccaggcgtagcggcaccgcctccatcttcagatgcggacaagcattcaaggattcctcctctagctgcactgcatcatggttggccgccatcttctcgatgatctcgcccagattcttggccgcaatgaattcggaaatgccgatgttgtagcccttctcgcgcagcagcgtcaccgtgaaaatggaattcaacgagttgccgcccagctcatagaagttactgtgcggagcgagggttgctctggtggagcgtccaatcacgccgcccactgtctcgaagagatcccgtgccgttagctttagatcctcaggaacctgcgagtagtcaaagtccagaacgatactggagtcaccttcgttgttattggccgtctcataggttttgagcagcgcctggcgatccaccttgccgttgaccagcaatggaacgtgctccaggatgaccacctgcggcgtcatgtaatcggctagcttgtccttgagacgagcctccatctgcatctcggtgaccatgggggcatcatcgcgcagcttgacgaaggccagaatagcctgatccacctgaccagcatggtagcacagaacaatggccttatccaccagcggcagctcggccacgttcttctccacttcggacaggtcgacgcgatgtccacggatcttcacctgagagtcggtgcgtccctcgtacatgatgctgccgttcttcagggatccatagtctccagtgcgatacaaacgggcgtattctggagaggtaaagtcggattaagtaataataactaacttgaatgcattttgaaatgtattcagaagatatcagatggacaacttactcttctccacagctaaaggattctccaagaacctctccggatcgcgtccgttaacataaccagcggccaagttgagacccgaagcaaagatctccccaatctcgccgttcttcaccggacgatagtcggcatccaacaaatagaccacggtattcgacagtggaatgccttcaggataagagatcatgggttatacacgacatggaaattttagaacccgagtttaaggctcacctatgggcacattatcgtacaaactcagttgcttcttgctctcgcacgcaaagtaggtgacatcgcccaatacctccgtggatccgtaaaagttgtacagccggtgcacgccctcatcgaaatagtcgaagaagctgctggccagggaaacggataggggttctccggagcagacccaaatctggagattgtacagcagtttctgagcagctccgcctccctccatcttcagatacatgagcaacgagcgcagaagggtgggcaccagtacgagacgcctgatcttataacgctccaacagggccaccaatcgctggggatccttggtcactgccttgggcaccaccagaatggccaggccacacattaacgggccccatagctccgcaatcgagtccacgaaggttagggccgtcttgaaaacgctcaccgcctcgttggcggtgtacggaaaggtcgcccactgccactggagccgattgaggatgctctcgtgcggcagacgcactcccttgggcacacccgtactgcccgaggtgtagagcacgatggcgatgtggtcgttgccaccgcgcagcatctcctctgagagcagattggagccggccagctggagggatttggcatacagttcggtggtggataacgtgggagttccctggaaacggccggcgtcgatgtcatcgtcgcgaatcaccaaggtgggcttcgcctccagcagtatgtggtgaatgcggttcgccgggaagctgggatcgatgggcaaatacgcgccgccagccttccagatggccagcagtgtggtgaccaatccctccgacggctgcatgcacacagccacgatgaagtcaccatcgctgtttggctgcaggaaccggccgtgggtctcggccaccaggaggcgggctgcccggttcgcacgctcgttcatctggcggtagctgctctgactgggcgccattccctggcccgtagtgctgggctgatagatcagagccaccttgtcggcatgccgcagctgctgctcctcgaagatgcggtgcagagctctaggcacgaagtcttgctgcagacccttgacgatcgacaattgtggcagcgaacccatcttgaagatatattaactgtggggaatactttgttagttttgggcttagaatctcagtcggagaatccctaggttacatcatcattcccagctcgtattatgcaatgcaggctaatgccttgctgccttgcggtagcaattaaattcattcatacatgcatatttataacacttcgtgttaatggagcgctcgcacaataaactattataatgaatgagtatgaatatgggagctggcttaaacggatggcttctgttgagctatatttattcaattaaattgctgtctcttaagctgcagagattgcaagttcaagtaaactggaattcgatattccatgttaatgacttgataattaagggtttcagggtaatacgattttattaatgttttattatttatatcagtacttaagaatagccttatggaaatagttggaattcttatttctcgctaaatggcgtggagtataaagactcattcattttattttcagtaatagttaagttagtttttcttctttgcgactaaacgcttagcaacaggcacatgttattttaaattatggcgacatttttatctattcgcttagcaccatatttttccctaacctatcagtcatactttcattacaggtttgtctaataggagactagagagctccttaactttagtaaatattacttaatgcattagcatagccacctgcttgtcgttactaattacggtcagtttaatctatgtgggcttacactatgaattgagatgtgttccggctttgaaaatccacgtttacattgccaggtatttattcctaaaaaaatgtgccttaaaaataaaaataataattttcgagttttgaataacctagctccataaaatgcctcatcttgaaggagttacgctggctcaactgttgtatctcggacattggacttggccaaaagcctaaacaagcgctcggaatgcggcatgctaactcgttaattgcatggagctagccaattgccagaggcaccagtcgctgtcccattttacgtgacgccataaaacgctggcgaagattggtggaggtctttgtgctgctcatgctcgttaagttccattggcgtgttataaaactcagcaaaaatgtcattgcgccgaccacttctggtctactacctgtatctgattctgcccggctccaatgtcaagcgctctaatccaaaacatgaagacaagctgccgtctggaggcccaagaacgacaattacccgtgccatacccctggccttagcaaatgttaatctctgatttggtttgaaaatttgatttcattagatttgaggcctcgttgaatgacttcgatcggggaagtggagcagttgagcgggcgttggcgctgggaaaggcaaggtagtcaggaagcttctttggggcagtgcgctatgaattatttatttgcttccgcttcttctccagccgaggaggaaatgttgtggaagtttaagtgaagggtggatgtcgaggtggagatggttgtggtagcttgttgtaaccatcgcggctggggagctcgaaacaagttatacttcaattgcgcaactttagagctgaaaatgcgccgcctggcttctgggtctggttttcggacttgcttggttctgattctcgactggcatacatttttttggcagccaagcaatttacaacggtttacggggcgtatacgtaacgaattcaaggctagtcttaaatcatttcccaagcgcccattacgtatgcgccgtgtgagtccaattagtttgttcacttgcatagacaacctgcactatgtttgcccactatatatgtatagtactacatgtgtatttatttgagcatatatagtatgcaagctagtactatactatctgcatacaatgctgacgcagtccattgttttggtcccgccactcgagtgcattcttgagcccctttggttcttggcatttcacatcatcgattaaatgcatccagcgacttctgttctgttcaccttcgctgcttctgttgatgaggtgaaatccatgcggctgctttagtgttattacttttgcccctattgccattaaatcaacgaaaacaaaccaaatagccagcattaaaacctagtagcagcgcaatcgaaaagcatttaagaccgccgcagtacgacgagtgctgctaataattttccgaccaaggttgcatttgcgttagatcgttttcagttgggcttggaggttctggcgcttttggaaaatcgttccataattatcagcctgccatgtaatctgtaatttacataattattggccgggttgaaagaccgtttgccagtggctgtgttggctgttgcacttggcggatcaacaacattgcctaaggtcgcgtggtttatctagtatcgcaaatgtttccgctggtagtaattccgaagagtgtggctaattaatttgtcgaaccgcagtgggaggcggtcgttggaatcaaaacacaacagggctctatgctgaagtccactactgttcattgattgaatgtattattatgtcttttttctgccggcactgatttgcctaattgagtaaaaagcgtctaatttaagcggtgctgcggtgccccaccattgcatctgcacggctttgttgggggtcgtcccggtgagtgtgatctgtttttttgtctgtgctgggtttttttctctgttttccccaccgccgctgccgttttccgcagtatttccgattgtgagtcaattggatgacaagctcgtattgtacgagtatttggaaaagaacaaaaccgcactcaagaccagcaaacggtcaaaactaacgatctcggccaagtgccttacgtcaatgggggaatcagttggcgagctcattaacgagccaagttcaagtcggcgaatgcaaattgtgcaccataaaaagcacttgtaaacgatatgcgacactcgtttagcacatacttaacataattaatagccgatcgctttggccaatgactcaattgcaattataaatccatcactgctggctaccgtcaataagtatacgccgcgttggccgctcttaataacaagcgttttactaagcgctccaagacaaattaaatgtcatttgctggttacttatgccagcctttagtatgtcgatggtggtttgtagtcaggcgctaaacgctgagaaaacaatttggtattctgagaaaagaaggtcttaagtccgagtttaagagcttcgttaatcactgaactaatgcaatgcctcttctgacctcgccgcgcctcgaattctggttgccttttgcatttggagtgcattcccaaggaacgagccgttaggcgaatccagtttccttcttgagtttagaactcgtttacttcctcaaaacgatttcgttagaaaaactggtcttctaatcgcgcctttcaaatcgaagtattagaaatcctgctacttaaaaaactttagtttggaactaacaacgatttgaggacttccttaaagtcataattgtttggccattgtgacaacgaaaaccttagcccacaaaaatgtcgacgtcgagtgaagcgaggtgaaaacaatttgttgaatccattaatttatgcttgaaactaattacatttttcgtcgttctgcttttttgtaatattctcagcttaatgaattttatgtaatttctgtcggatgtgaagtaagtttcgttatatacgaaggaacttaattcggccattaaataacgcgagaaatattttgttaactgctcctcagcatgcatgtcaagtcaatttgcacattaatttcgggaaagcgagtttgccgaatctaaataaatacttgataatcacgtaatacgtaccgtgggtaataacaaattctgacactggattttttgaacaggttcttgatttcctttttcaaatgtttatctgtggccgtttcacactaagcacgtttttcttgaatttgattttccttctatattttcaactatgagagagtgagtctaccagctttaaacttctttttctggtcacttcacttagcgtttcactttgattttggggggcacccaaaaaacttgcaacgcactcgggaaactcaacgtgctatgtacttgtaaacggcgctcgcagactaatcagaatcccagcccccgactatcttatatatccgaccgatccgccgctgccgcagtcgccgccggcagcgcagtcgcattcggctggcgaagaatgactgaaaaaaaaaaaccagttcctgctcttacagcccctgcaattaccgctcgcagcataccacacatacccatatgcgggcgctcagtgtgtggacgccggattagcattggtaccgctttacttggctcgccattttttagcggaccgccgagcggtgacgtaggaaatgaaatggaatgaaatgaaattccccgccgtcccctcactcactaattggcaggcgaattgtacactttgattactacttttctgccaaccagaccatttggaaatccctcgagtgacacacacagctcacagcggattggggaaggtgagatggccactgcttacgcgtaggtggaaagatgatttaaattagtcctccttttaagcaggagctaacaaacaatactagtaattaagtgatatggtagtacttttagggaaatctaggaaaaagtgcgtccctcttagctatacaatgaaactgaaactgagaattattatgtattagtattgataaagtttattaaggtatgtaaatatttaaaattctgaagcaaatgttggatttaagtgcacagcctatattatttccgcactattcggattttactattccacatgaactggtattagaatttaatagctagcaaagcttctaaaaatggtcgagtttatggccaagagtagtggctattgtagcattaacttcgcaattgttagtagtaggttgttagtactcgtgcgaaagtaaaatcgcattaaaattggaatttcaaatcgatcgaggatcgcagtcgctgcaatttgtagttgtcagttgggcagatcggtgttcatacatatcagtggatttgtgagagggattgcatttgctaacatatgccagccgtcatgt

SEQ ID NO: 6236 - DNA, 3108 bp, DROSOPHILA
tttacaagtacatagcacgttgagtttcccgagtgcgttgcaagttttttgggtgccccccaaaatcaaagtgaaacgctaagtgaagtgaccagaaaaagaagtttaaagctggtagactcactctctcatagttgaaaatatagaaggaaaatcaaattcaagaaaaacgtgcttagtgtgaaacggccacagataaacatttgaaaaaggaaatcaagaacctgttcaaaaaatccagtgtcagaatttgttattacccacgatgggttcgctgccacaattgtcgatcgtcaagggtctgcagcaagacttcgtgcctagagctctgcaccgcatcttcgaggagcagcagctgcggcatgccgacaaggtggctctgatctatcagcccagcactacgggccagggaatggcgcccagtcagagcagctaccgccagatgaacgagcgtgcgaaccgggcagcccgcctcctggtggccgagacccacggccggttcctgcagccaaacagcgatggtgacttcatcgtggctgtgtgcatgcagccgtcggagggattggtcaccacactgctggccatctggaaggctggcggcgcgtatttgcccatcgatcccagcttcccggcgaaccgcattcaccacatactgctggaggcgaagcccaccttggtgattcgcgacgatgacatcgacgccggccgtttccagggaactcccacgttatccaccaccgaactgtatgccaaatccctccagctggccggctccaatctgctctcagaggagatgctgcgcggtggcaacgaccacatcgccatcgtgctctacacctcgggcagtacgggtgtgcccaagggagtgcgtctgccgcacgagagcatcctcaatcggctccagtggcagtgggcgacctttccgtacaccgccaacgaggcggtgagcgttttcaagacggccctaaccttcgtggactcgattgcggagctatggggcccgttaatgtgtggcctggccattctggtggtgcccaaggcagtgaccaaggatccccagcgattggtggccctgttggagcgttataagatcaggcgtctcgtactggtgcccacccttctgcgctcgttgctcatgtatctgaagatggagggaggcggagctgctcagaaactgctgtacaatctccagatttgggtctgctccggagaacccctatccgtttccctggccagcagcttcttcgactatttcgatgagggcgtgcaccggctgtacaacttttacggatccacggaggtattgggcgatgtcacctactttgcgtgcgagagcaagaagcaactgagtttgtacgataatgtgcccataggcattccactgtcgaataccgtggtctatttgttggatgccgactatcgtccggtgaagaacggcgagattggggagatctttgcttcgggtctcaacttggccgctggttatgttaacggacgcgatccggagaggttcttggagaatcctttagctgtggagaagaaatacgcccgtttgtatcgcactggagactatggatccctgaagaacggcagcatcatgtacgagggacgcaccgactctcaggtgaagatccgtggacatcgcgtcgacctgtccgaagtggagaagaacgtggccgagctgccgctggtggataaggccattgttctgtgctaccatgctggtcaggtggatcaggctattctggccttcgtcaagctgcgcgatgatgcccccatggtcaccgagatgcagatggaggctcgtctcaaggacaagctagccgattacatgacgccgcaggtggtcatcctggagcacgttccattgctggtcaacggcaaggtggatcgccaggcgctgctcaaaacctatgagacggccaataacaacgaaggtgactccagtatcgttctggactttgactactcgcaggttcctgaggatctaaagctaacggcacgggatctcttcgagacagtgggcggcgtgattggacgctccaccagagcaaccctcgctccgcacagtaacttctatgagctgggcggcaactcgttgaattccattttcacggtgacgctgctgcgcgagaagggctacaacatcggcatttccgaattcattgcggccaagaatctgggcgagatcatcgagaagatggcggccaaccatgatgcagtgcagctagaggaggaatccttgaatgcttgtccgcatctgaagatggaggcggtgccgctacgcctggagcaccgccaggaagtcatcgacattattgtggctagcttctataacaaggccgacctggagcagtggctcaagcccggagttttgagaaccgactacagcgatatactgaacgatatctggaatgtgctggtggagcgggacctaagtttcgtggtctacgataccaacacggatcgcattattggcacagcgttgaactttgatgcgcgcaacgagcccgaggtggacatcaagtccaagctactcattgtcttcgagtttctggagttttgcgagggtcccatcagggataactacctgcccaagggtctcaaccaaatcctgcactcgttcatgatgggcaccgccgagaagttgaatccccgcgagaacatcgcctgcatgcactttatggagcacgaggttctgcgggtggcccgcgagaagcagttcgccggcatcttcaccaccaacaccagtccgctgacgcagcagctggcggatgtctaccactataagacgcttctcaacttccaggtgaacgagtacgtgcactccgacggcagccgtccattcggcgatgcaccggacgagcagcgcgctattgtccattggaaggaggtgggcaaataggacgaccacccggtggacgtgtccccaaaccagatctgcagcgaatttatcccgcaccacgtattatatagttaactagcataacctaccacctagtattagccctaggcatagtgtaacttagcgagaagtttcgtaagtttgtgttgactagttgtaagcctttgatttccagacaattaaatacacaacaatcaataatt

SEQ ID NO: 6237 - protein, 879 aa, DROSOPHILA
MGSLPQLSIVKGLQQDFVPRALHRIFEEQQLRHADKVALIYQPSTTGQGMAPSQSSYRQMNERANRAARLLVAETHGRFLQPNSDGDFIVAVCMQPSEGLVTTLLAIWKAGGAYLPIDPSFPANRIHHILLEAKPTLVIRDDDIDAGRFQGTPTLSTTELYAKSLQLAGSNLLSEEMLRGGNDHIAIVLYTSGSTGVPKGVRLPHESILNRLQWQWATFPYTANEAVSVFKTALTFVDSIAELWGPLMCGLAILVVPKAVTKDPQRLVALLERYKIRRLVLVPTLLRSLLMYLKMEGGGAAQKLLYNLQIWVCSGEPLSVSLASSFFDYFDEGVHRLYNFYGSTEVLGDVTYFACESKKQLSLYDNVPIGIPLSNTVVYLLDADYRPVKNGEIGEIFASGLNLAAGYVNGRDPERFLENPLAVEKKYARLYRTGDYGSLKNGSIMYEGRTDSQVKIRGHRVDLSEVEKNVAELPLVDKAIVLCYHAGQVDQAILAFVKLRDDAPMVTEMQMEARLKDKLADYMTPQVVILEHVPLLVNGKVDRQALLKTYETANNNEGDSSIVLDFDYSQVPEDLKLTARDLFETVGGVIGRSTRATLAPHSNFYELGGNSLNSIFTVTLLREKGYNIGISEFIAAKNLGEIIEKMAANHDAVQLEEESLNACPHLKMEAVPLRLEHRQEVIDIIVASFYNKADLEQWLKPGVLRTDYSDILNDIWNVLVERDLSFVVYDTNTDRIIGTALNFDARNEPEVDIKSKLLIVFEFLEFCEGPIRDNYLPKGLNQILHSFMMGTAEKLNPRENIACMHFMEHEVLRVAREKQFAGIFTTNTSPLTQQLADVYHYKTLLNFQVNEYVHSDGSRPFGDAPDEQRAIVHWKEVGK

SEQ ID NO: 6238 - DNA, 4308 bp, DROSOPHILA
agacccttaaaatttcagatttcggcctttccaggcacggaatttacacgaacacaaggacccgaaaggtaagctagttagatacattactctaggtatttcctcaacgtaagaacttgaagtaaatagttcaggacttacattgtttatctcttcgcttagctccctcttcgatggctgtccattgaggcgattcgcgaaaatgtctattccagcaagagcgacatctgggcctatggcgtagtgctctgggagatcggcacccttggcgcctcgccatatccgacgatcagcaacgacgagctaataccattcctgatggctggcaatcgcctcgagcgtccagagatctgcactccgcaggtgtacaccatcatgctgcagtgctggcttgaggagcccgaggagcgacccaccttcgacgccctgtacaaggtgctcagtccaaagactacctacgtggacatcaacagtctgagtgatgattacgtctttccgccgatcagtgaaaatagggaataagctcgcgtagacctcctcctactgagaatatactttatatgtcctcaatcgttagttgctagttatggaacgtccttgttcgttaattgttatacgattatccgaagtgtacaaatatctccgtctgtgtgtgcataatgcagagtttaaaatgtgccggaacaaagtttgaattaagtacaacttgagttagtgtttagtcagtaggctttagattgtcggcacagtgtcggtataactttacgtgcgaagttttccaagctgtgtacacattaaggtagttaaggacattaaacggacttcacagtctgtcacaatccgtatacgaacgtaattttgatgtgctgtgagatttaaacgatggaaatatattgaaattaattgtatttcatattttattgttagtctttattaagcgtttattcgttacttcagagtattaataaaattcaaaagattaccgtttctctgtctgtttttaatgccggacgccgtatatttcattccaggcttcaaattgtttgcagtcctccgaggagacgcttttagatataacacgcaaagcctgcttgaaatcatccatagttacggcaggcagctaaaaacataacaataataaacaagacataaatatccccactatttaaagtcgctttggctcaacgaagcgataattttgttattggatgtgcagattcacggaatttaataagtatccttattccgcctgaaaaattcccagcacggtccaggtactttctttgtattcaattttgagcgactagtgcacgacataatttacaagcaagtaaacaacagtgcatacctgatgcgtttctatgacctccatttggtcaggtgtcaaggagcgaaggggagccatggatgcatagcggcaaagcgtatccacatcagctccagaatagccatcggtaagctctgccagctcgattacttgcctaacatctaggttgtgcttcacctgatgaattaacttttctatgattttctggcgtgcttcccttgtgggtaagggaacgtacagacgccttacaaatcgacggcgcacagcctcatccagttcctgcggtcggttggtggctcctattaccagcactcgtatttcctcattactagcggcaccgtccaagtgaatgagaaactcgttcttcaggcgtagagtgctctcgttttcgttcgcagaacgtttggacagcagggaatcgacctcgtctatgaatattatctgaaaggcataacaagtttattagctacaaattgcaagtcagtttagtaaagttatcttgcaaaatctattaggttaattaaggtttaaaaatggtgaaatgctcgtgaaatgtttcacctacagccggttgatgtgcagcggccacggcaaacaatgtcttcaccagcttctcggcatcgccgacccactttgaggtcaggctggacggattaatgctaaagaactttgcctttgcctgggaagcaatactcttggcaatgagagtcttgcctgtgccaggtggaccgaacaagagaacgcctcgtggtggacaccgcactcctgtgaacaagtcgggccgccggagtggcataataatggcttctaggaatgtggattttgcagattccagaccggcaatatcttcccaagctgaaatcggtgaacaggaattttatgaacagaacggccagagggaccctgtttaattactaccataccgacaggcttgaaatcgtgcatgctttcgccgagaatgtgatccaccatcttggaatccaagtgggccaatgcgggtggtatgctgctgctccgtctgtagggaattggatacaatgaaatatgctaggcctgtgaataattgcacttttctcacgagctggtggaattatcattttgcgcaacgggcgagacgaagttcgagctcacagttcgcttgccacccagcgtttttttcctgaagttcatcatgccggttgggactgcatccacttcgcttgtcgcctgtcgattctttttctgcaatattggaaaataaagcccatagagtttcacctaaaacgctttaaagtgctagttctaggaaaatgtattctaggtcttcagaatccgtcgtccagagtgtccatctcgcctcaaacaaacctttaattcgtccatgattagttgctcccgggcagtgcgaaagccaaagccgctttgggatgagctctctgacgagtactgttgcgcatctatcttctttgtggaattattcctcgactccgggaactgcccctccggtctgctcttaacggcctgttggaccgggtacgtgcttgaaacttccagcgccggagcctgcagatcactggaggccatctctgtttgctggcagctctcgtagaagcccctacactctggctcaaaaactgagttgtggggcatctcgaacaagtagcctgcatgggtaatccctcgtttagtcctgcgactcatagttatttttttctgacagcgctccttcatcgccttctccatgctttcgcaagcctgcagcctagcatggtgatccttgagcgcagcaaagtggatggactcgctgctggatctgaagtgagacatgtgagtcctttaggatttcaggtaagaataatatgtaaaattaatgctacctggtttgctggcatatgaggagcagcttggaacgccacgaactctgttcgtcgctcatgttttagcaattctgtttacaacgttctgtttagtttttgaacaaaattaaaaagtaaaactcccggcaaatacagcaatcatctgtttagccaagtttcagccaagatcgctggtatcgttatcgatatactgttacagcatgtttccacttgtttgcagtacttccaatcgttaatcaaattgtaagcaaatcgttatcacatgtattgtggttatcgagttcaaaattaaaataaactttaagattatttattttgttatttatgctcgctttgtatattcatttttatattttttagcttctttatgctttttctctttagcctttcagttaaattgtttcttccaattaatgttcaattgccttcaattggttcgcttctttttaattaaaaagcattgtgtgccaccctcagatttcactataaacaaaactagctgccacggcagacgtcctcagatcttatcgccaaatcgttctgtatgctcacgttgggcaaatatatatctgcatattgctcatcccggccatctcaactacacgaaaacacgtccggacacagtctacggccgtttcgtggccggtggatagggttcaactggtggcgcatagtagcgttgttatctctggacgagggttagataaaggcaccgatgccatgcccataaataccccacagcatccattaactgattctcatttcagcagtcagtgcagtgaattgcaggtgttttcccccaggtttcctcattggattttggatacagaagctatataaaaatgtgcctgcccaaaagagtgggtggtccggccatccagagtgttgccacggctttaggtgagcttcacaggattgactcttgctttaagagaaagaagtagtttcagcacaaattgcatactaatattagtattagttggccactagatgtgcgctctactctctctgtacgtaataaaatgctccaatgttttttttttttaccccattccaggcaacattctctgctttaactttggcctcatgtttgggattactccggcgcacatgacgctttacgag

SEQ ID NO: 6239 - DNA, 1500 bp, DROSOPHILA
cgggagttttactttttaattttgttcaaaaactaaacagaacgttgtaaacagaattgctaaaacatgagcgacgaacagagttcgtggcgttccaagctgctcctcatatgccagcaaaccagatccagcagcgagtccatccactttgctgcgctcaaggatcaccatgctaggctgcaggcttgcgaaagcatggagaaggcgatgaaggagcgctgtcagaaaaaaataactatgagtcgcaggactaaacgagggattacccatgcaggctacttgttcgagatgccccacaactcagtttttgagccagagtgtaggggcttctacgagagctgccagcaaacagagatggcctccagtgatctgcaggctccggcgctggaagtttcaagcacgtacccggtccaacaggccgttaagagcagaccggaggggcagttcccggagtcgaggaataattccacaaagaagatagatgcgcaacagtactcgtcagagagctcatcccaaagcggctttggctttcgcactgcccgggagcaactaatcatggacgaattaaagacggagcagcagcataccacccgcattggcccacttggattccaagatggtggatcacattctcggcgaaagcatgcacgatttcaagcctgtcggtatgcttgggaagatattgccggtctggaatctgcaaaatccacattcctagaagccattattatgccactccggcggcccgacttgttcacaggagtgcggtgtccaccacgaggcgttctcttgttcggtccacctggcacaggcaagactctcattgccaagagtattgcttcccaggcaaaggcaaagttctttagcattaatccgtccagcctgacctcaaagtgggtcggcgatgccgagaagctggtgaagacattgtttgccgtggccgctgcacatcaaccggctataatattcatagacgaggtcgattccctgctgtccaaacgttctgcgaacgaaaacgagagcactctacgcctgaagaacgagtttctcattcacttggacggtgccgctagtaatgaggaaatacgagtgctggtaataggagccaccaaccgaccgcaggaactggatgaggctgtgcgccgtcgatttgtaaggcgtctgtacgttcccttacccacaagggaagcacgccagaaaatcatagaaaagttaattcatcaggtgaagcacaacctagatgttaggcaagtaatcgagctggcagagcttaccgatggctattctggagctgatgtggatacgctttgccgctatgcatccatggctccccttcgctccttgacacctgaccaaatggaggtcatagaaacgcatcagctgcctgccgtaactatggatgatttcaagcaggctttgcgtgttatatctaaaagcgtctcctcggaggactgcaaacaatttgaagcctggaatgaaatatacggcgtccggcattaa

SEQ ID NO: 6240 - protein, 477 aa, DROSOPHILA
MSDEQSSWRSKLLLICQQTRSSSESIHFAALKDHHARLQACESMEKAMKERCQKKITMSRRTKRGITHAGYLFEMPHNSVFEPECRGFYESCQQTEMASSDLQAPALEVSSTYPVQQAVKSRPEGQFPESRNNSTKKIDAQQYSSESSSQSGFGFRTAREQLIMDELKTEQQHTTRIGPLGFQDGGSHSRRKHARFQACRYAWEDIAGLESAKSTFLEAIIMPLRRPDLFTGVRCPPRGVLLFGPPGTGKTLIAKSIASQAKAKFFSINPSSLTSKWVGDAEKLVKTLFAVAAAHQPAIIFIDEVDSLLSKRSANENESTLRLKNEFLIHLDGAASNEEIRVLVIGATNRPQELDEAVRRRFVRRLYVPLPTREARQKIIEKLIHQVKHNLDVRQVIELAELTDGYSGADVDTLCRYASMAPLRSLTPDQMEVIETHQLPAVTMDDFKQALRVISKSVSSEDCKQFEAWNEIYGVRH

SEQ ID NO: 6241 - DNA, 3374 bp, DROSOPHILA
tatttcgattgtctgcgcgttgcattatttttagagtggccataaagccggtcgatttatgatcgtcggtcaggagccgttcaaattatcgcagggcatgcaaaatttattaacaaacataaaaattgcccgagaatttatttcatcttaattcaatttaacaacttaaacagccataaagtgttcacatagtaaatcaatggccactctatgcagatgggctgctgcccagtcctgtccacatgcatcatcatcataatcataatcgaggtgctggctagggactctatatacacactctatactccaagctccatgcttcatgatccatgctccttgctccgtacgtactacatatctagtcccccattccctggcggaatttatgagctgcgcatgaaaatgagtcaaaacaaattatgccgctcgcaggtttttagccaacttggtcctgattgacagcgactgcagttcgactttcgactggacgagcagtcggcgttggattggtggatgggggttttttgctgagcgattatgatgtgaacgctgccaaaaagatttccatcagcggcaacaatttcgaggcattaatcatggccgtcaagtatgagggtgggtcccatggagttctacccaaaagtgccacaaggtggagcaatgccgccgaaggaatgctcctcgattcctcgattgcctgattgcgatctccgccggatgcgacaggcatttaaatcgtacgcagagaggattatgaagaggttattattctgggtagccgaacatttagttgtggctcttcattcataaatcaaatgtttttatctcgcaagccaaataacttactgctttaagttgttcatataagtaatattatgtatgttaaacgaaacagacttaaagcatttgatggatttatttgctgtgaacttcttttttcaataatttagaataacttaggaatgaggcaaggaaatgagtttttttttagccaaatgatctaactctggcagtagcagccgtcggcggtgttcttacggatccagtccaggaacttgctcaccctggcgtagacacccggcgcattcttctgtgcacatccgtagccgaaggacaccacgccggccagcttgtagcgaccctcgttgacgatcagtgggccaccactgtcgccctggcaggcgtccttgccaccctgctgcaccaatccggcgcagagcatcacctcggcaatcttgtccttgtagcgcgtctggcgacactgcgcgttggtgatgacgggcacattgacctcctgcagatagttggaggtgacgccgccctccttgatcaaaccccagccagcaaccacagcctggaagggatttagaagtcagtgactatgctttaaatatctataactattaactactaataatattactgctaatactaggtctaaataatggtcagatttttagtcataaatttcgaatgtcttgattgactcgactaagaacattcagatttagatgttttccttataggctcgtaaatattttatgtacgccctgaaaacttctattcaggcctacataaaaggaaatacagtttagcacataaatcaagacttgtactcacggtcttgccatcaaagttatgattggcctcgggcagacagactggacgcatgtttccagtcagtggaacaggggactccagcttgagcagcgccacatcgttgacaatccggttgggatcgtagttaggatgcacagtggtctggacgaccttgcgcacaatgccgggatcccgggaggatctgtcgatctggagcaggcgaatggtgatctgatccctgttcccatgcacacaatgggcggcggtcagcacatagcgatcattgattagggaaccgccgcagaagaggcggggataatgacgaccctttaccaattgggcggtccaaggatacttgttggagcgcacctgctggccgcccacgatacggttgacattcggagtgccgcagactggaaaatgcaccattattggaattaagtatgagatatctactactttttccagagcattatctggggtactcacagcagttctgcttggcggtgcactgattgcggctcttcggtggtcgcactgctttgatagattgttctgcaggatcgaccacatccaccacgtcggcgaattgctgggcgagggtttggtggggcgcttgatactggtactgggccaaactgaggccgatgcccagcagcaggagcggcagggccaggtagacgcgcatcttgtccggagttgacttctgaggaaagtgacagagtggtttgccaaacgccggctacttatagggccccccaaacgcttgagttggcgatcatttcgaatcggtttttttttaataaaactaaaaatatgaatgttttattgcttgtataagccgcgcgcgcatctttctttcatcgttctcctcgtgcttttctttctttctttctttctttctccgctttctttgtttggcagcagcttatttgcataacactttatagcgccgcacacacgcacaccttgcggttctcgagtgcggagggttttgtatttttggctctgtacaaattatcgttttcatccagaacaacttgccgaatggccaaataaacttttaatagcaattaaggctttcaggcgtgggatgcttaaaaatatgggttattgggaagggtcaatcggaatagctgaattaaatgcttaaaagccaacaattagaaacgagcatgatcatccaatgactggccaaggtttttatttataacattttgttgaagaaaagtacaaaagaaacttgtcaacttgtaacaaaacaattttattcttattttatgaagtattttaaaccattaataaaaaaatttatgaaagaatttcttactatatctaaagttattttgagttatgtagagtatattaagttcgctaagccctcatcagatttggccataacaactttgcatattcatgaaagtggagcaaacccgagagcgggttcaccacttccacctcccgccgcttttttaatggacttttaatgcgcatctggagcgacttaggcatcgtcatcgacagcagcgcctctgacccgccggacctggccaaaataaactcgggcgctgagttggcggattcctgctggcccactcgagaacgtctttctctgcgccactcgatcgaatcgaatggaatcgaatggcaaatggcgaaatgccatctgcgcgatcggcattgcagcataaatatcctttaagtgccggttatccggtatcatcattaaccggaggcaaacgcccgctttcacgctgcctcagatcgggaataat

SEQ ID NO: 6242 - DNA, 1032 bp, DROSOPHILA
ccaactcaagcgtttggggggccctataagtagccggcgtttggcaaaccactctgtcactttcctcagaagtcaactccggacaagatgcgcgtctacctggccctgccgctcctgctgctgggcatcggcctcagtttggcccagtaccagtatcaagcgccccaccaaaccctcgcccagcaattcgccgacgtggtggatgtggtcgatcctgcagaacaatctatcaaagcagtgcgaccaccgaagagccgcaatcagtgcaccgccaagcagaactgcttctgcggcactccgaatgtcaaccgtatcgtgggcggccagcaggtgcgctccaacaagtatccttggaccgcccaattggtaaagggtcgtcattatccccgcctcttctgcggcggttccctaatcaatgatcgctatgtgctgaccgccgcccattgtgtgcatgggaacagggatcagatcaccattcgcctgctccagatcgacagatcctcccgggatcccggcattgtgcgcaaggtcgtccagaccactgtgcatcctaactacgatcccaaccggattgtcaacgatgtggcgctgctcaagctggagtcccctgttccactgactggaaacatgcgtccagtctgtctgcccgaggccaatcataactttgatggcaagaccgctgtggttgctggctggggtttgatcaaggagggcggcgtcacctccaactatctgcaggaggtcaatgtgcccgtcatcaccaacgcgcagtgtcgccagacgcgctacaaggacaagattgccgaggtgatgctctgcgccggattggtgcagcagggtggcaaggacgcctgccagggcgacagtggtggcccactgatcgtcaacgagggtcgctacaagctggccggcgtggtgtccttcggctacggatgtgcacagaagaatgcgccgggtgtctacgccagggtgagcaagttcctggactggatccgtaagaacaccgccgacggctgctactgccagagttag

SEQ ID NO: 6243 - protein, 314 aa, DROSOPHILA
MRVYLALPLLLLGIGLSLAQYQYQAPHQTLAQQFADVVDVVDPAEQSIKAVRPPKSRNQCTAKQNCFCGTPNVNRIVGGQQVRSNKYPWTAQLVKGRHYPRLFCGGSLINDRYVLTAAHCVHGNRDQITIRLLQIDRSSRDPGIVRKVVQTTVHPNYDPNRIVNDVALLKLESPVPLTGNMRPVCLPEANHNFDGKTAVVAGWGLIKEGGVTSNYLQEVNVPVITNAQCRQTRYKDKIAEVMLCAGLVQQGGKDACQGDSGGPLIVNEGRYKLAGVVSFGYGCAQKNAPGVYARVSKFLDWIRKNTADGCYCQS

SEQ ID NO: 6244 - DNA, 5051 bp, DROSOPHILA
gatttgtcaattgtgtgggccaagatttatattcgctacgataaacttgaaacacgaatacctgatttcgcttttggtgcacacgatttcttccgaggtgttcatggataaaggtaattcgttagggaatcaattgaataatcggaacagcgatttattttcttatctggctacaaatttaatgagctataactataatttcactttcagttgattaaaatgtgttggcaatttgaagtgtcaactgaaattgggcaatcgcaacatttaatctgttgacaccttagttgataactagaaagtaaacaatatcacgtaatattagcgtgattatatatgcgttaaagtcttcaaataaatagatataaattaaaacttttaacaaaccatcttgctgaataaattaaatctttattttgtgctagcattgtcaacaaatttcgcacatatgcataaattaactaatgttcacaattagtcgactaagttttaaactaacttattcaaatgtaagctgtaaaaactaatcaacagtttcgattaggccactaatgcgccttggccttgtacgtgattttccacacctcgaagaggcaaatggtcgaatggaagcggtagaaaatggccagcggcatggagatgtgggtgatgatcgtccagccccagactccaaagaactccaaatggctctccctgaagacggctcgtcccttgatcagggtgtttacgaaccagatggcaatgttggccaccagcaagaacgtgatgatctccctgccgggcttccttctcacctgattggtgcccctgcagcgccgatggctggaatgcaggatgaacatggtctgcagcgaggtctgcaccactccaaagacctccgctataatgccctccacccggtcgggcactgtgtcccatttggcgaagtaactgcccaggatgctgaacattccgtacaggtacaccccggtctgggccacaatcagcaggagattgtccagatccatcgagtggtgctcgtcgctggtgttcttaatgtagcgcagatcgcgcatgaggatcatgcctaaaaaaagataaatatcgatgtaggtgggtccacacaacaacttgtatattcactcacccgttatcacagccgctgcgcacataaagtacatgaaggtctcccacagagtgacctcctgtgtggccaccagttcatagcccggctgggtgtacagcacaaagtacatgatcatcgagataatggtcatgactatgatcaggatcccgaagaagagtcccttgtgcgactgggaacagtccacggagaagtgatgggcaggcttggcagcagcgggcttgacggaattcttgcgcgtcttgtcgatgtccggaatcgatttgaccgtcttccacatctcgaagaggattacggcgcatatgagggagtactcgatggtgcaggggaacaggaatggcgaaagttgctgcaccagagcacccataatcgtggtgcgggagcagccgctgaaggcagccggcgtgggcgacggagtaatggtcatattcacaatcacagaactcacattggccaccagggtgttattaagggcatgatgatgatgatgctgatgcagggactcattgacagcggcccagtccgttctactcatggagctattatgaatgaccaggtcgtgggcgggatccacttcgtgctggctgatgtggaaaatttcgtgcttggtctcctccaccaggacgtacagccactcacacaagttggtggccaccatgtgcatgagtccgaagcgggaggtcaccttgtgccgggccatgtccatgtaggtggtgttcaagaagatgaactgcacctgggcgatgcacaggaccatccggcagatgggtgtaatggccacgaagacatcccggcatccgggatggccattcagctcgaagaactggccaaactccaggcccgaatacaccatagttccaatggcgaaggcgatggctcccactctcaagtaaaagctgccaaaatgggttaccttgtgcttcagatgcacattgctgttcttttcgtctgcaaatgtagaacaatcgtatttgtattgaccaaattataacaagaaatcccctatagcttacgatagtcctttaaggcattgaagagcgatcgattacggaaggcactaatgtacagaaagatcacaaagagtatgctgcccacatagaggtatacgtagaatccctggtacacataggtcggtatctgatcggatataacttccgtgatcggcagacaaacgcctagcagtaccaacagtttgcaataggttgccgacagtgctgaacttatggcatcgctgagatacaagagatacatttacgagattagttaccagatcataaagttttagtttccacaacttacttgccagtgcgtcggttcttatccttttgttgcttggcctgaaagctcttggccccattgtcgaaaaaggccgtggatccattcctggcactggtggctccactctggaaatttatggtcgctgtgctgccgctcgctgttccctgcaggttactgaaaaacacaagaggttatatgtactataagaaatagaaggtctagaaatacgtaatgtgttaataagccaatttgggaagtataagaataaaaacatataatattggttagtttctaatgcgatttgaatgctgttcgatgactttgttatgttagggaaccataaatgtacccatttttggcagtcctcggcgacaggaaaccgttgccgtccctgcgcccaaagagcggcggtcgctgggtgaggatctcttggaggagcagcgatggcctgcgtgacacctgcaaggtgcaggcggagtcttcgtggtgcatcccgacggtgggaagcgggaggagggcctgccgctggctgccgtgctccacgagatccaggttggtctgggacttggccagcggggagatgggatgcggcgacatgaccggaatgctgtggtgtccgcagtgatcacaggacgttcgggcgtaacggatcacttgattcgaggtggcggccacagagtgacgaggtgtaccaggtaccgaggtgggcagcgagcttggcggggatctcgagaacgaacccgacttctttggcgcacttatggttatgtattcgcaggcatcggaggatctgtggctgctgtttgaggagcgaaataaggatatgggatatctaattttccgaccagtggcacatatacacgcaacccgacaggttcaatgctttccgatgaactgaattttctattccgactttggattcttgtgcctggtattatcaatatgtggattcaacctgaccctgagggaatcgcacacattttcatgtatttcgcagctttgattggtttttgatcgatttctgcacgtccattgagatattatcactcagctggctaagaaaccacgcgtgttctttcggaaatacctctaatttgtatataagtggacagataaaagggggtatgttgtcccatcaatcaaggggtagataagttcttggtgtttacataaacattaagtgatcacgttttccttttgttgcctgcaatcagtgtctggaatttgagccagggctttcacacgaaaaagagctaatgtcatagaacgacatctataggggtttgacgaaccactgtgataagatatagtactccaaaatatttagaatggaaaagtctactgtctgctagtctggtacaaatagctttatcttgagatcttctatagccaaaactcgctgtgtatatgtgccaccccagttgagaatttgaatgcgaaactaactcatttcccttcgatatcacatcgtggtggtaatggacgcgctgtttggtcctccacagattaatgggttcatcgtacatgtctttggatttcaagttaattagcgacatttccgggccgagtcgcaatttaatttatgaaatcaaacggatcgcgatcaccgatctccaagacgcgattttccgcgcccttacagactcgtgtcagtgggaagactgagactttctgaagcagttactccaattgtcggagctatcgggcagacgatatttgactaactgattagcgttattattagcctgctatttttaccgtacaggtatgagtgtgatccgtgtgtgtaaatacatctattgcagtcctattattgctctaatttattagcctattggcacttcatcagtcggacctgaatcatgtacccgcatgttgtacatagtactggatttttgaatttgttttgaaatctgtaattatacgacggcaatatgacgtcatcacaacaagctcgtcaatgttgttaattatcgtatatatagagttgtaaaaagctctgccttctcatagcagaattcgtcggttatctcggccactttagcatttagcagtctgactctcagtgctcttggcttgtttactggatcagatcagtttggcgatctccagaaacgctaatgtttacccacatgattcactttttaggcttcctaatttttttcattgtactatgtgacgttgtaggtgaatttatttgggtaaataaaaagtaaaaacctgtaggttgacaaatcagcttcagagaaagttacgtgacaagtgttaaaaagttggtcaaaatattatgaaagacctaacacatctacgaagcgtctgaaatcgaaatggcaagtcgagtttaggtgtaaatattacgccatatttatttagcaaaatatataacgaaaattcacaggtttaagtatctcgattagagttcattttattaatagtacatgatcatattaaccagggaagttctttataggaatattctgattctatttggtaactttacctgaaagtaacagtcggcattctttcgtattgaactccactgttgcggtccaccattaatgtgttatcagaataggtaaattttaaaattttttcaaagacaacttcacataagaacttttattccgctgctaatttaatacgaaggttc

SEQ ID NO: 6245 - DNA, 2640 bp, DROSOPHILA
acacgagtctgtaagggcgcggaaaatcgcgtcttggagatcggtgatcgcgatccgtttgatttcataaattaaattgcgactcggcccggaaatgtcgctaattaacttgaaatccaaagacatgtacgatgaacccattaatctgtggaggaccaaacagcgcgtccattaccaccacgatgtgatatcgaagggaaatgaccacagatcctccgatgcctgcgaatacataaccataagtgcgccaaagaagtcgggttcgttctcgagatccccgccaagctcgctgcccacctcggtacctggtacacctcgtcactctgtggccgccacctcgaatcaagtgatccgttacgcccgaacgtcctgtgatcactgcggacaccacagcattccggtcatgtcgccgcatcccatctccccgctggccaagtcccagaccaacctggatctcgtggagcacggcagccagcggcaggccctcctcccgcttcccaccgtcgggatgcaccacgaagactccgcctgcaccttgcaggtgtcacgcaggccatcgctgctcctccaagagatcctcacccagcgaccgccgctctttgggcgcagggacggcaacggtttcctgtcgccgaggactgccaaaaatggtaacctgcagggaacagcgagcggcagcacagcgaccataaatttccagagtggagccaccagtgccaggaatggatccacggcctttttcgacaatggggccaagagctttcaggccaagcaacaaaaggataagaaccgacgcactggcaacgatgccataagttcagcactgtcggcaacctattgcaaactgttggtactgctaggcgtttgtctgccgatcacggaagttatatccgatcagataccgacctatgtgtaccagggattctacgtatacctctatgtgggcagcatactctttgtgatctttctgtacattagtgccttccgtaatcgatcgctcttcaatgccttaaaggactatcacgaaaagaacagcaatgtgcatctgaagcacaaggtaacccattttggcagcttttacttgagagtgggagccatcgccttcgccattggaactatggtgtattcgggcctggagtttggccagttcttcgagctgaatggccatcccggatgccgggatgtcttcgtggccattacacccatctgccggatggtcctgtgcatcgcccaggtgcagttcatcttcttgaacaccacctacatggacatggcccggcacaaggtgacctcccgcttcggactcatgcacatggtggccaccaacttgtgtgagtggctgtacgtcctggtggaggagaccaagcacgaaattttccacatcagccagcacgaagtggatcccgcccacgacctggtcattcataatagctccatgagtagaacggactgggccgctgtcaatgagtccctgcatcagcatcatcatcatcatgcccttaataacaccctggtggccaatgtgagttctgtgattgtgaatatgaccattactccgtcgcccacgccggctgccttcagcggctgctcccgcaccacgattatgggtgctctggtgcagcaactttcgccattcctgttcccctgcaccatcgagtactccctcatatgcgccgtaatcctcttcgagatgtggaagacggtcaaatcgattccggacatcgacaagacgcgcaagaattccgtcaagcccgctgctgccaagcctgcccatcacttctccgtggactgttcccagtcgcacaagggactcttcttcgggatcctgatcatagtcatgaccattatctcgatgatcatgtactttgtgctgtacacccagccgggctatgaactggtggccacacaggaggtcactctgtgggagaccttcatgtactttatgtgcgcagcggctgtgataacgggcatgatcctcatgcgcgatctgcgctacattaagaacaccagcgacgagcaccactcgatggatctggacaatctcctgctgattgtggcccagaccggggtgtacctgtacggaatgttcagcatcctgggcagttacttcgccaaatgggacacagtgcccgaccgggtggagggcattatagcggaggtctttggagtggtgcagacctcgctgcagaccatgttcatcctgcattccagccatcggcgctgcaggggcaccaatcaggtgagaaggaagcccggcagggagatcatcacgttcttgctggtggccaacattgccatctggttcgtaaacaccctgatcaagggacgagccgtcttcagggagagccatttggagttctttggagtctggggctggacgatcatcacccacatctccatgccgctggccattttctaccgcttccattcgaccatttgcctcttcgaggtgtggaaaatcacgtacaaggccaaggcgcattagtggcctaatcgaaactgttgattagtttttacagcttacatttgaataagttagtttaaaacttagtcgactaattgtgaacattagttaatttatgcatatgtgcgaaatttgttgacaatgctagcacaaaataaagatttaatttattcagc

SEQ ID NO: 6246 - protein, 786 aa, DROSOPHILA
MYDEPINLWRTKQRVHYHHDVISKGNDHRSSDACEYITISAPKKSGSFSRSPPSSLPTSVPGTPRHSVAATSNQVIRYARTSCDHCGHHSIPVMSPHPISPLAKSQTNLDLVEHGSQRQALLPLPTVGMHHEDSACTLQVSRRPSLLLQEILTQRPPLFGRRDGNGFLSPRTAKNGNLQGTASGSTATINFQSGATSARNGSTAFFDNGAKSFQAKQQKDKNRRTGNDAISSALSATYCKLLVLLGVCLPITEVISDQIPTYVYQGFYVYLYVGSILFVIFLYISAFRNRSLFNALKDYHEKNSNVHLKHKVTHFGSFYLRVGAIAFAIGTMVYSGLEFGQFFELNGHPGCRDVFVAITPICRMVLCIAQVQFIFLNTTYMDMARHKVTSRFGLMHMVATNLCEWLYVLVEETKHEIFHISQHEVDPAHDLVIHNSSMSRTDWAAVNESLHQHHHHHALNNTLVANVSSVIVNMTITPSPTPAAFSGCSRTTIMGALVQQLSPFLFPCTIEYSLICAVILFEMWKTVKSIPDIDKTRKNSVKPAAAKPAHHFSVDCSQSHKGLFFGILIIVMTIISMIMYFVLYTQPGYELVATQEVTLWETFMYFMCAAAVITGMILMRDLRYIKNTSDEHHSMDLDNLLLIVAQTGVYLYGMFSILGSYFAKWDTVPDRVEGIIAEVFGVVQTSLQTMFILHSSHRRCRGTNQVRRKPGREIITFLLVANIAIWFVNTLIKGRAVFRESHLEFFGVWGWTIITHISMPLAIFYRFHSTICLFEVWKITYKAKAH

SEQ ID NO: 6247 - DNA, 4916 bp, DROSOPHILA
tgaataataattaaaaaacttttcccttaagccgtttttggctttaacagccttttcgtggtccttaccagatatgagtctggtctgataaaagtcctaaggtttctggtccaaaattccacctcggatatcctggttcccaaggaccaaagagttaaatatcttcaatgttgcgtgaggctttttgctcgcatatcaaggtgagaggatagacttcttaaaactaactcttcaaaccacttttcatttagccatcataatcaaattgaaaacctcttcaagtatatcatcctggttcagtgttccgttagcagtattttgatctgcatgctgctctacaagatcagcacggttttggtgagttgattgataagctatagaatttacaaatctttttatttaaaaattgtttcattaggaagtgggctgggtgtggatgggcatgattatggtctactttgtgaccatagctctggagatcactctgtacaacgtgagtgcacagaaggtggagagccaggtatattatattgtataatttcaatttttatgtaaggaattattgtatttttagagtgaactgctgttccatgactggtacaactgtagttggtataatgagtcaagggaattcaagttcatgatcaaaatgatgctgcttttctcacgccgaacttttgttttaagcgtgggtgggtttacaagtctctcccacaagttcctagtgcaggtattgtattgaaattgtcttttatttcataccatattaagattccactttcaggtctttcggttgagtgcaaacttctttctgctcctgcgcaacatgaacaacaaataggtttcctagtacttacttggaactatttcgttattgcggttacggattcgatagtaacttgcagttattaaaacagagtcgtgcagttttgttcataaaaataacaatttctatttattatatcgtgttctttctacactttcaagctacgcctgaggcctattgctcctcctcttcgtcgtcatcttgatttggctgcacactgccctccacatcgaagaaggattttctactgcgtttggccgcagtggccgcttgactgccatcgaatttggctgccgttcgcttgcgaagctcctccacgtcctggttgtcgtcgttggcgctccactcaagcaccaaacgacgaccgtaaagatgcgtactggcgcttagggcgtcgaaggcgcgtttggcctccgccttggacatgtagtcaacgaaaccgaaaccacgatgcgcatcctcgcccgtggtcgcctttttaggaatacgtaaggatcgcagttcgccaaaagccctaaaagcacggattagaatttttcctaaccggtatgacctatacgtacttgaatatatctcgaacctcgcggtattgtgcctggaagggaatatttcgcaccaggattttggttcccgtttgcttcttctgtgaggccagtcgacgttgtgcgccatcattatcttgggttctggaaaagattatcccattagcaaagaaaaagtaaagttcggttttccgaggcttacttgagcacacgatcgctgcgcttcagttccacgggattaccatctatgtgggtgagctgcaagttcttgagagcgtgctctgccactgaggacttcttgaactgaatgaagccgtagccaagggacttgaattcccggggattctcgggatcccttcgcttagcaatttcaacagtgtgaatgctacccaaatggcggaagtgtttctcaacggtttcctgtacggttttaaagttaaggttccgtagaaatagtgttgtattcggttcgggttcatcatcggcatcctctgccctagaatcctcctcgtcaggtttcgcatcatttacaatcggtttctcctctggctttacctcctcctttggtttcggttccgatttgggaatcactggctctccactaagggtcttggtaaagacctgctcgggagcccactccaaatagagtggggcattcttgaatttactgtaggccaacttcttgaaagcttgcctcgcctccaaaggatcacagtactcgataagtgccgtaaccccactgggaggaagcacaatcctgccaattgggccaaatcgactaaagatgggggtaatctctgaaatctctgtggccgctggcaaattcttggctagtataacagtgttagaacgtttctttgcgggctcatcaaatgcatcaagacgaacgccttcttcctccaggaagcgcttcatctcgatgacgacttgggtttctcccaaagccaagcgcacggcggcactactgccaccatcgcttgtgtccaggatgcgttcctttgaggtcttgaattgcttggcgagaatttctgcaacagcattggcacccagaaacaatgtgttccagccaattggtttttgggcgttcttcttgagtttcaaggccttcttttctttgaatgacagactggcatcgttttcatccaaatcctctttcggattcttttcgatgtccttgctgggcagaaggtgcaagagacggccatggaaatcagtgccatcgagggtattaaaagcctttaatgcgtgctccggcatcatgtacgtaactgtaccaaagcccttgatttttcgcgttagcttgtcgaggggcaagttaacctccaccacgggaccgaactgctcgaaaagcttgcgcagatcctcttcggtagtagtgtatgctagattacgaaagaatatcctcccggactcggagatgtcatcttctttggataaactgtcctgctgatgcttccacttcgcattgcccgcatcgacggcggctggtgccaatggttgtccactcttgctcgctttggtcaccttgttcttctctgtaaagtcggagaagaatacttgcttgcccttgatgaaactcttgtttttaagcattcccttggccatgtctttctcagttttaaaacccacgtagcagaagccgtgaactttgctgggcagccgaacggagtacggtttcaggggcttgaaaaactttagcacctcctggcgcttggtgttgtatggtacattgtgtattttaatggtgaacagctccaaatttgatttatccgccttggctttgggtttctttgcagtagcttcgccggatgtggttgccatcagggatttcatatactcaagatcgctgatgggcttttcggccagtttatcggtgtcttcttcctcatctgcctcatcgcctgagccatcctcatctcctgcatctgcatccactccactgtcatctctggcagctcgagattcttcctgttcctcatcatcctcttcttcgttctcccgatttttatttatacccaaatcgtttccccacagcgttcgcgacttgtcatgcgcctctagaaactcttggaattccggatcgtctttgtgtctgctcaaaatttggtccaccttgtcaactttatctttcttcttctttttctcagactccttagccttggcagccgcctccctttccttctccttcaatttgtctaggttcttcttgctgtccttggcgtacttgctccaagattgtggcttatcttcgctgcccaaggcagcacaggattcgacgcgcacccggctggtctgaatgcatgtgttgtcaaagtgccggatggccgattgggcctcctcctcggtgctgtaacccacgaagcaaaattgccgaaactttccatcgggcgtgtattttagttgcagatccgtaatcgtgccctgggcaccaaaaatctgacgcagtttgtcttcggtgatctacaatttcagtttaagtagatgcttttttttaacaagtctacatactcacatgcttgggcagctgtttgactataattcgtgacatcttttgtggctaatttgtcggtctgcagctaaaaactcatttaagaaaacttttgtttacaaacaaattgaaacaacacgtgcattagatatgcaaaacgagcgatagtagcatcagtagtatcgaaagtcgaaatttgtatactatcgaaaagtctatcgtttcatcgactctactttacgttacattttacatgtagatattcaaatttatatattttttaagttgtgtttcgattataatgggtgatggcaaatcaaagctgaatgaaaaagtaaaataacctcgacttcaaaacgtcacttcgcttgagcatccttatatttccccagttcaagtttaaagggtggatttttacaaacttacaacgttggaaaagttatattttgaaaggaaactctttaagcgacttatacacaaagatacatggtaattgtattggcacattaaacgtagatgacaaatatgttaatatataagtgtttagaatagacttcaggtggagctacggtagagatatagatatgcgattggattgtcggattgtgggagtacaaggtcttgtgtgtttcgtttagtgtctcatttttaacatataatacagtccgttgctggcttgaaactggtgaagcacagttggcagttgattctcgatgtggccatcatccatcctcttgtatccgttgtatcattatagtatatggcatacagtaggcgaacgatgatgcgttaaagcttaacgttgctcagttggtctcctttgtggatccttggatccttgggctgggtcactaaacagaatatttcggctaaggcactaaaattacataatttcattcaacgtctacgttctatcataaatctgatttgttcgtctcgtctcagatcttcgttcttagttaaaattgaagtagttgttatgggaagtggggttgttcgcagagctctagggttccaggcgattgcgactgaagcagctatcggggagagccttggaaat

SEQ ID NO: 6248 - DNA, 2757 bp, DROSOPHILA
atgtcacgaattatagtcaaacagctgcccaagcatatcaccgaagacaaactgcgtcagatttttggtgcccagggcacgattacggatctgcaactaaaatacacgcccgatggaaagtttcggcaattttgcttcgtgggttacagcaccgaggaggaggcccaatcggccatccggcactttgacaacacatgcattcagaccagccgggtgcgcgtcgaatcctgtgctgccttgggcagcgaagataagccacaatcttggagcaagtacgccaaggacagcaagaagaacctagacaaattgaaggagaaggaaagggaggcggctgccaaggctaaggagtctgagaaaaagaagaagaaagataaagttgacaaggtggaccaaattttgagcagacacaaagacgatccggaattccaagagtttctagaggcgcatgacaagtcgcgaacgctgtggggaaacgatttgggtataaataaaaatcgggagaacgaagaagaggatgatgaggaacaggaagaatctcgagctgccagagatgacagtggagtggatgcagatgcaggagatgaggatggctcaggcgatgaggcagatgaggaagaagacaccgataaactggccgaaaagcccatcagcgatcttgagtatatgaaatccctgatggcaaccacatccggcgaagctactgcaaagaaacccaaagccaaggcggataaatcaaatttggagctgttcaccattaaaatacacaatgtaccatacaacaccaagcgccaggaggtgctaaagtttttcaagcccctgaaaccgtactccgttcggctgcccagcaaagttcacggcttctgctacgtgggttttaaaactgagaaagacatggccaagggaatgcttaaaaacaagagtttcatcaagggcaagcaagtattcttctccgactttacagagaagaacaaggtgaccaaagcgagcaagagtggacaaccattggcaccagccgccgtcgatgcgggcaatgcgaagtggaagcatcagcaggacagtttatccaaagaagatgacatctccgagtccgggaggatattctttcgtaatctagcatacactactaccgaagaggatctgcgcaagcttttcgagcagttcggtcccgtggtggaggttaacttgcccctcgacaagctaacgcgaaaaatcaagggctttggtacagttacgtacatgatgccggagcacgcattaaaggcttttaataccctcgatggcactgatttccatggccgtctcttgcaccttctgcccagcaaggacatcgaaaagaatccgaaagaggatttggatgaaaacgatgccagtctgtcattcaaagaaaagaaggccttgaaactcaagaagaacgcccaaaaaccaattggctggaacacattgtttctgggtgccaatgctgttgcagaaattctcgccaagcaattcaagacctcaaaggaacgcatcctggacacaagcgatggtggcagtagtgccgccgtgcgcttggctttgggagaaacccaagtcgtcatcgagatgaagcgcttcctggaggaagaaggcgttcgtcttgatgcatttgatgagcccgcaaagaaacgttctaacactgttatactagccaagaatttgccagcggccacagagatttcagagattacccccatctttagtcgatttggcccaattggcaggattgtgcttcctcccagtggggttacggcacttatcgagtactgtgatcctttggaggcgaggcaagctttcaagaagttggcctacagtaaattcaagaatgccccactctatttggagtgggctcccgagcaggtctttaccaagacccttagtggagagccagtgattcccaaatcggaaccgaaaccaaaggaggaggtaaagccagaggagaaaccgattgtaaatgatgcgaaacctgacgaggaggattctagggcagaggatgccgatgatgaacccgaaccgaatacaacactatttctacggaaccttaactttaaaaccgtacaggaaaccgttgagaaacacttccgccatttgggtagcattcacactgttgaaattgctaagcgaagggatcccgagaatccccgggaattcaagtcccttggctacggcttcattcagttcaagaagtcctcagtggcagagcacgctctcaagaacttgcagctcacccacatagatggtaatcccgtggaactgaagcgcagcgatcgtgtgctcaaaacccaagataatgatggcgcacaacgtcgactggcctcacagaagaagcaaacgggaaccaaaatcctggtgcgaaatattcccttccaggcacaataccgcgaggttcgagatatattcaaggcttttggcgaactgcgatccttacgtattcctaaaaaggcgaccacgggcgaggatgcgcatcgtggtttcggtttcgttgactacatgtccaaggcggaggccaaacgcgccttcgacgccctaagcgccagtacgcatctttacggtcgtcgtttggtgcttgagtggagcgccaacgacgacaaccaggacgtggaggagcttcgcaagcgaacggcagccaaattcgatggcagtcaagcggccactgcggccaaacgcagtagaaaatccttcttcgatgtggagggcagtgtgcagccaaatcaagatgacgacgaagaggaggagcaatag

SEQ ID NO: 6249 - protein, 918 aa, DROSOPHILA
MSRIIVKQLPKHITEDKLRQIFGAQGTITDLQLKYTPDGKFRQFCFVGYSTEEEAQSAIRHFDNTCIQTSRVRVESCAALGSEDKPQSWSKYAKDSKKNLDKLKEKEREAAAKAKESEKKKKKDKVDKVDQILSRHKDDPEFQEFLEAHDKSRTLWGNDLGINKNRENEEEDDEEQEESRAARDDSGVDADAGDEDGSGDEADEEEDTDKLAEKPISDLEYMKSLMATTSGEATAKKPKAKADKSNLELFTIKIHNVPYNTKRQEVLKFFKPLKPYSVRLPSKVHGFCYVGFKTEKDMAKGMLKNKSFIKGKQVFFSDFTEKNKVTKASKSGQPLAPAAVDAGNAKWKHQQDSLSKEDDISESGRIFFRNLAYTTTEEDLRKLFEQFGPVVEVNLPLDKLTRKIKGFGTVTYMMPEHALKAFNTLDGTDFHGRLLHLLPSKDIEKNPKEDLDENDASLSFKEKKALKLKKNAQKPIGWNTLFLGANAVAEILAKQFKTSKERILDTSDGGSSAAVRLALGETQVVIEMKRFLEEEGVRLDAFDEPAKKRSNTVILAKNLPAATEISEITPIFSRFGPIGRIVLPPSGVTALIEYCDPLEARQAFKKLAYSKFKNAPLYLEWAPEQVFTKTLSGEPVIPKSEPKPKEEVKPEEKPIVNDAKPDEEDSRAEDADDEPEPNTTLFLRNLNFKTVQETVEKHFRHLGSIHTVEIAKRRDPENPREFKSLGYGFIQFKKSSVAEHALKNLQLTHIDGNPVELKRSDRVLKTQDNDGAQRRLASQKKQTGTKILVRNIPFQAQYREVRDIFKAFGELRSLRIPKKATTGEDAHRGFGFVDYMSKAEAKRAFDALSASTHLYGRRLVLEWSANDDNQDVEELRKRTAAKFDGSQAATAAKRSRKSFFDVEGSVQPNQDDDEEEEQ

SEQ ID NO: 6250 - DNA, 12667 bp, DROSOPHILA
tgtatgtttccccgtgggtgaagtccttggttccctccaggcgaccgcggggcggtgccttctcgtagtcgaaggccttctctgacttgccgaacagctggttggccatctcgatgtcctcgcggtaattgcccacgaccaccttcttgccagtgagcgggtccgttatgtcacccagcggatagaccactttttccacgttgtgcgtgatgaggcgggtgaggcgctctggcagttcccgtatcaggaccacgtccccggtcttgcacaccttctgcggatcgtgggcgaagtagaactcgtccttcttaaagtactgcgagcagaagggaaattgtgtgaaatctcctgaggcgagatctaatgtatattatgcacaccatattcaggttcttgtccagctccattcggcgaatgcggatcttggaggcgttctgcttgatgcagggcatgcactggcccattagtaggagtcctcgcctcgacattactttaatttaatttaagagtttagaaaaataaacaaccggttgggaaacacagctggtagatcactggcgatagtatcgattgggcctggaactatcaatatttcgatattttttactcagcagtttctgattttcaaaatcccgccaaatgcaatcagcttgcacgcgtcagttaaaaagtagggtagtatgacttttcatcgcaaaaacaagtggattctaaggacataacattttcaccgtactataaacagtgtatcagttttacataacatatcttttcaattaaataatgctttaatggattaaaaatgtttacgtcaaagtaaatacctttaaattcattttgtttatgaataatacatatttttaattcaaaattgtaataaggaattcggctcacgatgacatatcgcaagatttccatttatgtatcgatgtcttcatgaaatacatttctgtgtagtcacacttatcgatagaccgcgcactccacgtgtttttcgtccattttctcgcagcgcgcaacacgtgcggaggtttctctccgtctattagttgatttagcagaaaacgtagataaaatggccgacgtgggtaagtctggcaagtgatgaattaaaagagtgcccaaataaacggactatgcgcccgcagaagtacgcaaggagaagaaaaagaagaagatcaaggaggagcccttggacggcgatgacattggcacgctgcagaagcagggcaacttccaaatcaagccctcctccaagatcgccgagctggacacctcgcaatggccgctgctcctgaagaacttcgacaagttgaacatccgttccaaccactacactccgctggcgcacggatcgtcgcccctgaaccgcgacatcaaagagtacatgaagactggcttcatcaacctggacaagccgtcgaaccccagctcccacgaggtggtggcctggatcaagaaaatcctcaaggtggagaagacaggccactccggcacgctggatcccaaagtcacgggtaagtgaagcgcgtgctcgcctaccgccatacaaacctaacctcattgtgtgccgcgtgtttttttttcctacaggttgcctgattgtttgtattgacagggccacccgtctggtgaagtcccagcagagcgccggcaaggagtacgtggccatcttcaagctgcacggagccgtggagtcggtggccaaggtgcgtcagggcctggagaagctgcgtggtgccctcttccagagacctccactcatctccgccgtaaagcgtcagttgcgcgttcgtactgtctacgacagcaagctgttggactacgatgaaacccgaaatatgggtaagtcagaagttttgtttatccattctcgctcagagttggtgcgtcgctgctggattagtttatcctgcagaggtgcagcctgcttcagccagtgaaacaccagtatttgcctaacacagcaaatgcacaatgtaattgttaaaacctcgtctttttctctcctccaattctgcccactcacgtgctcaggtgttttttgggttagttgcgaggccggctcctacatccgtaccatgtgcgtccatcttggtctcgtactgggtgtcggtggccagatgctggagctccgccgtgtccgctcgggcattcagtctgagcgcgatggtatggtgaccatgcacgatgttttggacgccatgtggctgtacgaaaaccacaaggacgagtctatgctgcgacgtgtgatcaagccgctagaaggtctgctggtcaaccacaagcgcattattatgaaggacagttcggtaagtttgacatccagttgccgtttgcgaagtagtaccccatgatattaagccggcaggtgcctgcaatccccacgggcacctgtgactatgattgggaacagcaaagctgctgatgtgtgtatgttgggcagcgctcttatcctgcgcgctcgacaaagaatattcggtcgacatttcctctagcaaaggacccccttatgatatcaactaacaaccatcaatctttctccaggtcaacgccgtttgctatggtgccaagattacattgcccggtgtcctgcgctacgaggatggcattgaaatcgatcaggagatcgtcatttgcaccaccaagggtgaggccatttgcctggccatcgccctcatgaccacagccactatggcctcttgtgaccatggtgtggtggccaagatcaagcgagtgatcatggagcgagacacatacccgcgcaagtggggattgggaccaaaggcgtcggccaagaaggcgctcattgccgccggcaagctagacaagttcggaaggcccaatgaaaacacacctaaggagtggctgaccggttatgtcgactacaatgccaagaagccagcagctcaagaagtctcccccacaaatggctccagtgaacccagcaaagtatgttattgaaaatgagtttaacatggtattcacttgctaaataattgtgttcctttagcgcaagttaagcacctccagcgttgaggaaactgctgcggcggcggtatccgaggagactccttccaaggacaaaaagaagaagaaaaagaagcacaagggcgacgaggaagccccagaagccgctgaggaggaggcagagccagtagaaaaggagaagaaaaagaagaagaagaaggacaaggatagggacagagacgaagctcaggaataggaatcagaagtttctataggattaggttttaaagagaattctacgcttttttgtagaggcacctaccgattgctagctgttaggtttaaggagtgtttttatgtgtagaagtgcatacaaattacaaatgcatttaagtgacattcgcaatgcaataaattgaacattttattgtggaactctattgtaatgatgaactccaattaagaacacaagtccgttttaagttgaaggcagccgtcgggctgacatatatttattcaatttcttcttttgattttagagtaggcagaaatggttctgtcagctcaacgtctactgagtctctctgattttacagttttttatatatttggacttaggctaatccgcgtagctgcgctgccgggtacgccagcagcggagcggcgttcttatgtatatcttatatatctaggcttatcgggagagcgagatatgtatgtacgtatgtaatatgtatttggtcggcgtgtgaatgctgaccatgcacttatactttttgccttcgagtgggtgatcatgttacatccgccctggcctaactgcgtgcataaacataaacataaacatagcaacaaagtgctgccataagttaatatgctattttatttaattgttcttaatattgcataggcacatactacatctccctcctttttgaaaaataacgtaacctagtgaagttattttgattattaaatgcaaattattttatttttatttttattttgtttgtgtttttgtttgaacaacaatagttgattttataatgcaaagataaaaatatacgtagtgtatggaaaatttgtataaatgattaaggaaaatataagtttaaattcaatcatgaatgaaatttctttaatctatctttatgaactatttgttttttgtttttattagtaagtagcgtaatattgttattatctcctatgctttctatcttatagggccccgtatatttaaagtctaatttatgacctacctcatttcttagtaaaactttatctcctacttctaattctatgtcttttatttttaagtcataattttctttatttttttctttgtgtgcttcaagaagttttcttgctcgagcatatgctacctctaacctatatttactctccttagcgtaatcatctatgttatatattggttctatgctatgtagtttattaaaatgttttggtaaattacttgttctaccgaaaactaattcatatggacaataattatgtaccatagattgggtcgtgttgaagcagtatacgaaatattgaagccatacgtcccaatcggttttgtccgtcgatatgtaggatcgtatatactcgtttaaagttctatgacttctttctactactccaactgtctggtggtgatgagctgttgatgttatattttttattttcaaatatttacacaggtcagtaattattgaattcttatactctgttcccatgtccgttatgaacgtcttcattggaccgtactttagaataaaagattcaaatatagcttctgcgactgtttttgcgcttttatttgctattggtatggcaactaagtacttggttaaatcacatatgagagtgactgcgtactcgttaccattttctgacttgggtagtggaccaattgtgtccacaaacaactctatcgaaagcatgttctggtgtttcagttatcggtcattggagtctttgtgtgctttgttgtttttgctttttggcatttttgacatttccttacggtactcttttatgtatttactcatatttttccagtaataatgtcttttgaccttggccaaggtttttgtaatgcctgtatgccctccttgtattggatcatcatgtaatgtagacaatatagcttctttttctttttcattatttatttgggtcaccgggttaagtagcgctacttttaaattctttaatattttattgcccatatttttaaatttatctattgaaacgtgttcaaagatttttttccacggtgccattttgatttggctgatatcatatataccggcctgcaattcaagcctttggagaaattgatctaaatcaagaattccattagtataaagatcaccaacatcatatcttgcaataattttctttccatgtttaaataaacatatcgagtcattcaattgcaatgtcactacttttcgtacctcgtcatttgttatgacttcgtataccgttgggctctgaagctatttctttggtttgcttttgcaaatccaattgttcttttcctgcgcaggatttttgtctactttgaaatcttgtagtgacttttaatatatttccagttatatcttttagctctttgatggttattcttgataacgcatctgctacatgattgtccttgccctttagatactctactgtaaaattatattcctctagttcaagccttattctagttaatttagagctggggttcaccatcgagaataaatatgtcaatggtctatgggtctgttttcacagtgaaatgttttccgtaaatgtatggtctgaaatgtattattgcccaatgaattgctgctaactcttggtctgttgtactcttattgctttcacctttcgtaaaagctctggatgcataagcaactggggagttggtggccattatggttttgagttaaaactgcgccacacgcttgcttgcttgcatctgttgttatgcaaaattctttgctgaagtctgggtactgcaagagtgttgggttaattagctgagattttaaatgtatgaatgctttttgacattcatctggccactcgaatggaacattctttttacataatcttgttatgtgccgcgaatagtcggcgaaatttttgataaaacgtctgtagtaattgcaaaatgctacaaaacgtctagcgctgtccgcatcatgtggaactgggtagttctgaatgacatcatattttttggcatccggcaaaattcctttgtctgtgcatttgtgtcccaaaaatgtgacttcatgcatgaaaaatgaacatttttcaggatgtaactttaggttgtattccctgcatttaccaaaaacttcagtgaggtttttaagcatatgtttttcggaacaacctatgactattaagtcatccatataaaggaatgcttgagacggttctattccggagaatgctatagtcatcattctttggaatgaattaggcgctatttttaagccaaatggcaatcgcgtgaaacgatatgagccattgctggttgagaaagatgttatatctctcgagccttcatccagttcgatttgatgaaaacctgacattaaatcaaggcaggagaaatattttgctcgacccaagttggtccaaaatatcatctattctcggtagtggaaatttgtcagctaaaagtttcttattaatttggcgatagtctattactaatctccatttctttttatcagaattcgggcttgactttttgggtactaatagcaaagggctattgtactgtgaaactgatggttcaactattttatcttttattaatttctgaacttgggcttgtatttcttccacttgactatgaggacttctataatttttcgtgtatactggctcatcatcttttaatctcaactgttggttataaaaattattaactggtataggttctgattctaatgcaaatatatctatatattcgctgcatatattttctaattgtgatttaaacaattcggggaaatttttctttaattgagataagacagttttatttctgtgttcactatttgcctgaactacattgtagttcgaaagtggctcatattttagagtgtccatattgactaattggtcggaatcggttgtatttaaaattcggacaaatgtattacttgatgttgcgattggatttgcaacataaataccagtttgaatttcctggtttggaattaaaatgttatcatcttttgatgatactattaatcttcggacaacttgggatcttgctggtaataaccgttgtgttaataccagagctgtatgctatgggaatatatattggaaatttcaaattgtttggtctaattataaaccaatcttcttcttgggtttaaatcgatttggcaattatatttttttatgaaatctattccgattattccatcacacggtattggaaagtttttatctactaaatgaaaatcgtgtgggataacgtatttacctgtctgtatctcaataaaagtctgtcctcgagactgaattttctgttggcctatgcccttgaatgtttattttattggttatttgaatattagaaaatttgtcagagttctctttgagaatagagatatctgcacctgtatcaagtagaaaaactagttttacgcctgttttggcatgaatgaatgtagaaaatatgttgagattataattgatggtgtatactctacgatcttcttctactgagtacctaaaggctgttgcgagtttccctgttcttggattactcgtacattggcattgtttctgttgtagttgttctgactgttgttacggcctctgtttccattataacggcctctgttatagccattataacggttattatttccattatagcggttttgataaccgttattctggtaaccgttattttggtaaccgttattttggtaaccgttatggtagttgcctctaatactattgttattaaagcctctaccgcggttactacctctattggcatttccgtatcctctattgggtctgttacctctaaagtacatcactttattgatgtcaccggtaactcttgtactcgttcttatgtatgcgcttatcgctgcatccatagtggtgcaagtccctgcttccagtactgttttgatactttcgtgctcagcacgatgtatcatggtttcaattgcctctttggtgcttagaccagtggcatgttctagaggtataccctcatcgatataggaagcttctaaaagttttctcaggctatcaacttcagcggtaaattgcgttgcagttttacctctctgctgaactgttgctagctttgctttgacattactggatgtctcaccgacaactactttctgcaatttgtttataattgctggaattgtcgtttcattgtcaactgagttcaaaattgtgccaactatttttgacttaatgacctcaactgcaatgtcttcaaatggtcccttagctaggtctaccaatttgattgccttaatgaatctttgtaaatggatcttttgcccatcaaattctggcactgtgcaggcgacttccctaatgtaagacctaatggcagctgcttcttctgccatggttaagttattttcggagtcgggctgcgttatttgttttatcgtcgttcttcagccattaattttgctggtatagttagatcgggaagatcttcctctttaatgtcttccttgactatagtcctatcttcctcgtcagagttagtgctgtcttcattcaaatttattcttaggggggtgtttactatgggtggaatttctatctggagactgaatttattttttataaatattaatttttctcttaatgtcaccagtaggttcaaagccttagcacactgtttgcgttccaaattctttctattttgttggatcaactctctgatttcattataactatttaccaagacttgggcattcctattgattggtacagcttgggttgatctgttttgcgttaagcacttataggattttctgaaattttcattttgatcttttatctgatcaacaagcttttcccagtccatgctgtggtatactcataacttcaaatttattcatttgtatatattttttttttaatgtagataaattcaatattacggttttatatttttttttttatttattattttttttttcatataatttttctcatattttcattcataattgactttattaaagatcttccttaaatattatctataccgttagcagtgctacggtatcgtttcttaagacacttgttatgcagtttgtatatttttattaatgcattggataccataattaatgcaattacaattagtattatggttatccagaacaagtctgcattttggacttctactttatttattacattggctggagagtccacagttttagtgtctattagacccattttgggtatactaattttatattttggagaatagaatagaaaatttcctttggatatacttttattttcaggtttacttatttcatttgtctctatagacatttatgtttggaattatctatttataaaatctttcaatgttcgcaagagtaaaaaaaaattgtattttacattgttgcctgcctgattctagctatggcttcacgggccatattgggttaacagggcataatagtatatgctccgttttacaatatttcttacaatttttcttatctatatatattttatatttactttatatttatatatatttattattatattctgctgttgatgatgctcatcaggtgtcagctgggcgtcgccgggggtggcacgctgacactccctcgctgctgtctatttcttcgccgctgaagacgtcgatggtcgctcacaagtccccaggcagtggggactccagattccttcgcagccaggggggcaggacttctttggttttgttaatgctggtgctggtgctggacatgcctggtattttggaacttcattaattgtgggtatatttttaatattatctgagtgagttttctcgagcttatgggtctttaattcttgctgatattgcaacaagtggtctagctctgcatgtagctttagagctttcgaccaaaccggtggcgtttgctgaccgtatattagccaccttacgtgggctatacgtttattcagcttagttttcaaaccgccacggtgtttgcccatactcaatagaactctactcactcagatttttccttggtttttgcagttccatttaattagtccagtcttcttccagtccagtgttcctttgttcctttgttttcaccagctttggtcaattcgtccagcgttggacgactgtcacggtcgccatgtaatgatgaactccaattaagaacacaagtccgttttaagttgaaggcagccgtcgggctgacatatatttattcaatttcttcttttgattttagagtaggcagaaatggttctgtcagctcaacgtctactgagtctctctgattttacagttttttaatatatttggacttaggctaatccgcgtagctgcgctgccgggtacgccagcagcggagcggcgttcttatgtatatcttatatatctaggcttatcgggagagcgagatatgtatgtacgtatgtaatatgtatttggtcggcgtgtgaatgctgaccatgcacttatactttttgccttcgagtgggtgatcatgttacatccgccctggcctaactgcgtgcataaacataaacataaacatagcaacaaagtgctgccataagttaatatgctattttatttaattgttcttaatattgcataggcacatactacactatcgctagtttcttaggtcttagcttttccttaggtttttcagatagaaaggcagggaatacagacagcaaaggtgagttaacatattactacgttccttcaagagtggctttcgtttgcgttatctgatgagcaataactttcgcccctagctgaaaaatgatacttctcatgttgaatgcgagattggtcttactgaaaataacggaaaatagaaaagctcatttgagtttctaaaaacgttgacctggcctcttattaacttaatttatatttctattgtagcttggaatactgctcagaggacaaagcgggagtgacggaagatacggttagtatctatttgatgaccatctttacgttatattagttctgatgagcattaactttcgcccctatctgaaattgaaacttctcttgttgaatgcgagattggtcttactgaaaaactaaaaaactataagcacatgtgggctatctatatccaatatattttaaaacccaatatatatttacagatcggcggaacgaaaactaaaaacgtgcttcgaataaacataggaattaaggtaagaatgccttaatttatagttgaatttcttattatcatgatgagcattaactttcgcccctatctgaaattgaaacttctcatgttgaatgcgagattggtcttactgaaaagaatttcgatttaaaaacacgaaaacaattttctaagcactttctaaccaaattttgcccattctctttacagatttgttgattaggttatgcaatatatggactataactttaataaaataggtaaatattgaataactaaaagttattaaaatgtttttaagtgatgagctttaactttcgcccctatctgaaattgaaacttctcctgttgaatgcgagattggtcttactgaaatgactcacaattaaaaacaagcctcaatcttttcgattgcctttctaataaaatgctactttttctttacagataagttcaaaaatttttttgaaaatcattgaatgccacaggaatcttaaaaggtaaatgtattcaaaatgaattatttctttgcgagaataactaacttctttgaaaattaactgatgtaaaaaaaaaactgaattatgtggcatgattttcacattaaccgcaacaaatcctactccaataggtcctactgacaattctcacaaaaataatgcatttaggccaatacaataacaacgatgcctaacaattgactctcctttgccttttcagttcgcatgacactttattgcgttgagtaaacaaggtaaaaataaatttaaaaaaactcgtttgcccagtttctagtgaaaatgttgaaataaaaatactgatttatgtggcatgattttcacattaaccgcaacaaatcctactccaataggtcctactgaatatattcacaagaaacttaaggtgtgttttaaccagatgtggttctaagtgaattttttcttatatttgcagatgtgcttttggcgactttccactgactgttccaattgagttccattttatgcccttttttaggtacaacactgcccaagacatcatataatactttataagcaaataaaagaaacatacacaaaaagcacaacttctttttaattagacaaggccatgtgtgctcttaacctaaaacacagctgaaatctatagaccgcttgttttgggcgggcaatcgtgggtcaggggtgcaaaaaagcgcgaaagaagagtgccgaccttcggatggataacttgtgcgtgtgcaaaatgaagct

SEQ ID NO: 6251 - DNA, 1998 bp, DROSOPHILA
attttctcgcagcgcgcaacacgtgcggaggtttctctccgtctattagttgatttagcagaaaacgtagataaaatggccgacgtggaagtacgcaaggagaagaaaaagaagaagatcaaggaggagcccttggacggcgatgacattggcacgctgcagaagcagggcaacttccaaatcaagccctcctccaagatcgccgagctggacacctcgcaatggccgctgctcctgaagaacttcgacaagttgaacatccgttccaaccactacactccgctggcgcacggatcgtcgcccctgaaccgcgacatcaaagagtacatgaagactggcttcatcaacctggacaagccgtcgaaccccagctcccacgaggtggtggcctggatcaagaaaatcctcaaggtggagaagacaggccactccggcacgctggatcccaaagtcacgggttgcctgattgtttgtattgacagggccacccgtctggtgaagtcccagcagagcgccggcaaggagtacgtggccatcttcaagctgcacggagccgtggagtcggtggccaaggtgcgtcagggcctggagaagctgcgtggtgccctcttccagagacctccactcatctccgccgtaaagcgtcagttgcgcgttcgtactgtctacgacagcaagctgttggactacgatgaaacccgaaatatgggtgttttttgggttagttgcgaggccggctcctacatccgtaccatgtgcgtccatcttggtctcgtactgggtgtcggtggccagatgctggagctccgccgtgtccgctcgggcattcagtctgagcgcgatggtatggtgaccatgcacgatgttttggacgccatgtggctgtacgaaaaccacaaggacgagtctatgctgcgacgtgtgatcaagccgctagaaggtctgctggtcaaccacaagcgcattattatgaaggacagttcggtcaacgccgtttgctatggtgccaagattacattgcccggtgtcctgcgctacgaggatggcattgaaatcgatcaggagatcgtcatttgcaccaccaagggtgaggccatttgcctggccatcgccctcatgaccacagccactatggcctcttgtgaccatggtgtggtggccaagatcaagcgagtgatcatggagcgagacacatacccgcgcaagtggggattgggaccaaaggcgtcggccaagaaggcgctcattgccgccggcaagctagacaagttcggaaggcccaatgaaaacacacctaaggagtggctgaccggttatgtcgactacaatgccaagaagccagcagctcaagaagtctcccccacaaatggctccagtgaacccagcaaacgcaagttaagcacctccagcgttgaggaaactgctgcggcggcggtatccgaggagactccttccaaggacaaaaagaagaagaaaaagaagcacaagggcgacgaggaagccccagaagccgctgaggaggaggcagagccagtagaaaaggagaagaaaaagaagaagaagaaggacaaggatagggacagagacgaagctcaggaataggaatcagaagtttctataggattaggttttaaagagaattctacgcttttttgtagaggcacctaccgattgctagctgttaggtttaaggagtgtttttatgtgtagaagtgcatacaaattacaaatgcatttaagtgacattcgcaatgcaataaattgaacattttattgtggaactctatcgctagtttcttaggtcttagcttttccttaggtttttcagatagaaaggcagggaatacagacagcaaagcttggaatactgctcagaggacaaagcgggagtgacggaagatacgatcggcggaacgaaaactaaaaacgtgcttcgaataaacataggaattaagatttgttgattaggttatgcaatatatggactataactttaat

SEQ ID NO: 6252 - protein, 508 aa, DROSOPHILA
MADVEVRKEKKKKKIKEEPLDGDDIGTLQKQGNFQIKPSSKIAELDTSQWPLLLKNFDKLNIRSNHYTPLAHGSSPLNRDIKEYMKTGFINLDKPSNPSSHEVVAWIKKILKVEKTGHSGTLDPKVTGCLIVCIDRATRLVKSQQSAGKEYVAIFKLHGAVESVAKVRQGLEKLRGALFQRPPLISAVKRQLRVRTVYDSKLLDYDETRNMGVFWVSCEAGSYIRTMCVHLGLVLGVGGQMLELRRVRSGIQSERDGMVTMHDVLDAMWLYENHKDESMLRRVIKPLEGLLVNHKRIIMKDSSVNAVCYGAKITLPGVLRYEDGIEIDQEIVICTTKGEAICLAIALMTTATMASCDHGVVAKIKRVIMERDTYPRKWGLGPKASAKKALIAAGKLDKFGRPNENTPKEWLTGYVDYNAKKPAAQEVSPTNGSSEPSKRKLSTSSVEETAAAAVSEETPSKDKKKKKKKHKGDEEAPEAAEEEAEPVEKEKKKKKKKDKDRDRDEAQE

SEQ ID NO: 6253 - DNA, 19399 bp, DROSOPHILA
gtggagggcaagtcggacgagggacacacctactattggaacgtgaagaccaatgaatccgtgtggaagccgccgaaagagggctatctgtcctacgaggagtacgagcgcatcaaccagctggccatcgaccagcagcagatctcccaggccgaggaatcgctgaaattccgcgccaatgtcgacgaggaagtggcgagggtgaaccgagagaagatgaaagccttccgcaggacggacaatcccaaggaaaagaagcagaaggaggagaggcgtcagacattcaaaacggaggaagaggcggccaccaaagagattggacagtggcaaactgtggaagtgaagtagggccttcctactaggttcaaatgcatttactgataaatttatggatttttgtagagcacctgagcagcccatcgactggcagctacccaaaacggattactacagtgctgcgcccgtggtttccgcctcgagtgaaccagaacctccagtcaagaagttcaaggaaaagacgattggcggtctggatgaggagatagccgccactgcgcccgccacgttcaagcggaaattcatcaggaagggaaacagccgccagcgcgccgaggattaagaagtactccatgtgcttatgtgcatatttcacctactagttaggtttaggcataggaaatgtttaggtttttaagtgtttgcttataccaattaaaaagtgagatgcgtttaactaatattagattaaacatagctattgtagaattattattatctttagtcgacttgcattcaataaatatttcccaacattttaaatagtaatatgttttttaaaaagttttaaatttcgataacagttatcgaattaggttcaatcggtgtgtgtctgtgctttagttgcggcatatttaggtcttagagctccgtccaattttagtgcatttccagcggcaacacgaggtatgtttctcccgtccgccaacggtcactctgctgctgttgttgtaggcgagcggtcggaatttgcgtcggaattgtgttgagtcgagtcgcgctattttgtttcgagtgcgctgtgctgtttggtttcgttccgtttcgtttcgctgttcgttttccactcgtcttcgaatccgcactgcaaacaaacaaggagaaggggaagcagcaaaagtggcgagtgcattcgcagcgtcgaaatttcaattgaaatctgaaatctgtgtggcaattgcagcggcactcggtgtaaatagattgaattgaagcgaaattctgcgagtcgaagaagtgaaaagtaaacaataacacgggcaatcggaaaagtggttttcgataaatcgcaccgcacacacacacctgtcagtgtgagtgtcaaagtgagtgtgtgagtgtgcgtcgaaggagaggaaaggtcaagccaaaaattgcgtaaagaaaaggaaaggaaagcttagaagaggggaaggggaattacgtcagtttcgcattcccgataaaaatttttgattccctaaacgatcctgatagccagccattacgataggcaaaaaacgataacagcggaaatttacgtcaatttggagcagaaagtaaacgataccaattcccgaaagaattcaaaaaatcaggcaagattcagttcgtgtacgcttacaacagctccgcgccccacgccgcctcctcctaccgcaccgccgtcgccccctttgcgccctacgcggccgagcggtccacccaccaccacccactcccgccccccgaggagcggctgccctcggacaccgagcagctagctggatccgacgaggatcgggctcagagccacgaagcggaagcggaggaatccgaggaggagcgcgcaggtagcggaccctccgtcaggccgctcatcgcagcagcaggagcaacaacaacgacaacgtcgacgtcagtagtaccggaagcggtacaaagggcggcggccaagggagcgacagagacggcgacaatggcggtggtgcgcaagaaacaggacgacaagtacctgctcgccctgcgggaactagtggccagcgggacggggagcaatcggcagtgcttcgactgcggccaaaaaggaccaacctacgtgaacatgaccatcggatcctttgtctgcacccgctgctccggagtcctgtaagtatttgccttcttgttgttgttttctagtctgggataatgtagggtagatccaggaattaggcataagtcgcctgctaggtgacctttgttatgagaatgtaactgtaacttggctattcatattttagttatttctttggttgtctctttgagtttaccaggtattcaagatacctctggaaaatatttcaaacaatttccgatgcacagattgatctagcttgagatttgtagaataaggatggtgggttatgaactgacaaatctcttaaaatcttccacaagaagaatccagatatacgacatttatggttatggctttcttgaatggcttttggttgaattcacacatgttttttatcaaaaagctggctacctatatacatattctgataactgccaaatgggctacccccactgcgtttaggagtcatataaaatattgccttgagtgtttccaaaaatagaaatgcaaattgagagctatcaacgtcgatccgtggacctttcttggtctcccgtgttatcttgacttgaacccagccaatttgaactcgcctgacgtccatttgggatctgtgcccgagtggagtgaccgataatttgcgatcgatcgatgcaatgtccgatcccgccccccattattatttcgtattgtgtgtgaaagcgaaagcaattccccaacaatttcgaacaatttcgcacaatttggcttcctttcctttttgaatgcaaatgcaaatcgaagacaaaactttcaattgcgcgacatcgcggcgaacgaaattgttttgtcttcgccggcgtcgctttctattcgtgtttttccgtggggagacgttttcgagagccgcccacctggcggttgagttgtgggtgtccttggcgcccctcagtttattttttatttttgcccctctaagtaatttggcaaattggctttgatttgtgagcactatggccaaattggggtcatatatgtattaccactccgccgacactgcatttcatttgatttacgcatttccggatcaagcacattacatgattgctcttaaacttccgcttggcccaggtccagaagcccagtctcccacgattcgtgtgccccagattgtggcctctcaattggacagcatgcgggtttctccgctgagttatctctatcatcggaaccaggttgaaaagtagccaactgcaatgcgttcgccctgctgcactctgcagtccccaactcttgtttcgatgactcattgcccattcctcagtcttcggtgtgcggtgctcaatcctcaatccttagtcctcaaaccttgttgccaactgccaagggaaacaaatgttggcatgtaaatgaaaagccacataaatgccggggacaccaagcgattgcactgcgagaaagggttaatggttaattgtaacaaacaattggtcctgttagtcggatacttctgcggtttttcagttactagtctaacgacgtgccacgtttctgccggtgtagccaaaaaggggtgtggaaaggtactgcagcaaatgggggactcggccgaggaagggggcgtggcaggggcgacagcaggcgacaacgaacttcctggctgaaaatgagactggaacgtcgactgcgacaagggagcgagtgcagggaataccaaatgaaaccaactcctccgactcacgaagaaatggctgtgcatgttcggcccgcctttggatattggaatccgctgcagaccggccggtcacttggagcgcttaatggaggaagcggttcaggaatgagaatggaactggcaatggtagtgggtttcagaatgggaatgtccgcggtggcgcggggaggaaaacccgtccgacggcttttgccagccacactcggttgtatttttgggccgaagttgctgctgctgttgcgcctccaattgcagacaaattgttgcacctcaatcaagcagcagtcgccgccatctgctgccacaccgcatttcggttgctttgttttttttttgtttttgttttattttactctttggcttttgcagggttcaaagcttgtgctggctcataaaagtcaagaaacttgttgattagataaggcgaaagcaaacggccattgggagcagagctgagcagagcagagcggagcagcaatggtgagccactttctcaggcttcgtcatcattcccaccgcacacaacacactaactacacacagcaatggtcatttgaatacgaagttgccggcttaatagtgcattattcaattattaaataacttggggatgtgaatcagtgcgagttcaggcgaaaaatggaaatacccattgctagatgtgaaaatgtttagctatacattggaggtgcttatatttctgctttaaatttcagatagatttacttcttctagtaagcatctttcataatgcttactttatttaatacaattttaccatcaaatgccgtaatttgttttccttgtgtcaactgtgattttttctaaactgattacatatacaagtgtttttatacgcttaatctttcaaaacaagtttattatgtgcgatttcctggacttcgttttggagtgtttgagtcatttttattatgtttttaaacttttatttaaaatattttatcaatcttcccggctgagctatttctgtggtcacgattgtatgtttgcagtcattcgttggttgtttgtgcgattctatctgtctgggagtcgatgactgtagtcatgctatagcacacataaaatacatatatatggcatatatggcatattagttgatatataatatgaaattattagataaactgatctgatgcttctaaaagtaccaaacttcctatctctgatatcaatttgttaccaaaccaagagggggtatcaaaaacctttcatatttgaattttcaaaaccattaagtcgtattgtaggtacatttgtacatacgggcaagtgaactgtggagcagaccccacccgctttccgaatccccgattccccatgcccatcgcgttggcattgcagttgcagtcgaactgggccaactgccttcgagtggagcccacaaaagctcggagcacgtctttcgctctctcgttttttttatttcttatttggcccgttctgcggctcgtatgttaatttccgattatgaaacagcataaacatgtctgcatttgacagccccgaaaagaggaccatggggggcggggttgggggaaggggcccactttcaccatgcggtgtcagctgtgtggcccctttactgctgcctctctatgcgccgaaaaggccaagacaacaaacgaacaaaccaaaagaaaagcaggcaaaaggcgaagcgtaagagcaattaaatataaaaacaagaggccaaatgtgtacactgaacagcactcccattttgtctctctattcaaaatgcaaaatgtattccacactgagagaaaagttgatcttaactgcgatcggagtgcatcagctgtatttgatcgcaataatctaaaattgcctaaatatgcaacaatataattgctctcttcacagtgtcgtaaccaaagttaattacaatgatacttgagtaatggtttagccattggatcaacgtgatgagattaggattatattttgatggcaattgctagactctggattttattccactgtattcgctgtgatttgagttcctggaatcaaattgagtcgccccgaactcgtttagcatttgaggaaatgtttgtgaatcgcttatgagttttaaaggaagtggagctgggggattgtgcggggtgtggggtccataaagataggaatatatatatatgtatttacggaggaggtgggggtggccggcaattattgcgcagttttgattcaaaggcgcaagcacaaggtgtcgttgttgtaattactgttggttcctttgtttcgctgttgttggtaattccaccatccaactcagcgccttccccctccacaccccccaccccttcctgcgcgttttggcgctcgccttgaaatagagatttgaaatctattaataatgcagaggcgcaaacgcgaagcgtcaagcgatttggctctcgcttttgagttctcaattctcagatgtgagtgcaattcaaatgcggaaacatgtgggcggacatggcgcgagggggaggtgctccactttcgcccaccaggcgccactccctcccccaaaaaaagagcacaaacagctggagagaagggccaattggcaattagaagagctcgataatacacctaaacaaaaaattcccttttcaaacattcaaacaatctcatatgttgaaaatcttgtgttctttgtagttgattgattcatgcatatactcctttcacattgctgaatgctgatcaaagacagggtgtgagttttttcaagtgtatgccgccagagaagagagtccaagagcacgatacagagcaggaggcgcctgcccacacggagatttatggtttctgcttggcccgcatacccattttctcgctgggaggcacatcgtccagtggagaccgctgcgtgcctcgattgctctttctgggaagtcctggggtgagctgccatatggtcacatgcacagtggatctgcatatgcatcttgttggccaaactgggcattcaattaatcaaattatatatatgctggatatattgaataactcattttagtcataaaatgtcacgatttatggcaaccagcacggccagccactgtagattccgccggagatgccataatccggctgcccacaaggctttgtccgagaaatctctttccggccgagtgaatggctcaatggcgaatccggaggtccttttgaatttttcattcgccatcccacggccaccgaaagagctcaaggctcttctggcaatttgcagctctggctcagacgatggcattattaaaatattcatagcgccccagtggagggtcctcgctccccattccaactgcccccttctcccgaacttctcctgctgccaagtttaatttacattgtgcgacaaacgcggcgaactgtcagcgaatgccaaaggcgaccactctgcgccaaaagcgatgaagtatattaaataatggtgcttctatatttggtcctaactgaaataagactgtaacttgagcttctatttctcgcagtgcatccgcacaacgtcgcaccgaagttagacatcagactcggactcgtttgaaggcgcccacatatgcagcttctctgggattgggggcgcatcggggagcacatgggagggggggcaagaagctgaacgggaatcggaatcgggttcggaatgcgtgggattctctttccatttggcctggcctaattgagtaacgccaccgagggagcgggaatgaaaaagtgcagcgtctgtcgttttgctgttttttcagctcagcataataactttgcaattaaatcgctccccagctggacagctcagctttctgcattctgtattctgcatttagagtgggtcagcgcttttctcgcaaaaagttctgctcgcttttcatgtttttccgggcctgggaacccgcggcggtgttatgaattgagctccacaagtaggcgaaatgttctcgagttgagtgaaagagagacggatcgctggatcgctgcggctttatctggtggctcagctataatatactagtcaagtagtttgcttcctctagccgcaacgaccttgaattgcaatttcccttgcacagaaagaaaaacttgtttgctaaaatgagtgattaatacctccttgatattatgcactcaataaaggcgcatgttgtggcttacatcatttgatctacgaacttcaagttcacattcacacaatttatttttccgtgtagtccgtgaccgatggatcgccgtagagctggatgcattggacggaacgtgaccagtccggactttcgccttccgatcgactttgactcggagccttggctcacttagagtgtgtttgtccagtcgaggtcaatttcgcacttggtggcagggaaagagggaacagaagccaaatcaaagttagcggcaattttcatctatttgccaaacaaacactcgcccaatatttgtggagcccactcgcaagtacagtgggcgctgggtaattaattgcctcatatgtaattgccaactttcaactggtaatttcagttatcccatttataattaataacaagccaataatgacaaagtgtagataaaccagacttttagtttaaagttcagagccttttgaacattcattcaatataaaatatcacacgaatgactgctccacggaaagcgctagaattgtatgatcaatagccctatgatatggaaacttgcgattattcatgctgtaagtattcgacgatcaaatctatagttagtcggttgcaggtttccaattagtcagtgtccactgtgtttggaaatgtgcgcgtttcaatggccaggctttgtgtctcgatcccgtcgccttcgctttttcgccttgtgtgtcacttgcggtttgaaattcaaacccggtggcgttgtatttttagctctggatgagcctccacttggctggctaagcatgagcttgctcgaaccactgtagtcccgagacaaagattgactttcagtgtaattccagggacgccacccacaaaacggcgactcggctgcacttacacatactgtgtacggctgattcatcgatggcacttctttatcttgaggtcaataccaatgccaatcaatctcaactcagctgcgcctcacgaaacttccccaagagggaacaaagagcccactcagcttaatttctcgcgtaattaggaagttgagatccaataaaggaggaacacactcgggcgatcatgatcaagtgaggttcttgagcagttatttgtttcattatttcggatgctttggagggaggaactctagtgctgcattgattggggcgtgtgttaatgatattcccagttcgcatggcgagcatcgattcctggtacgtatgtgggccccttgactcccacttatcgcacttgtcgttcgcaatttgcatgaattccgcttcgtctgaaacgcacttgcgccagacttctccggctggtctgatctggtctgtgatccggtctggtggggcgccagttgcgtttcgagctcatcaccagtcactccgcagtcgcattctgccagaggtctccgatcaagagcgcttctccattcgagattcaaacgcagtaagttggcctaagaccaaatcgaaggcaaaggaattttattcaatatttaattaagtgaagatttgctattaaatatataaatcattgagagttcaaaataaatggtcgaaattgtttcaataaatttccgtttcctggcggcattaaagtgatttaaaccgtgaagtccaataaattgataagaatgaaatgataaattgtcttgttttccatttcggaatggagctcgtaataattgattttaacgtgtattgatggctatggtgatattgatttaattggccatccattttgggctatttcgtaagcggcatttgggccattaaggcccgaaactggaccacgccacattggcgtagctagaaagtgtttgttggcctaaagagtgaggctctaaaaatcaaattagctccgtggagtggtcataactaactgtaatagctgctccactggccccagagtcattcttctgcatctccccgagatcatcaccacaccgctttcggttgccaagcaacgagtcatgtcttggggcttggggcaaggtcttcccgtctccggggttctttggaaattgactaattgcttttttcagccccacagtgaatgtgcccgcctgcacagagagaaaaatgacggctattctagtgcataatcaggcagtttaagatttcaacgacgattgtgatcgcatactatatatgtgtggtatatgtatcatattaatgttccattttaaatatgccagctacgaagtatttctctgtgtgtaaaccaacatatacatatacttgcgtatattttgctgaattggcaccgctcttgaacccccgactgtctgggatccgtgactcatgggaatgaaaaagaaatggtatttatactcgagaaattgcgtagatgcttttgtttttgctcggtatctgttttttgtttcgcatttatatttgcataccctcgacggggggaaatgagtggcaatgctaaacttgttgtgcatttaatttaatggacgtgttgtttgctttggcgaatttattcaaatctgaatcgaaatggaaatatatacaatgaagtaaacaaatatttcttctataattcagcccggtgcaactaaatgaacttagtaaatatagtaatgctcttattcagaccaaaaattaccattaacacagttgtcgtcgaatgtagccgaccagacgtcagtaaaaataatcagtgattgttgcttgtttaatattcgcgtttcttataatcgtcgaaatggcgttgtccatatgtgtgtccccttccgaatatatatatatatatatatatatcccctctagattgatggttcgggtgtttcccacttctaggcttacacgaactcaaaggttcgtacttaagttaatacatatttattttcatatttcggcctgcagttgtttactttttgattttctcgatttccgctgaatattccagtggtatatagtatatatagagtacatatagcatgtggtaggtccgattccgaattcgattttgagtttgatttgatttgctttgtatttcgtgggttgttcgacgtactcgacgcggtgctcattgtatttattttctatgcatatcaccgtttggctttttgtattttctgccgcaacgagttttacttttgtttttgtttgagagcgcgaagctcagctggttggttttttcacgctgagtgcgcaaaacgcgcaaaaacgggttttgcacttttgaagccagcgcaaaatgccagagtgtgagtgattgtaagctaagctttttgtttatctgcactacagtcgctcgtctcagtctctaaattgtctctgtgtttgttttaattttcgttgtatccacttgtgccaagcacgaagcgaaactgaaaccgccgagattcgagattcgagattcaagatccgagatctctgatcgcgggtcccgggtctcatccggcggagacggtgactatgtggaaactgtgaggtggggtgtcgtcgtatgtacatacatgtatgtacatatatatgccggtggtaaccttcctcgaaatggtccataaaatctcaaacaattctcagcctattagcttaaatgcatccttaaagaaattcccattacagtcgaagcaagtaagtaagttatttgctagcttgcaagttaatgtgcataaatgtatttcaaatatcgtactatgtttgcttccctttcaacagaaatccattttagtatcgcctttgttgaaattgtactctccaagtcgattactaattttgtgaattggtttattgtatcagggggataaatcccttttcagtcatgtcagtcccctttgcctgtaccctttgccctttgccctttgaactgccatgacctgcgaggtgtgacacagttttccgattccagttgcgagttccagcgctgctttgttgactctcaattagcatggcactctgccattctcgagctctcgccatgcagatgtggctggatgagaattcctccgctgatgacgacgagtgtgtgccaatgcgaatgtgtttactgcctgggttcgtataacaattagcattgcaatgctaatattgaacacagcgcaaagaggcttagagtttgcattggaaaactggcaactgagacctagttgaatgctttcgtgcatccatcctgtttactggcgcgaaatcgggtctcgaaattctcgatcattcttgaagcagtaaatatatatatacttgtacgtccttaacccgcatgacatgtgtagtttcctgagaactatttccagcggaagtttagcatttattggcgcacttactacgtgatttatttcccagaaccgcttttaaagaggctattggatttttttttcgcattaaccgaagactcagctgcatggaaatttgcagtcattacggctgtgattgtcaattatctgctgccgcctccctcttgactgagcgtttcaaatgcacgccttaaacggtgggcgtggccgaatgagtgcctctaatgccgccactgcttttacattccgtgtagaggcaactttcactttctccgccgcggctggatttcaaaaatagccactgccacatggcgcattattctgccacggtctttgtttttgccacttgcagctgccactgccactgccactgcagctacatctgcatacacatccacaaccccagccccatctactcctcctcctcatccgatgccctaacgaactgcctgtgcgtgctctcgtggatgtggccactcggaaaactgggcaccacttgagtggtgtttgccgcacacaaaaaaaaaacatcacgtactgtgctcgccttagtccggcaaatgccatgttgatattttaataggattaaaacggaataaatttaaaaggtaaatcttattcgaaaattatcctcgttcagtggttattggctttacagctactagcttttcctgcgtcttaaacttctcttagctttgtatgtcgaaatggaaattaaagtgtcattggataagtagaacaccgtaaattgagtttatttaatgatttaatcaagtgtctattaaggagtggggtgtttcgagggtttcaagcacactgccactctttcaagtgcctttaatgtggtcaccattgttagaattaggtatttaaggttaactgatttaagatacttactaatagtaatagttcaagagcggactgataagataagatagcaatagagccttctatacaaactatttgttacttccccagacctttaaaacagatagcaagttgcgaattgtttatttatttcaactaaagtgagcaagtgagctctatttctccttgtgcagcgatggccattctgtattgagacggcttacaagccgtgtaaggtcagacaacctcctgttgatttccgctgcggaatcgcagcttcacagatcatttagccgccggcggaagtcgtcctctgctgttcagctgttcagctgtgctccgttggtcacgggtcagccgtggaggagttgctctaatccaatccccttcgatccgctcggctgcgagccctacttaagtgagagttgattgttttctggtgagcactcaaagacatccgctttcctcctcctcctccttctatttctatctctagcagggacttccattttccgtcctcaaattgagtcacaattgcataagaagcatgggaatggacgggatgcaatggcaaaggacgtcattcccttggctcagatggctgtaatggcattagccagcaatcagcagcttctagaattttcactgcatgttccacatcagcttgccggttttgatacccagtacgagaaggggaatatgggttgcattcattcatcaggattttcagcagacgaaaaacaaaagttcttgaggacaaaaggattaaaagttttgcattgcctcgtgttgagttggtactattaagctgcagggtatcttctagtcgttagacccatacctcttgttctatctgtttccatgcggcaaccagttaaccagctaccaacaacctacaaccaactggagccagcgaagcgttcatgtgaaacgtccagtttctgtttcccccagcaatgcatatttggccctcttctaccacttttgccacttttggtgctgtttttctgcggttgctgttgttgttactgttactgttgccgttgccgttgctgttgctgttgccatgttgtggccaagttgttgctgccacccgtgtgtactcgtttcgttcgggaaattcgtgaaaaaccgaaattagccatcgttgcggggcgaaatttgctggaaaactctccaccggccagggcgcctcttcggtttgtttatgggtttcatttttcatggcgttctgggcactccaaagtgctccaattgctttctgccccaaggccagcgcaattaatttgcgcaattaactgaaattgaacgcctatttgacgggtcattctggtgggtacaagtgggtcaagcaaccaccaccatcttcgccacctgactgcaaatgggcgacaaattgggctaatcttgagcaatttccgaaatagaatagagaactactttggagaactagagccgatggttgttgattattaactagagaagatgaacatacgcacattgaatggtttttccttaatagaaaatgggttttcattacaatatctttctgtttgcctcttttccaggcgcggtctgacgccgccacatcgagtgaaatccatatcgatggccacattcacacaggacgagatcgacttcctgcgcagccatggcaacgagctgtgtgccaagacctggctgggattgtgggatccgaagcgggctgtgcaccagcaggagcagcgcgaactgatgatggacaagtatgagcggaagcgatactacctggagccggccagtcctcttaagtcgctggccaatgcggtcaacctgaagtcgtctgctccggcgacgaaccacactcagaatggccaccaaaatgggtatgccagcatccatttgacgcctcctgctgcccagcggacctcggccaatggattgcagaaggtggccaactcgtcgagtaactcttctggaaagacctcatcctcgatcagtaggccacactataatcaccagaacaacagccaaaacaacaatcacgatgcctttggcctgggtggcggattgagcagcctgaacagcgccggttccacatccactggagctctttccgacaccagcagttgtgctagcaatggcttcggtgcggactgcgactttgtggctgactttggctcggccaacattttcgacgccacatcggcgcgttccacaggatcgccggcggtgtcgtccgtgtcctcagtgggttccagcaatggctacgccaaggtgcagcccatccgggcagctcatctccagcagcaacagcagttgcagcagcagctgcatcagcagcagctcctcaatggcaatggtcatcagggcactgagaactttgccgacttcgatcacgctcccatctacaatgcagtgggtaagtttccatctctcagcccggctttctttatttttcattcaattagtttgctttctttatcaaaagaggctatattcagcacaacatttgtgaaatatgatttatcattcagagtgtatttaatcctttcgaatgaatcattcatccatcgaagcaaaccaaattgtacatgtattgaacgctaagtgaaatgcagtagttttcaaatatgagttgttcaaacacatcctttcgctcctgcacctgcggcttggcatcctgaaagaccctgcagcttgcttgcgcgcccttcgctcgccttccacttggagcaccccacaccaagagttcgcatccactttctaattatctcaatatttggctgaatccagctccaccgacttttaacgattggatcagcgactggagcaggcggggcttccacgatcccttcgacgattgcgatgactcgccaccaggtgcccgccctccagcacctgcgccagctcctgctcaagttcccgcagtatcatcaccattgccaaccgtccgagaagaaccagagcttgcgtggaatttttgggaggacgagatgcgaatagaggcgcaggaaaaggagtcccaaactaaacagccggagttgggctactccttttcgattagtactactacgcccctttccccttcgaatcccttcctgccctaccttgtcagtgaggagcagcatcgaaatcatccagagaagccctccttttcgtattcgttgttcagctccatatcaaatagttcgcaagaagatcaggcggatgatcatgagatgaatgttttaaatgccaatttccatgatttctttacgtggagtaagttcttgattgccttgagttgagttttctgttatggtttctgttgcatttggctcgctcttttgatcgattgaccttgtttagttcatgttcggtttttactgcgaagacatatcccggaagagtgtattaactagtcttcccatgttgcaggtgctcccttgcagaacggccatacgaccagtccgcccaagggcggaaatgcagcgatggcgcccagtgaggatcgatatgccgctcttaaggatctcgacgagcagctgcgagaactgaaggccagcgaaagcgccacagagacgcccacgcccaccagtggcaatgttcaggccacagatgcctttggtggaggtgagtccttttaaccgagctttttttcgtgcggcccccactaattggactcttgttttcagccctcaacaacaatccaaatcccttcaagggccagcaacagcagcagctcagcagccatgtggtgaatccattccagcagcagcaacagcagcagcaccagcagaatctctatggccagttgacgctcataccaaatgcctacggcagcagttcccagcagcagatggggcaccatctcctccagcagcagcagcagcaacagcagagcttcttcaacttcaacaacaacgggttcgccatctcgcagggtctgcccaacggctgcggcttcggcagcatgcaacccgctcctgtgatggccaacaatccctttgcagtgagtatgagaaccgaccctctggattaaatcgacaaattagaaagtggtggcaaggaggcaatctgttgcaagtggagaagtgaaataaaatacttaagaattctagatacgtgcagtttcccttttggtggacctcaccagtcacacactaccttagatacattcatgatacttactattcctctaattagcaattgtaaaactttgtgtgccgtccatagtgataaacaataacacagagctgagtaattcttctcttcaataaatattaatcaagcaaacattctgtttcccacgttcctttgccacattaaatccagacaggattggctgcgtccagatcatcaatatttgctaaagacacaattcctcctttataccccacaggccagcggcgccatgaacaccaacaatccattcttatgagactcaacccgggagaatccgcctcgcgccacctggcagaggcgctgagccagcgaacaaagagcagacgcggaggaaccgaaccgaaattagtccattttactaacaatagcgttaatctatgtatacataatgcacgccggagagcactctttgtgtacatagcccaaatatgtacacccgaaaggctccacgctgacgctagtcctcgcggatggcggaggcggactggggcgttgatatattcttttacatggtaactctactctaacgtttacggatacggatatttgtatttgccgtttgccctagaactctatacttgtactaagcgcccatgaacacttcatccactaacatagctactaatcctcatcctagtggaggatgcagttggtccagacactctgttatttgttttatccatcctcgtacttgtctttgtcccatttagcactttcgttgcggataagaactttgtcagttattgattgtgtggccttaataagattataaaactaaatattataacgtacgactatacatatacggatacagatacagattcagacacagttagtacagatacagatatacatatacgcttttgtacctaatgaattgcttcttgtttccattgctaatcatctgcttttcgtgtgctaattttatacactagtacgtgcgatatcggccgtgcagatagattgctcagctcgcgagtcaagcctcttttggttgcacccacggcagacatttgtacatatactgtctgattgtaagcctcgtgtaatacctccattaacaccactcccccaccacccatccatcgaaccccgaatccatgactcaattcactgctcacatgtccatgcccatgccttaacgtgtcaaacattatcgaagccttaaagttatttaaaactacgaaatttcaataaaaacaaataagaacgctatcatttaatattgttttcttttgattcctgatgtagtccaaccatgagatcgttgtagaattccttggtttttgtctgcaactatgcccaattaaaaacaaatagttttaatgaattggcatacttttaggaagtctcttgacaaaaaaaaaaatactgagtaaaagtactgcgcttcatttcttcaatggcaatgtagcaatctaacatgttaggagattggggtgcaggactgccgtgtttctaaccagaagcatctccaaactccagaatggaatcacagactccgaaaagtatgctactgatggtaatttcaatgggtaagtaacaaaagcaggccgtttggtttatttgaatgtatttttattcatttccgtttcggtataatttctagtttgttctcttcgtctttagtactagttggtttagcaattgtttaaattaccataaattatttaagttttatgttacgtagtcgtataatgtagatttataatttaaaaattcgcatgggaaagaaagtcgaaagtcatttaactggcagccactcctttctatcgttccgttccttcgctaattactttcctagagctaaataaaaacaaaataataatcgcaattgtaataatgaaccgtaaacttagaaaaacaaataatagcaataattcaaaacaaaagttaaagctggaatcgctgcgttctactcgtaatcgtaatcgtatcgtaaataagagtacacgtatatctagagatgaaagagtgcctaggttagcattgcatcaactgtacagtatggcttatacgcgtataagtcgccgccctcctccacgccagcaaacgattagattatgtttataataatgcggggagcagactccgcgcggagatatcaagtgtatttgttttgttttgcgtggttatgt

SEQ ID NO: 6254 - DNA, 3355 bp, DROSOPHILA
tgttgttgtaggcgagcggtcggaatttgcgtcggaattgtgttgagtcgagtcgcgctattttgtttcgagtgcgctgtgctgtttggtttcgttccgtttcgtttcgctgttcgttttccactccgtcgaaatttcaattgaaatctgaaatctgtgtggcaattgcagcggcactcggtgtaaatagattgaattgaagcgaaattctgcgagtcgaagaagtgaaaagtaaacaataacacgggcaatcggaaaagtggttttcgataaatcgcaccgcacacacacacctgtcagtgtgagtgtcaaagtgagtgtgtgagtgtgcgtcgaaggagaggaaaggtcaagccaaaaattgcgtaaagaaaaggaaaggaaagcttagaagaggggaaggggaattacgtcagtttcgcattcccgataaaaatttttgattccctaaacgatcctgatagccagccattacgataggcaaaaaacgataacagcggaaatttacgtcaatttggagcagaaagtaaacgataccaattcccgaaagaattcaaaaaatcaggcaagattcagttcgtgtacgcttacaacagctccgcgccccacgccgcctcctcctaccgcaccgccgtcgccccctttgcgccctacgcggccgagcggtccacccaccaccacccactcccgccccccgaggagcggctgccctcggacaccgagcagctagctggatccgacgaggatcgggctcagagccacgaagcggaagcggaggaatccgaggaggagcgcgcaggtagcggaccctccgtcaggccgctcatcgcagcagcaggagcaacaacaacgacaacgtcgacgtcagtagtaccggaagcggtacaaagggcggcggccaagggagcgacagagacggcgacaatggcggtggtgcgcaagaaacaggacgacaagtacctgctcgccctgcgggaactagtggccagcgggacggggagcaatcggcagtgcttcgactgcggccaaaaaggaccaacctacgtgaacatgaccatcggatcctttgtctgcacccgctgctccggagtcctgcgcggtctgacgccgccacatcgagtgaaatccatatcgatggccacattcacacaggacgagatcgacttcctgcgcagccatggcaacgagctgtgtgccaagacctggctgggattgtgggatccgaagcgggctgtgcaccagcaggagcagcgcgaactgatgatggacaagtatgagcggaagcgatactacctggagccggccagtcctcttaagtcgctggccaatgcggtcaacctgaagtcgtctgctccggcgacgaaccacactcagaatggccaccaaaatgggtatgccagcatccatttgacgcctcctgctgcccagcggacctcggccaatggattgcagaaggtggccaactcgtcgagtaactcttctggaaagacctcatcctcgatcagtaggccacactataatcaccagaacaacagccaaaacaacaatcacgatgcctttggcctgggtggcggattgagcagcctgaacagcgccggttccacatccactggagctctttccgacaccagcagttgtgctagcaatggcttcggtgcggactgcgactttgtggctgactttggctcggccaacattttcgacgccacatcggcgcgttccacaggatcgccggcggtgtcgtccgtgtcctcagtgggttccagcaatggctacgccaaggtgcagcccatccgggcagctcatctccagcagcaacagcagttgcagcagcagctgcatcagcagcagctcctcaatggcaatggtcatcagggcactgagaactttgccgacttcgatcacgctcccatctacaatgcagtgggtgctcccttgcagaacggccatacgaccagtccgcccaagggcggaaatgcagcgatggcgcccagtgaggatcgatatgccgctcttaaggatctcgacgagcagctgcgagaactgaaggccagcgaaagcgccacagagacgcccacgcccaccagtggcaatgttcaggccacagatgcctttggtggagccctcaacaacaatccaaatcccttcaagggccagcaacagcagcagctcagcagccatgtggtgaatccattccagcagcagcaacagcagcagcaccagcagaatctctatggccagttgacgctcataccaaatgcctacggcagcagttcccagcagcagatggggcaccatctcctccagcagcagcagcagcaacagcagagcttcttcaacttcaacaacaacgggttcgccatctcgcagggtctgcccaacggctgcggcttcggcagcatgcaacccgctcctgtgatggccaacaatccctttgcacggcgccatgaacaccaacaatccattcttatgagactcaacccgggagaatccgcctcgcgccacctggcagaggcgctgagccagcgaacaaagagcagacgcggaggaaccgaaccgaaattagtccattttactaacaatagcgttaatctatgtatacataatgcacgccggagagcactctttgtgtacatagcccaaatatgtacacccgaaaggctccacgctgacgctagtcctcgcggatggcggaggcggactggggcgttgatatattcttttacatggtaactctactctaacgtttacggatacggatatttgtatttgccgtttgccctagaactctatacttgtactaagcgcccatgaacacttcatccactaacatagctactaatcctcatcctagtggaggatgcagttggtccagacactctgttatttgttttatccatcctcgtacttgtctttgtcccatttagcactttcgttgcggataagaactttgtcagttattgattgtgtggccttaataagattataaaactaaatattataacgtacgactatacatatacggatacagatacagattcagacacagttagtacagatacagatatacatatacgcttttgtacctaatgaattgcttcttgtttccattgctaatcatctgcttttcgtgtgctaattttatacactagtacgtgcgatatcggccgtgcagatagattgctcagctcgcgagtcaagcctcttttggttgcacccacggcagacatttgtacatatactgtctgattgtaagcctcgtgtaatacctccattaacaccactcccccaccacccatccatcgaaccccgaatccatgactcaattcactgctcacatgtccatgcccatgcc

SEQ ID NO: 6255 - protein, 602 aa, DROSOPHILA
MAVVRKKQDDKYLLALRELVASGTGSNRQCFDCGQKGPTYVNMTIGSFVCTRCSGVLRGLTPPHRVKSISMATFTQDEIDFLRSHGNELCAKTWLGLWDPKRAVHQQEQRELMMDKYERKRYYLEPASPLKSLANAVNLKSSAPATNHTQNGHQNGYASIHLTPPAAQRTSANGLQKVANSSSNSSGKTSSSISRPHYNHQNNSQNNNHDAFGLGGGLSSLNSAGSTSTGALSDTSSCASNGFGADCDFVADFGSANIFDATSARSTGSPAVSSVSSVGSSNGYAKVQPIRAAHLQQQQQLQQQLHQQQLLNGNGHQGTENFADFDHAPIYNAVGAPLQNGHTTSPPKGGNAAMAPSEDRYAALKDLDEQLRELKASESATETPTPTSGNVQATDAFGGALNNNPNPFKGQQQQQLSSHVVNPFQQQQQQQHQQNLYGQLTLIPNAYGSSSQQQMGHHLLQQQQQQQQSFFNFNNNGFAISQGLPNGCGFGSMQPAPVMANNPFARRHEHQQSILMRLNPGESASRHLAEALSQRTKSRRGGTEPKLVHFTNNSVNLCIHNARRRALFVYIAQICTPERLHADASPRGWRRRTGALIYSFTW

SEQ ID NO: 6256 - DNA, 2677 bp, DROSOPHILA
ccgtgggtctttagaggcggcctcattgccgacctgcaacgcctgatgcctgtggactcgggcaacgacctgttcgtgtacaagcttccggaacagcccacggccaactactatctcttgagaccttactgcaattcggacgaacagcaagtcaacgatttgtgcactcgcctgtatttgcagtggcggggagagctggacggaggcaggcacattccgttcccgctgccggcgaatgtgccaaacattgtggcggatgggctgatcggtggatatctcaccctcagtccgcaactgtgcattgtggcctacgacgagagtaaccgtatcattggatattcatgcgccgccctggatgtcaacatatttcgacgcaacctggagctgtgctggtacacggaactgcgtgagaagtactctagagatatttgtccactggagggtggcgaggaggttgtacagctcgtcacctcccttgtggagagttatcatgacagcagcggtaacggggctctggaccagtgtcccgtagaggtgagcggctccttccctgccgtgttgatctccggaactttgcgcgaagcggaggagcgcgactcgggaataaccaagcggatgctcaccgtacttctggccgccctgcgtgcgaacggctgctttggtgctcacgttcgcgttccgcaacaagatgtcgcccaggtgaacttttattccagaatcggtttcgtggatgtctatcgcgaggaggccaccaagtgtatttacatgggtcgccgtttctagcgtagctggttgccaccttcactgcctccacttttaatgttccttcatctttggtattccggctagcggtgctagctactcacgtcatgtcctcgtcctttttgtattcccttgaggtataaagtttgtataactgaccaacccttccagcatttatcgtaagcattgttttcttactgagaaaaacaataaaaataccaatttaataaaacttttgctagcttttgttcaggtcgtagaaccagacggtgtttactccgtcctctataatcttcacgtgctctaggctgggtagtggaaagcggcaggcgataatcttggtgttgtgcggacactcagcaatgagtttgtgttctagatcttgcatcatctgctcaaccccaaaaatgaccacgaagttgtagtcctttatatcgaacttccagagatctcgccgaaaaaatctcgtccgtttggaaacgctgtgacgcagcgcggccaggcgcgagtagtagaccagccatgggtttagctccacgccatctgcttttagagcaccacaatgctgtgccgcagctggaaagaattacataagttatctgcaatgtttttaaatggactaggtgaagcgtacttacccactacaatccgtccgtcgccggatccaatgtccagcagttttccggccgaattcttgggcaggaagctgagaacgttctgtatttgctcggtcgtcgctggcacataaggcaagcaaatcctccggaatgcaggcgccacaaaggaggcgcacacaatcgacagaccgatacctactccgcccgttgctgctatcaggatcttgccgcccgtggacatgccacttttcggcgtcttggcaagcggattcggagcagattcgttgaggagttccatttctattatcagaaattcatgtttacctcaattgcttagtattcagcgattatttatcgatagctggtagccctgcagggggcgctgttacaacggcgttttgcaccactggaccgtgcacactgtttgacatgtggcaacacttttttcgtgcgtttgatgtgtgcgtgcgcttcctattacaattttttcgaaggatttttcgtgtgtcttgttgacgtgcagcgcggcagaaagtgaaaaacgccatcaaatagtgccgtgcaacagggcgggtcaacgtttggcataaattgcagtgtgtgccccgcgtgcggacaggcgtaattcgaaaaaatggcgaacgtaagggacagcgacacatcactgtggctgcataataaactgggcacctcgaacgactcgtggataaacggctccatctgctcgcagctgaacaaggaggtgctgcgcaacatcaaggaatgcttccccgatctgcaaacgcaggtcaaactgaagctcctactcagcttccttcacatcccgcgccgtctggtggaggaggtaaatgaaatccaatgaattgaaatggcgttggtgtatggaaaaagtacaccagtgcatacgcacgcatactgcggcccgcgcgcacacgtacacggagtacacttaccgttgttgaaacaaaaagtgcggacaatttttaaatactcggaaaatctcttagatcccatcacctggcggaccccaaagcacatttcttcgccttttaacatttcccccccgggcgatttcgcgggttggtgaaaataaatattagcaacgtttcccgccacttctgcttttgtgtacacatttctctctctccgacacttgtgcgtggatttctctcccgtgtgcctcggtgtgttcatgtgtgagtgggctgttgtgggtggccgcggattcatttgtttgttgtgcccttcccacagagcaattcgaattttatcagacgtttgacatcgcagttaaaaga

SEQ ID NO: 6257 - DNA, 615 bp, DROSOPHILA
atggaactcctcaacgaatctgctccgaatccgcttgccaagacgccgaaaagtggcatgtccacgggcggcaagatcctgatagcagcaacgggcggagtaggtatcggtctgtcgattgtgtgcgcctcctttgtggcgcctgcattccggaggatttgcttgccttatgtgccagcgacgaccgagcaaatacagaacgttctcagcttcctgcccaagaattcggccggaaaactgctggacattggatccggcgacggacggattgtagtggctgcggcacagcattgtggtgctctaaaagcagatggcgtggagctaaacccatggctggtctactactcgcgcctggccgcgctgcgtcacagcgtttccaaacggacgagattttttcggcgagatctctggaagttcgatataaaggactacaacttcgtggtcatttttggggttgagcagatgatgcaagatctagaacacaaactcattgctgagtgtccgcacaacaccaagattatcgcctgccgctttccactacccagcctagagcacgtgaagattatagaggacggagtaaacaccgtctggttctacgacctgaacaaaagctag

SEQ ID NO: 6258 - protein, 204 aa, DROSOPHILA
MELLNESAPNPLAKTPKSGMSTGGKILIAATGGVGIGLSIVCASFVAPAFRRICLPYVPATTEQIQNVLSFLPKNSAGKLLDIGSGDGRIVVAAAQHCGALKADGVELNPWLVYYSRLAALRHSVSKRTRFFRRDLWKFDIKDYNFVVIFGVEQMMQDLEHKLIAECPHNTKIIACRFPLPSLEHVKIIEDGVNTVWFYDLNKS

SEQ ID NO: 6259 - DNA, 3480 bp, DROSOPHILA
cttatcaaggcatcaagatcgagagcaactgcgtcgttggcggcacagaacgaaatttggaataagaataataagttaagactgccatttgatgggtcaaaaaatcatacacagttttaagacaagatctttacgaaataatatgacttactactcaattaatttcattgttaatctgaaagaagtaccattttttgtttgcagtgtgctgctgctgattctttgaatggccttgggaaggttggcggaccaatgtctattgtgaaataagaaatccagcgaattcagcaagacgaaccttgactgtgggtacgtatacgtaatgtagcaacttctttttcgaagctggaagcatctgcagagtgcagagatcaagatctagcatctagatcttaattctctcgaaatctcagcccactgacaactaacatttgggttgatagcagtgcccgtatcgtcagtttttccattagcgatttggagtggaaaacacatcgtgaccaggaggtcaaccgccaataatacaaatgtcgtattgagtggccgaaaatatttattaccatttcgctggtggtgaaattagaatcaaaataaaaacaaaaacatagatttaggaaagtgataagcagtcaaattagcaggtcgtgactataaaatttaaatgttcgtttaaatattgattgatttttccatatttaaggcacaagcatctttttaaaaacattgtttcgaatgtagaagtaagttcagtttggttttaatatattgaattaattatattgaaacgaattgaatatagaatatatattctattacagttgactatattaaacatatatatgtataaatatgtttattttatggcctttttgcttaatatttagttataatattttataattttcctgaaagcaattcaccggtggaaacaagttttcttcgttttggcgcttggtcacactttctgtttcggtcaaaacaaactgaacaatagttaatgtttttaaacattttcgatgcgactgcataattaggcatggaaatcggcaacgatcagtcctatcaggacttcttcgacaagttgcgaaggtgagtctgtttctggacgggattgggacacttggcacagtggtatatacatattaaatatatatgaactccagtgaatcgggtcctcgcaacttgcgccagatctttgaggacgacgatcgtccgctggcgaacgaatcatccagcttgcgctatcagccaggcagctccaaaaaattgcaggctggcaaaagaccggccatgaccaggagtagcacccaggagacgggtgattcaccgcctgccgcctggaacacggccattgccaaggtggtgcatgcctatcggagcagcgagaacgttggacgcgtcggcctggccctctcgattctgggcgagatggaggccagcaagctgattgtctaccgcagcaagagtcaggtgctgaccacgctgcagttgacaccgcgtggcggcaaggtgatactgcgcgaatcctatctgcagttctacgatgacgagcagcgcttctggagcctgcgattcgacaaggaaccggatgagaaggaattcataacgtttatggtcaaaaacaaactgccagtggagcactatctcagcgagatctcatcctccagctcggcatcgccttcgcgtgaggatttatctaagatccgaactaaagcaacggtcacaaagacgacgcctaatccgccacagccgcaaccacgttcccgcgtaacgctgccaacgctggagaaggcggacgatgaggaacgcgaacgggaaacagagacaccttccaatgaggatgtgatagtaacgccagtgccgcgacccataggttcgtcaaatgctcacaggaaactcagtgccagttccctggcggtggccaacgcttcaacgagcagcgatactccgttggctgtgacgacactggacaaatatctagacgaacagcgtgcctcgggtgcgttaatggagcacaagatggacgccattctgcaggccatgaatcgcatgggcggccagtcgagtgttgcgcccaagaagcccagtgatccgctgctggaacgcgacagcgaggacgagatgctggagctggagcagaagctgctcaacttgaagcgggagaatcgagcgctaatgcgcaacctcaaggcacgcgaacaggcgctggaggatctacgctgctcggcgtgcgccctttgcgaggagctactagtccagaatggcgagctcaagtcgcagaatgcccagctgttgttagccagccagcatatttccgattcaagcacagctgcttcgcctgcccattgccgcaattgcgagtcgtcttcccggcaaatagccaaaatgcagctacacatttccgcactgcaggaagcgctgcgaatctttcagaaatcaggcgactccagctccagttcgggtcggttatagcacctaacgtaggcgtattatatatgttcggtattactatcgaaaagtgtattaaatcatttgttaggtcgcgtaacatatccacaaatacaagccagacactattagctatctttaagtcattagattgccatgttattgggctcatttacaaagcgattttctaatctattacaactattattactaaatgtgagatataaaatatgttgcggaagattataattaatagcaacccatgctttgctctctctcaattatgaaaaactccgacttcctcttgtacaaactaatttgttgtatttgcagcacacatcgggctgaaatttaaggtatagggacaagtctacggtttgcgcgtctcataatccgtgggaagagttcatggagaagttgttttggggcctggaactggaagtggaactggcagtctctctgtggaagtgaggagcggaaaggatgggctggcggtcctgctcctttacgtttttacggctaaaatggaaagcgagctagtttgcggagcgagtgctttgggaggcagctgtctatccatcctgatgctgatccagatccagatacagatccacatctagattctcttgctgatccagttaatccttgtttgtttcttttctttctcagtaggtgctgctgtcgctgaggctgctcaggtagctgctgccggcggtcggagcaccggatccgccggcacgatgtcgcttccgcttcgccttggtcttcttgcgtcgcagcatggccgtgtccgtggacttgcgcttgtacttgccctgccgcttcttcttgcgtccgtactcatccgattcactggtgctggactcctcgttgtcgctggaatccgattcagacgaatcgctcgatgtggaggagtcatcactcgaatcatcgctcgatgacgacgatgagctgctggttgatgacgaggaggaggaggaggacgacgacgacgacgacgaatccgagctagaggtggaggatgatcgtcgt

SEQ ID NO: 6260 - DNA, 1406 bp, DROSOPHILA
tttttaaacattttcgatgcgactgcataattaggcatggaaatcggcaacgatcagtcctatcaggacttcttcgacaagttgcgaagtgaatcgggtcctcgcaacttgcgccagatctttgaggacgacgatcgtccgctggcgaacgaatcatccagcttgcgctatcagccaggcagctccaaaaaattgcaggctggcaaaagaccggccatgaccaggagtagcacccaggagacgggtgattcaccgcctgccgcctggaacacggccattgccaaggtggtgcatgcctatcggagcagcgagaacgttggacgcgtcggcctggccctctcgattctgggcgagatggaggccagcaagctgattgtctaccgcagcaagagtcaggtgctgaccacgctgcagttgacaccgcgtggcggcaaggtgatactgcgcgaatcctatctgcagttctacgatgacgagcagcgcttctggagcctgcgattcgacaaggaaccggatgagaaggaattcataacgtttatggtcaaaaacaaactgccagtggagcactatctcagcgagatctcatcctccagctcggcatcgccttcgcgtgaggatttatctaagatccgaactaaagcaacggtcacaaagacgacgcctaatccgccacagccgcaaccacgttcccgcgtaacgctgccaacgctggagaaggcggacgatgaggaacgcgaacgggaaacagagacaccttccaatgaggatgtgatagtaacgccagtgccgcgacccataggttcgtcaaatgctcacaggaaactcagtgccagttccctggcggtggccaacgcttcaacgagcagcgatactccgttggctgtgacgacactggacaaatatctagacgaacagcgtgcctcgggtgcgttaatggagcacaagatggacgccattctgcaggccatgaatcgcatgggcggccagtcgagtgttgcgcccaagaagcccagtgatccgctgctggaacgcgacagcgaggacgagatgctggagctggagcagaagctgctcaacttgaagcgggagaatcgagcgctaatgcgcaacctcaaggcacgcgaacaggcgctggaggatctacgctgctcggcgtgcgccctttgcgaggagctactagtccagaatggcgagctcaagtcgcagaatgcccagctgttgttagccagccagcatatttccgattcaagcacagctgcttcgcctgcccattgccgcaattgcgagtcgtcttcccggcaaatagccaaaatgcagctacacatttccgcactgcaggaagcgctgcgaatctttcagaaatcaggcgactccagctccagttcgggtcggttatagcacctaac

SEQ ID NO: 6261 - protein, 453 aa, DROSOPHILA
MEIGNDQSYQDFFDKLRSESGPRNLRQIFEDDDRPLANESSSLRYQPGSSKKLQAGKRPAMTRSSTQETGDSPPAAWNTAIAKVVHAYRSSENVGRVGLALSILGEMEASKLIVYRSKSQVLTTLQLTPRGGKVILRESYLQFYDDEQRFWSLRFDKEPDEKEFITFMVKNKLPVEHYLSEISSSSSASPSREDLSKIRTKATVTKTTPNPPQPQPRSRVTLPTLEKADDEERERETETPSNEDVIVTPVPRPIGSSNAHRKLSASSLAVANASTSSDTPLAVTTLDKYLDEQRASGALMEHKMDAILQAMNRMGGQSSVAPKKPSDPLLERDSEDEMLELEQKLLNLKRENRALMRNLKAREQALEDLRCSACALCEELLVQNGELKSQNAQLLLASQHISDSSTAASPAHCRNCESSSRQIAKMQLHISALQEALRIFQKSGDSSSSSGRL

SEQ ID NO: 6262 - DNA, 5996 bp, DROSOPHILA
tgctctctcattagcaggctagttgctgaccggaacacaacagaagctactaattaggtggttaggcttaaacattctactcatcttaacgaatgaatgtatacttcatggacacaaattatattaaagacaactttgtgcattgcaaatgaaattggtggtgcttgggtcagttgatagttttaccaggaaaaagcgcttagtaaaggcatttattagacgaattaagcgataacacatatggtttaatcaggaattacattgtaaagatatagcaaattgattccatgttgttatttaattaaaaaaagtcactcttgtcaatcaatttgtattaagcaaatattttaaacggcacttcatttttcagaggtcctcgaattttattgtcacgctcagaacaacagttttttttttataacatttaaattaaacgactactgagacaagtctattaataagtataaataaaacaagaaagaatgctatagtcgagcttttcgcctatcaaatacccgttagtcacccagtgtgaatgcaaacgcgaaatttcataatttttctggaatatcgatagatattggggaataaaatgggagaaaatttaaaattttttacaaagtgtgggtgcgattggttttgcggctttagggcgttagagttggacaaaaagtttttttgcaaatcgataaaaatttacacgactaataaaattatgagaaaatatccatgctctacgagtaacgggtataattaattatttcaaagtgttattgtcattttaagttactgattttctctgaaaacgtaagttactgattttctctgaaacgtactgaaattttcgaagcggttattcacgaaacgggaatctggaacgcgccgtcgactagggatggagagcctgccagtcattccaggccagtgctgggccagctgtcgataacttgctatcgaaatacgcaagagaaatatacaaatcattggcaaattgggatttacgcatttcaaattcgatcgtatcggcaggaaacgcgtgtaaaatagtcaatttccgatcggggagcaagtgtagcacagccaccgcggaatcgcagcatttcgaccgacgccgcagccaggcgaagaatgcggaggagcgtcgactgagcaagtggaaccaaagggctggtggatttagttcgatctgggcacaaaatcgaaacaaaagcgcagcgtcatgttcggattcgacggcgagtaccgccgcaggcctgtgcaaagtctgggcggagcctcgcacacctgcgaccgggacactgtgatccggaaggcggccctggagcgccagaagcgcaacgagctgcgccagaaggagaacggggcagtggtcctgcagtcttacgcccgctcattcatccaccgccagcggcgcaagcgggcggaacgggaagttttcgacatctacctaatgggccacaaggatggcatcgtggaggacgagagccttaccttcctcttgcggcgcctcaacttcttctacagcatccgggaggccaaggacagcgagcgactggtagggaccttctggtgcgccctttataactctctaatgctgttctaaatcccccacagatcgaagtttgtcagcagatccttcgccagcccgctcgtctgcttcagcattcctcccctgactcattgtggcttctgagactgtgcaagctgctggacacttgcctgctacagcttagcctgtcgcacacggcccaagccattcccctacgcatgctggaaacatttaccaccgtatcctctgtccagcaatatatgaaggatgaggctgtgttgtttcagtatatggagcgcgtctttggcttcctgattgcccgcaattactttgtgcggctgcgacggctgctggacgacaagtgtccgccgctggacggagagaccctgcatgccccgagtccgctggctgaggcactgcttcagttgttgctacgtcccctggaagttgccaaaagggcatccgcgggcggccagatgtcctctatgtcgatggcggtttgccggaacttcactcgagacatcttggccacgccgcacacggatcctctgcgatactttgtgctaccctgctttgccctgaatgtggacttcccatttgacttgttaatgcgttcgctctacgacgcacttgagtcagctggaccagcagaatcggacagcacgtccagccggcgcagctttctcttctacggtgtagaaacaggccacaagactacgcggatggactcgattttctcgtcgtttctgctcaactccctcatggttctcgatcgtaggcaattgggtaagagcaaagaatttccttgtgaccataagccatcagtaatttgtttttctctgttagccaccctgcatcagagcccgctgctagtgatctacgtccgcctcattgccgaaatgatgcccaacattctgcagctgcccaagtcaacgcttcgcggccatgctaatgccccacatcgtcacagggacggcgatgacgattccgaggaatcggaggatgaggatgaagagctgccagcggctcgaaccctggactacgatatggaacagacttgccggactagcggtgaactgagtgtcaaagagcgcgagtgtctgctggagtccattgccatactgaacgaaacggagcgggtggactttattgtccagcagctagatccgcacattgagaacactcacctcatctatgcgctatgcgagatctgtcacaatctgatgatatacaacaagcatgcggtcttcgagtacaagtgagatgcccatccacaatattcctttgcaatatctaatccatagtctcgtctagactactctatacgttggcttttactccgaaattcatacgggctgtgtggtttaagttggctgcagagtccactcaactaggtttctcagctccactaacccttatttccaagggtgttgtccgtgagtagcatttaaagccagctgattagaaaattactaaagagtgttcttcacgcagccaaacatcaaggagtggatcgaactattcctcttttggccactttctgcatgctgtttggccgcctgctgcccacgctgcatgatgttgagttcgtggagaacaagttgctgctgcaggtccatagcaccatcaaccacgtgcgactgatgccattttccatagcggaaattatacaaatgtctaagacgctaaaggacatcagtatgggcctagtggaactggcttttccggagacccgtagcaatctggccaactaccgcaaggtcctgggtcacacggaggccgacgacaagaagttgcggcaccagaaacaaatctgggccaacctgctcaatgtggtcgtctttgtgctcaaccagatccacactcgcgacctgcgcttagggttctgtccggaggatcactggaccgtcaccaggctagacttaccactggataggcccacagatcttccgctgacccatagcagtcgtcttaggggcattcgaccctttcagccgattcgagactttactcgggaggacttcgagaacggtccacccatgtccacgaaacagatccgctcgataaccattttgcgggagatcccctttgtggtacccttcaacaagcgggttagcattctgcagagcttggttgctgccagcaagatgcgggtgcagggcaatatgcaagcctttctccaagggccctccgttctgatcactgtcaggcggtcgcatctttacgaggacgcatacgacaagttacgtccggataatggtaggtgtcatcgctgcgattttttgtacaccatttatgattaatctttcacttttagagccggatctgcgctttaagttccgtatacagtttgtttcctcgctcggactcgatgaggcaggcatcgatggtggtggagtttttcgcgagtttctttcggaactaattaaaactgcctttgatcccaaccgtggattctttatgtgagtattattgagataaacaagtcattttaataatgtactcgacttccctatgcagggtaaccacggacaacaagctttatcccaatccaaatgtcgccgatctgttcgaagactatgagaaacactactatttcattggccgcatcctgggcaagtccatatatgaaaaccttttggtcgaacttccattggccgagttcttcctaaccaagctggctggcaaatactccgatgtggacatccaccagttggcctccttggacccggagctctaccgcaatctactttacttgaaggactactcgggcgatgtaagtgaactaaacttggacttcaccgtggcgagcagttcgctgggtcagacgcagattgtggagttaaagcctcagggccagagcattcccgtgacgaactcaaaccgcattgagtacctgcaattgattgccgactacaagcttaacgtgcagatacgtcgtcactgcaacgccttccgaaagggtctatccaacgtcctgcccatcgaatggctgtacatgttcagcaataaggagctgcaaatactcatctcgggtgccgagatacccattgacctggaggatctaaagaagcactgtgaatacggcggtgaattctctccagagcacccctcgattgtgacattctgggaggttttggaaggtttcgatgatatgcagcgccggcagctgctaaaatttgtcaccagctgctcgaggccaccgttgttgggctttaaggtgggtatttaatcgcattttaagcaaacatgtgttacctctttgaatttccataataggacctggacccacctttctttatccaaaacacgggagatatggaacgtctgcccacggccagcacctgcacgaatctgctaaaacttccgcccttcaaaaccgtagaacaaatgcgcgaaaagctgctctatgccatacagtctggcgctggctttgaactaagctaagcactaagctgtcacttcccaaaaaccaatctccgaaaacatatcgatgaccacagatgactaccaaaccccatacaattcacccacctggcagagcgaatagatcgcaggacggcaagttgacaggcaggaaaactattccagttaatctattaccaatgtacatttgattaccgcaattgcttagtgtaaagtatcaagcttaagaggtctgtttatccacgttttctttgtttttcgtattacaaaacataaatgtaaatcaatgcgatctaagaatatttaaataaagggcaagcgttgtcagtccacgtttggtggaacttattcctgtttcctcgttccgtcggagtcccacgcgtagccacgaattttcagttgccttaaagcgccgccaatgccatgtccagctgccaggcctgttgaataatgcgctgaaagaccacttggggcgccgaggaggcgaacagaaagtcaatgtgattatagcccggcacctgatacatctgcgtgacgctgttccgcagctccctgaccaggcgctgcacatccgccaggctggacagcgtgtcccggctgccgtggaagatctgcagctgcaggcgtacattggccaactgatacgaggggggcgtggtccggccatatcgcagcgtattcagccggggggagcggtagtcgtactgctggaatttgcctgcggacgatgatgcgactcatttaatgcgcaccacacttgaatgtgatgcacagagaaaatagtttctctctttacagattgaaacattttggaaaggttttaggttgatccatactaatgtaagaaactctgatttctcgcagtgcatccgacttaccgctattgatgagctgcccgaagtgctgcagctggccccgcgaaatgcccgccggcgtcgtttccaggatgcgtggcaagatgctctggcaacggaagagaaggcaggccattttgttaggcataagctgccgccgaatcgct

SEQ ID NO: 6263 - DNA, 3588 bp, DROSOPHILA
acgcatttcaaattcgatcgtatcggcaggaaacgcgtgtaaaatagtcaatttccgatcggggagcaagtgtagcacagccaccgcggaatcgcagcatttcgaccgacgccgcagccaggcgaagaatgcggaggagcgtcgactgagcaagtggaaccaaagggctggtggatttagttcgatctgggcacaaaatcgaaacaaaagcgcagcgtcatgttcggattcgacggcgagtaccgccgcaggcctgtgcaaagtctgggcggagcctcgcacacctgcgaccgggacactgtgatccggaaggcggccctggagcgccagaagcgcaacgagctgcgccagaaggagaacggggcagtggtcctgcagtcttacgcccgctcattcatccaccgccagcggcgcaagcgggcggaacgggaagttttcgacatctacctaatgggccacaaggatggcatcgtggaggacgagagccttaccttcctcttgcggcgcctcaacttcttctacagcatccgggaggccaaggacagcgagcgactgatcgaagtttgtcagcagatccttcgccagcccgctcgtctgcttcagcattcctcccctgactcattgtggcttctgagactgtgcaagctgctggacacttgcctgctacagcttagcctgtcgcacacggcccaagccattcccctacgcatgctggaaacatttaccaccgtatcctctgtccagcaatatatgaaggatgaggctgtgttgtttcagtatatggagcgcgtctttggcttcctgattgcccgcaattactttgtgcggctgcgacggctgctggacgacaagtgtccgccgctggacggagagaccctgcatgccccgagtccgctggctgaggcactgcttcagttgttgctacgtcccctggaagttgccaaaagggcatccgcgggcggccagatgtcctctatgtcgatggcggtttgccggaacttcactcgagacatcttggccacgccgcacacggatcctctgcgatactttgtgctaccctgctttgccctgaatgtggacttcccatttgacttgttaatgcgttcgctctacgacgcacttgagtcagctggaccagcagaatcggacagcacgtccagccggcgcagctttctcttctacggtgtagaaacaggccacaagactacgcggatggactcgattttctcgtcgtttctgctcaactccctcatggttctcgatcgtaggcaattggccaccctgcatcagagcccgctgctagtgatctacgtccgcctcattgccgaaatgatgcccaacattctgcagctgcccaagtcaacgcttcgcggccatgctaatgccccacatcgtcacagggacggcgatgacgattccgaggaatcggaggatgaggatgaagagctgccagcggctcgaaccctggactacgatatggaacagacttgccggactagcggtgaactgagtgtcaaagagcgcgagtgtctgctggagtccattgccatactgaacgaaacggagcgggtggactttattgtccagcagctagatccgcacattgagaacactcacctcatctatgcgctatgcgagatctgtcacaatctgatgatatacaacaagcatgcggtcttcgagtacaaactactctatacgttggcttttactccgaaattcatacgggctgtgtggtttaagttggctgcagagtccactcaactaggtttctcagctccactaacccttatttccaagggtgttgtccccaaacatcaaggagtggatcgaactattcctcttttggccactttctgcatgctgtttggccgcctgctgcccacgctgcatgatgttgagttcgtggagaacaagttgctgctgcaggtccatagcaccatcaaccacgtgcgactgatgccattttccatagcggaaattatacaaatgtctaagacgctaaaggacatcagtatgggcctagtggaactggcttttccggagacccgtagcaatctggccaactaccgcaaggtcctgggtcacacggaggccgacgacaagaagttgcggcaccagaaacaaatctgggccaacctgctcaatgtggtcgtctttgtgctcaaccagatccacactcgcgacctgcgcttagggttctgtccggaggatcactggaccgtcaccaggctagacttaccactggataggcccacagatcttccgctgacccatagcagtcgtcttaggggcattcgaccctttcagccgattcgagactttactcgggaggacttcgagaacggtccacccatgtccacgaaacagatccgctcgataaccattttgcgggagatcccctttgtggtacccttcaacaagcgggttagcattctgcagagcttggttgctgccagcaagatgcgggtgcagggcaatatgcaagcctttctccaagggccctccgttctgatcactgtcaggcggtcgcatctttacgaggacgcatacgacaagttacgtccggataatgagccggatctgcgctttaagttccgtatacagtttgtttcctcgctcggactcgatgaggcaggcatcgatggtggtggagtttttcgcgagtttctttcggaactaattaaaactgcctttgatcccaaccgtggattctttatggtaaccacggacaacaagctttatcccaatccaaatgtcgccgatctgttcgaagactatgagaaacactactatttcattggccgcatcctgggcaagtccatatatgaaaaccttttggtcgaacttccattggccgagttcttcctaaccaagctggctggcaaatactccgatgtggacatccaccagttggcctccttggacccggagctctaccgcaatctactttacttgaaggactactcgggcgatgtaagtgaactaaacttggacttcaccgtggcgagcagttcgctgggtcagacgcagattgtggagttaaagcctcagggccagagcattcccgtgacgaactcaaaccgcattgagtacctgcaattgattgccgactacaagcttaacgtgcagatacgtcgtcactgcaacgccttccgaaagggtctatccaacgtcctgcccatcgaatggctgtacatgttcagcaataaggagctgcaaatactcatctcgggtgccgagatacccattgacctggaggatctaaagaagcactgtgaatacggcggtgaattctctccagagcacccctcgattgtgacattctgggaggttttggaaggtttcgatgatatgcagcgccggcagctgctaaaatttgtcaccagctgctcgaggccaccgttgttgggctttaaggacctggacccacctttctttatccaaaacacgggagatatggaacgtctgcccacggccagcacctgcacgaatctgctaaaacttccgcccttcaaaaccgtagaacaaatgcgcgaaaagctgctctatgccatacagtctggcgctggctttgaactaagctaa

SEQ ID NO: 6264 - protein, 1122 aa, DROSOPHILA
MFGFDGEYRRRPVQSLGGASHTCDRDTVIRKAALERQKRNELRQKENGAVVLQSYARSFIHRQRRKRAEREVFDIYLMGHKDGIVEDESLTFLLRRLNFFYSIREAKDSERLIEVCQQILRQPARLLQHSSPDSLWLLRLCKLLDTCLLQLSLSHTAQAIPLRMLETFTTVSSVQQYMKDEAVLFQYMERVFGFLIARNYFVRLRRLLDDKCPPLDGETLHAPSPLAEALLQLLLRPLEVAKRASAGGQMSSMSMAVCRNFTRDILATPHTDPLRYFVLPCFALNVDFPFDLLMRSLYDALESAGPAESDSTSSRRSFLFYGVETGHKTTRMDSIFSSFLLNSLMVLDRRQLATLHQSPLLVIYVRLIAEMMPNILQLPKSTLRGHANAPHRHRDGDDDSEESEDEDEELPAARTLDYDMEQTCRTSGELSVKERECLLESIAILNETERVDFIVQQLDPHIENTHLIYALCEICHNLMIYNKHAVFEYKLLYTLAFTPKFIRAVWFKLAAESTQLGFSAPLTLISKGVVPKHQGVDRTIPLLATFCMLFGRLLPTLHDVEFVENKLLLQVHSTINHVRLMPFSIAEIIQMSKTLKDISMGLVELAFPETRSNLANYRKVLGHTEADDKKLRHQKQIWANLLNVVVFVLNQIHTRDLRLGFCPEDHWTVTRLDLPLDRPTDLPLTHSSRLRGIRPFQPIRDFTREDFENGPPMSTKQIRSITILREIPFVVPFNKRVSILQSLVAASKMRVQGNMQAFLQGPSVLITVRRSHLYEDAYDKLRPDNEPDLRFKFRIQFVSSLGLDEAGIDGGGVFREFLSELIKTAFDPNRGFFMVTTDNKLYPNPNVADLFEDYEKHYYFIGRILGKSIYENLLVELPLAEFFLTKLAGKYSDVDIHQLASLDPELYRNLLYLKDYSGDVSELNLDFTVASSSLGQTQIVELKPQGQSIPVTNSNRIEYLQLIADYKLNVQIRRHCNAFRKGLSNVLPIEWLYMFSNKELQILISGAEIPIDLEDLKKHCEYGGEFSPEHPSIVTFWEVLEGFDDMQRRQLLKFVTSCSRPPLLGFKDLDPPFFIQNTGDMERLPTASTCTNLLKLPPFKTVEQMREKLLYAIQSGAGFELS

SEQ ID NO: 6265 - DNA, 3595 bp, DROSOPHILA
ccaatacaataggaattatagtgtattcattcggtttcgtcttagttacttccgatttcggtgatgtgaactgactgattttgtgcttactgggtggtggtgaaactgacagttcccggagctgttcctttgcttccccccgttcgtcaggtgaacgatgatcgctgctcttcgtgcgacgcctgtggcctgattctggtcgcgattcatgttccatggaggcacatcctggcggcgggactgatcccagggcacaactgtgggtgctgccactggctccactgcttgccgtcgacgaaagggccatgaatcgatctaattcccggtccgtggccattgcgctgatatattccctagctagtggaggaacgcgggatgattccgccaatttgttatggcgagaaccggacatcatcacctttccgactgctcctctcttcgctctcatggtcgaaaaagtttattccccttcaatatgtcagttcgccacatggaagcagcgttagaaactagtttgatgtgacgctaaaatcattcgaaaacaaattgagccacctgatatcgaaagttatcgcctatcggtggcgatagttggttagatgcctttgttatcgatatcgattattttggttaaaattacattacattacattttcctaaagtacatactgaaatgttaaaatcaatgaaaaaagcatatataatatatatactattatgtacataattcaaataaagcatttggttagttgatacaagtgaataagtaaaaaattttattaacagcaatgtaatatgggattaacagggcctattgagaaccggttcggacgcagtgttggctaacgatgcaaccggttccggttgtctgtggattttcaaaatggcatttggtgtcgtactgcgttgtttataattgctcctcgctgctctagaaaaacaatttgaatctgattaaagaaacttaagatatacacatcgacttgtgatcgactgaataatgctggagacgaagagcatagctgcattggctttcacggagacgccgcgcaaacgcaaaagggagacgctctataaaaatgctgccccgcccccgaatccgcagcaacaacccccagaaaaggacgcacaggatgcagctgtcgcgtcgacagaatcctgcttcaccaacgccgccttcagttccacgcccaagaagctaatggtggctcgtcgtcgtttggccaaggagaatagccaacccaatccgtttcccggcttggaggtcaagtccatagctgatctggcccagaagcagcagcaccagcagcatcatcagcagcagcaacaacaacaacaaaagctacccacgaatccttttgaggtcctgcgccagccgcccaagaagaagaagcgcgagcatgcctgcttcgagaatcctggcctgaatttggagctgcccgagaagcagttcaatccatatgaggtgagttcactagtctaatcgtacatggatgtactttttgtcgcagttaagttacagtagaaatcattcatatgtgtttgttttctaaataaaacaatatctttataatctatatattaaaaactacataaaaatcatacatttattatatatagctatagaatattattataactcagccataatatttttaggtcgtccgctcggcaaccacgcccgccaagggcttcgtgaatcctgccctgaatttgcgcggcagtgatgcgccggcctcgctcaatcccttcgagatccatcggcccagcgaggcgtccgaggcagcctgcaatccctcgggtgtggccaatccggcactggccgatagggattcggaggagcagctgcccaccagcctgaagatcggcttgccattcacgccaacgctgggctgtcgcatcgattttcacggcatgtcccttacgcagctaacgcctagcaagctgctggccgagaagctggtcttttcgcccgttccggcgcccaaacgatcgctgggcgccatcagcgaggagtcgtctatggacattggcaaggagctggatcgctatcaactggaattggagaacagcatcaacgaggcgaagctacggaagaatggcgtgctggtggatagagagttgcccaggaatagcttggaggtggaactgcccaagaacaccaaggtctccttggtcatggagaccaatacgcaggagctgatgatgcaggaagtggtgacggtggacactcaagtggagaggcgtctggtttgcaccagacgacgcacactaaccgagattagcgaggcttccgaggtggaagaggacacggagaagctgctcgagcaggaccgcgaagcagaggtgattctcgagcaggagaagattctagagcaggagatggtctcagagcgggaacgacatttaacgagggagaagcaattgaagcaggagaaactcctagagagggaaaaacatttggagcgagagaagctgcaggagaagctgcacgagcagctcagggaaaagctccaggagagggccaagcatctggagaaggagaagctggaggaggaggagctcctggaaaggcagctagaagaggaacgggaaaaggagccaaccgacggcgatgtggcctatgcctccgaatccgaatccgacgacgagcccgatgatctagacttcaaggcacccgcgcgcttcgttcgcgcctacagacccgccgctctgccctccaaggcggccagcaaggagtcgctgcagtccatcggatcaagcaagtccgccaaatcggcagaagttaagcccagtatcggaatgaaaggcatgataagaaagtccattcgaagactgatgcatcccacgtcgcacaccacgccatccgaggtaaagtccgaggacaaggatgaacatggacatggacagggccatggacagcacaacatactcaatagcattcggcacagcctgcgcaggaggccacaaaaggcggccgagttggaggagcaaatggagcccgttctcgccgacgtctccattatcgacaccagcgaacggaccatgaagctccgctcgagcgttgcccaaaccgagtacatgaccatcgagcagctgaccaacgagaagaagcactcactgcggaacagcattaggcggtccacgcgggacgtgctgcgccatgtgttccacaagagtcacgatgcctatgcaaccgccaagtgagcaggttggctccacagattcaattggtgcgtcgatttttaggggatttcaaatggcatttctgtaaccgaaagcatttaaatttatttgttattatttttgaaatgcgccttccccttgttgaattgacccaattgacttcttttcaattcgatttttcagcacctagttaagtttttaattgcacccaaagattgtcacacaagaccagcgaaaaaaggaaaggaaaccttatttcatctgaaaaccacatcatcacctagtttttaatcaagttttttttcttaatttttcaagcgaactctgcaaattaatttgcacactgtttatagttttaagttacttgatgtttgcacgtttattcatatatgtatgtatgtatgtttgc

SEQ ID NO: 6266 - DNA, 2013 bp, DROSOPHILA
atgctggagacgaagagcatagctgcattggctttcacggagacgccgcgcaaacgcaaaagggagacgctctataaaaatgctgccccgcccccgaatccgcagcaacaacccccagaaaaggacgcacaggatgcagctgtcgcgtcgacagaatcctgcttcaccaacgccgccttcagttccacgcccaagaagctaatggtggctcgtcgtcgtttggccaaggagaatagccaacccaatccgtttcccggcttggaggtcaagtccatagctgatctggcccagaagcagcagcaccagcagcatcatcagcagcagcaacaacaacaacaaaagctacccacgaatccttttgaggtcctgcgccagccgcccaagaagaagaagcgcgagcatgcctgcttcgagaatcctggcctgaatttggagctgcccgagaagcagttcaatccatatgaggtcgtccgctcggcaaccacgcccgccaagggcttcgtgaatcctgccctgaatttgcgcggcagtgatgcgccggcctcgctcaatcccttcgagatccatcggcccagcgaggcgtccgaggcagcctgcaatccctcgggtgtggccaatccggcactggccgatagggattcggaggagcagctgcccaccagcctgaagatcggcttgccattcacgccaacgctgggctgtcgcatcgattttcacggcatgtcccttacgcagctaacgcctagcaagctgctggccgagaagctggtcttttcgcccgttccggcgcccaaacgatcgctgggcgccatcagcgaggagtcgtctatggacattggcaaggagctggatcgctatcaactggaattggagaacagcatcaacgaggcgaagctacggaagaatggcgtgctggtggatagagagttgcccaggaatagcttggaggtggaactgcccaagaacaccaaggtctccttggtcatggagaccaatacgcaggagctgatgatgcaggaagtggtgacggtggacactcaagtggagaggcgtctggtttgcaccagacgacgcacactaaccgagattagcgaggcttccgaggtggaagaggacacggagaagctgctcgagcaggaccgcgaagcagaggtgattctcgagcaggagaagattctagagcaggagatggtctcagagcgggaacgacatttaacgagggagaagcaattgaagcaggagaaactcctagagagggaaaaacatttggagcgagagaagctgcaggagaagctgcacgagcagctcagggaaaagctccaggagagggccaagcatctggagaaggagaagctggaggaggaggagctcctggaaaggcagctagaagaggaacgggaaaaggagccaaccgacggcgatgtggcctatgcctccgaatccgaatccgacgacgagcccgatgatctagacttcaaggcacccgcgcgcttcgttcgcgcctacagacccgccgctctgccctccaaggcggccagcaaggagtcgctgcagtccatcggatcaagcaagtccgccaaatcggcagaagttaagcccagtatcggaatgaaaggcatgataagaaagtccattcgaagactgatgcatcccacgtcgcacaccacgccatccgaggtaaagtccgaggacaaggatgaacatggacatggacagggccatggacagcacaacatactcaatagcattcggcacagcctgcgcaggaggccacaaaaggcggccgagttggaggagcaaatggagcccgttctcgccgacgtctccattatcgacaccagcgaacggaccatgaagctccgctcgagcgttgcccaaaccgagtacatgaccatcgagcagctgaccaacgagaagaagcactcactgcggaacagcattaggcggtccacgcgggacgtgctgcgccatgtgttccacaagagtcacgatgcctatgcaaccgccaagtga

SEQ ID NO: 6267 - protein, 670 aa, DROSOPHILA
MLETKSIAALAFTETPRKRKRETLYKNAAPPPNPQQQPPEKDAQDAAVASTESCFTNAAFSSTPKKLMVARRRLAKENSQPNPFPGLEVKSIADLAQKQQHQQHHQQQQQQQQKLPTNPFEVLRQPPKKKKREHACFENPGLNLELPEKQFNPYEVVRSATTPAKGFVNPALNLRGSDAPASLNPFEIHRPSEASEAACNPSGVANPALADRDSEEQLPTSLKIGLPFTPTLGCRIDFHGMSLTQLTPSKLLAEKLVFSPVPAPKRSLGAISEESSMDIGKELDRYQLELENSINEAKLRKNGVLVDRELPRNSLEVELPKNTKVSLVMETNTQELMMQEVVTVDTQVERRLVCTRRRTLTEISEASEVEEDTEKLLEQDREAEVILEQEKILEQEMVSERERHLTREKQLKQEKLLEREKHLEREKLQEKLHEQLREKLQERAKHLEKEKLEEEELLERQLEEEREKEPTDGDVAYASESESDDEPDDLDFKAPARFVRAYRPAALPSKAASKESLQSIGSSKSAKSAEVKPSIGMKGMIRKSIRRLMHPTSHTTPSEVKSEDKDEHGHGQGHGQHNILNSIRHSLRRRPQKAAELEEQMEPVLADVSIIDTSERTMKLRSSVAQTEYMTIEQLTNEKKHSLRNSIRRSTRDVLRHVFHKSHDAYATAK

SEQ ID NO: 6268 - DNA, 4167 bp, DROSOPHILA
gtttcagcaaaacccaaaaaggacaaaaaggcgtcaataaaaaagataaagaagtcttcacagaaaaggatgaaggtggagccgaaagatcatgacgaagaagatgacgaggaagatgacgacgaagatgaagatgacagcagcgagagcgatgactcggagtccagcgaagagcctcacccagctcctgtgtccaaacagaagcggaaacgaggcaccaaagcctccgtatcggccgcagccagtctacctcctcaagtgtttccatttccccttctaggcgccccgggcgccccttttaactccatgatgtattcttatagagctccgtttaatttttctaaatagttatagcgtgagttagttgtaaaggaacgtgaaagataaatacattttcaataccaatggatttagttctttcattttaatatttacggaatttaggaattacgcctctgttgtttaaaacgagaatgaagttgaattaatttttgtacaatacataccggggaataatatcgataaccagggcagacctatttatcgaaatgtatcagccgacgcagccctggttttgtgttttgccagctgttgcttccacgcttttgaataaaaaatcaaattaatagtgtttactaggaaaaacgtatgaaactcagtgaaaaaactttgcaaaaaacttttgggtaagtgtatttacctaaatttattggttttctacgattaaatctcaagagctttgagtttttaactaaaggatccaggtgtctgatttttaaagttatactcaacttatttataaggaagcattttaaacgataaaagaaaacatagtacataaatttaggacatcatattgaaaatgaatattcctggactctgaagtatgtaagtgcctcggaaacgaaatatacaagtaatttttagggctacttcccgccagagctaaggcatcctgctttaagatcaattttccttgccctgtctgcttgacaggatcctagggtatgcagagagccagggtctcgcgttcctgctcggtgccgcaggacactgggtgattctggccccggggatcgatgcctggcttgagcatcgtctgctgcagctcccagatgatttcacacgactggacgctcacggccagcttaagcaccgactgatagttgagcggattaaccgcatagctgaggatacccctggcaatctgctcgaacaaatagttcctgtcaagcagaaggagctcctctcgtacctccatcatacggttttcaaagtggcactgaatcgctgcaaataccagcttgtccagacccaccaatagatcccgcttaaacttcaccaggtagtgctctatgaacacgatctggttgcgatttagatgcggcaggcgcaccttgtcctgtattacctgttcgccgatctggctgacaaccagagaggctaatgatcccgccggagtggcccgacgttcgctgcacgggcggacgtccacgaacggatgaatctcgtagctgcccacgccaatggtgctggctacaccgctaaatgatacatgggaggcgcgcgagtggtttttcggctgtttggccatcgacggaggcacttccatggctttgtggtctctggcgaatccaatgatctgataagctttctgcaggcggaatgaattagtggtatgtcaagagggactgctattaacacttacgtagtgcacatatttctttgcatcgcagacaaaatccttaatgcgcgagatcagcacctgcaaggcacactcatcctcgctgagatcgtcgtttaaaccagaaattatgtagtccagtatatattgtgccgccttatagatggggtcgtctggtgcgaagctgagagcggtctgaccctccatggcaatggctgcattcaaggcgtaacaaagatcactgtctaacaatccctcaaaggtggcctgatactcatcgcagaatgatggcttgcgttcctgaagtgtcgacttcttcttcttgcggcgctttcttttgggctgacgagcagtgatggccttttgagctctttccttaatctcgtcctgaatccgttgccacttttctctgtaatgagccttgtgcctgtctataaacgcctctcgctctttttccacctcctgcaggaggtattcgatcctacgctgattagcaattcgctcatcaagtcgcttcctccacgactgaatctggtgctcagtgttctttaccagccgttgtttcctcaggattcgcatgtttttgttgaaccgatcctttttgaactggaagagcttcttctgtttgatcaatagctttctcatcaaatcctggcacatgcttatgtgggcagctacacgcatgtttgtcagcatcttgcggtgctccagcaacatattctgcatggtggccaggttctctaagcgcttaaacttctcatatgtgatattcagcagatggacctttctttcgtggcgttcctgctcctgtagtttctttctggcaagaacctcctcagtgcactggtgacgggctgcgagattctggtgatccttttttgtgatggactccgcgttggcgatcagcattcgatcatattgctccgactcgcgccgcttgtatgcctgcaaaatgtagtacaactgcgatttgtgcagctcctggcgatgctgattgaagtccttcagattgcatattacatcgttgtcctgcgttatctcaccgttttccctcaaccgcttcagattacgctcattggagtagaacgtctttaggttggagtcgtgtagcggattgtactccgggatgtgttcggtaacggaacactcaaactcctgtttaccgctcttgaactggtggatatgtatgaatgatgatgataaagtaaggttctagctgattttctactggtagcacttacgtcctgtccgatcttgttcttggagaatatgacctgattgccgggacatttgagcattggcagcttgcaattaagagggatcagctcccatccgggtagactgttgatgggtagtccagtcttgtaggagatcatctttagcagggccgggtttccggacaccttatttcgccgcggcagcgacaaaatatcgatcatcttgtcgctctaaacttacagtagcctaaattatttgtgcttaacatttactctctgagcgttccaagaaaactaatttcgaacagtgccttatgaaaatgtagtagccccgcctactttaacaatattctatactttttccctgccgattgtatattgactttagtcaatagtttgcaatataaaatatatatattcttaagcagtctcaacaaccgttttatagctatctgcatgaatctgtggtcccatcctaagaggccgaatcgggatcgaagctgtcattaccctggctccagcagattccagggcgttagttcggcttacataaatcctcggttgactatcctcctcaatatttcgctgtctctatccgggcttatgttccacccgctttttccgaccgctgacccagtttggcgtccgtggatgattctagatgcgggcatctcgggcataaatatttaccaatcgttcggtccggcgccaacatgtctgcgtagggctttccttggaaaagaacacccactctcactagccgtcttccatgtaaataaaatcacatcaagtgctgaaatgtacttgctgcagcacgtgctccaaatattctctcgagtgtactttccatttcatctaacacctaggacacccctcttactttccgaccccgctgccgatggaataaataaaaaatgatggtggcatccgaaaacaggcaaacttatgctggaaaatgaaaggtgcgtgccaatcgctagcggtcgtctgtgttcctatttccatttagcgtttcaaaatagttacttcctcctgtgatatgggtccctagggatggctgcgtgagtcattcggctaaatggctagttagttttgggaatcaaaagtagtgctttaacttttattgagacaacgtttatagacatgtggtacacacaatgataatataataagtggcaggctgtttaccacattcgttgaatgcaactaagcagacagttattaacaatatgtcttggccacatatcaattcaggcctttgacttg

SEQ ID NO: 6269 - DNA, 1955 bp, DROSOPHILA
ttaagcacaaataatttaggctactgtaagtttagagcgacaagatgatcgatattttgtcgctgccgcggcgaaataaggtgtccggaaacccggccctgctaaagatgatctcctacaagactggactacccatcaacagtctacccggatgggagctgatccctcttaattgcaagctgccaatgctcaaatgtcccggcaatcaggtcatattctccaagaacaagatcggacaggacttcaagagcggtaaacaggagtttgagtgttccgttaccgaacacatcccggagtacaatccgctacacgactccaacctaaagacgttctactccaatgagcgtaatctgaagcggttgagggaaaacggtgagataacgcaggacaacgatgtaatatgcaatctgaaggacttcaatcagcatcgccaggagctgcacaaatcgcagttgtactacattttgcaggcatacaagcggcgcgagtcggagcaatatgatcgaatgctgatcgccaacgcggagtccatcacaaaaaaggatcaccagaatctcgcagcccgtcaccagtgcactgaggaggttcttgccagaaagaaactacaggagcaggaacgccacgaaagaaaggtccatctgctgaatatcacatatgagaagtttaagcgcttagagaacctggccaccatgcagaatatgttgctggagcaccgcaagatgctgacaaacatgcgtgtagctgcccacataagcatgtgccaggatttgatgagaaagctattgatcaaacagaagaagctcttccagttcaaaaaggatcggttcaacaaaaacatgcgaatcctgaggaaacaacggctggaggtggaaaaagagcgagaggcgtttatagacaggcacaaggctcattacagagaaaagtggcaacggattcaggacgagattaaggaaagagctcaaaaggccatcactgctcgtcagcccaaaagaaagcgccgcaagaagaagaagtcgacacttcaggaacgcaagccatcattctgcgatgagtatcaggccacctttgagggattgttagacagtgatctttgttacgccttgaatgcagccattgccatggagggtcagaccgctctcagcttcgcaccagacgaccccatctataaggcggcacaatatatactggactacataatttctggtttaaacgacgatctcagcgaggatgagtgtgccttgcaggtgctgatctcgcgcattaaggattttgtctgcgatgcaaagaaatatgtgcactacaaagcttatcagatcattggattcgccagagaccacaaagccatggaagtgcctccgtcgatggccaaacagccgaaaaaccactcgcgcgcctcccatgtatcatttagcggtgtagccagcaccattggcgtgggcagctacgagattcatccgttcgtggacgtccgcccgtgcagcgaacgtcgggccactccggcgggatcattagcctctctggttgtcagccagatcggcgaacaggtaatacaggacaaggtgcgcctgccgcatctaaatcgcaaccagatcgtgttcatagagcactacctggtgaagtttaagcgggatctattggtgggtctggacaagctggtatttgcagcgattcagtgccactttgaaaaccgtatgatggaggtacgagaggagctccttctgcttgacaggaactatttgttcgagcagattgccaggggtatcctcagctatgcggttaatccgctcaactatcagtcggtgcttaagctggccgtgagcgtccagtcgtgtgaaatcatctgggagctgcagcagacgatgctcaagccaggcatcgatccccggggccagaatcacccagtgtcctgcggcaccgagcaggaacgcgagaccctggctctctgcataccctag

SEQ ID NO: 6270 - protein, 636 aa, DROSOPHILA
MIDILSLPRRNKVSGNPALLKMISYKTGLPINSLPGWELIPLNCKLPMLKCPGNQVIFSKNKIGQDFKSGKQEFECSVTEHIPEYNPLHDSNLKTFYSNERNLKRLRENGEITQDNDVICNLKDFNQHRQELHKSQLYYILQAYKRRESEQYDRMLIANAESITKKDHQNLAARHQCTEEVLARKKLQEQERHERKVHLLNITYEKFKRLENLATMQNMLLEHRKMLTNMRVAAHISMCQDLMRKLLIKQKKLFQFKKDRFNKNMRILRKQRLEVEKEREAFIDRHKAHYREKWQRIQDEIKERAQKAITARQPKRKRRKKKKSTLQERKPSFCDEYQATFEGLLDSDLCYALNAAIAMEGQTALSFAPDDPIYKAAQYILDYIISGLNDDLSEDECALQVLISRIKDFVCDAKKYVHYKAYQIIGFARDHKAMEVPPSMAKQPKNHSRASHVSFSGVASTIGVGSYEIHPFVDVRPCSERRATPAGSLASLVVSQIGEQVIQDKVRLPHLNRNQIVFIEHYLVKFKRDLLVGLDKLVFAAIQCHFENRMMEVREELLLLDRNYLFEQIARGILSYAVNPLNYQSVLKLAVSVQSCEIIWELQQTMLKPGIDPRGQNHPVSCGTEQERETLALCIP

SEQ ID NO: 6271 - DNA, 13810 bp, DROSOPHILA
gacaggtaaagttcagcactttgttttagtcgaagcgaaaaatgcagctatcaaatgttaatgaatcgtgcaaactgtcccctaattggatattaaactgcaccgaacttcaattgtattttgcaggggaaattgacatcttgcaataaaaaatttagtggccatatctagttattgcagttattttttatgtccgcattttacgacagttgccctgctctctgggagctggaaaacaatattcaattgcgatgcaagaaatgcgcaaagctgtcaatcattgtcacggttttttatttctgtggcgtaacacatggcgtatgaatgattggcgaagtaggtaaactatggatatgagtaataaaataaaagcaaatgctgcaaatgacaattctagagtcaataagccggggcacaaatcccagcagccgaataatgaaaacatatccttaggacacacatagaagctcactcgtatatcaattttatgggcggaaaataactttctcaacgtgtgaaaaatggtaaatggtgataacaaatcaaagctctgcccgcaagccatccgaaatagttcctcttatctaaatatttcaccttttttctctgtaagatacatatatgtggcgagtatagtaataaaatatttatactctcaaattcagaatagagacgcaaatgttcgctaagcttggctttttcgtttcggccattcttccaaaccattgactgatggaaatttgatggaaggttcacatcacgtatacgccccaggggacgtgccaaaattgaaactttcgttggtcaacaaatgtgacatattccgagatttattctttaaatgttggtttgattttacagcagttatgagggagaacagataaccgaaaaaggaaactgaacacggtgtttaattgttaaatattttgttgtgggaacattatatgtatgttatatatatataaatgataaatatttagaatgcatttaccgaagaccattatatttcacctggtgcctgacgtatgtgctgctccgatgccaacttcatcatcatcctctttctggccaacagagctttctcggtgggcgacatattggacacaatgcatcttatgattttgattttctcgcaattctcatcagtaaatgatagttttctatatttttggcaagaggtttcaggcacaggtttcttattgctagaagaagtccccgcacttgccataggactaacttcagtcgattttggttgagaaggtaatggatcatccgcagatattgtttgtgatctgcacactcttttcttccctgttggtgagctaatgacatgtttttgcttaaaagttttctttagattaacaggactattgggtgctgtttcagatgtattcctcgcagccctgtatgacttgggagatggaataggcgacagagaataagctcgctgggaactagtcttttcttttttggaagtcttatgcttagctttatgtcgctccgtttcagatcgagattcttcaactaacttccgtgagcttctagagctagatgaaggaagttcttcttggagcttcggccttttagcggcagttcgggaaacatctgggcttctttccaggctactgctcggactacgatatctcgatttccttccttccgattttggttttttaacctttggcttggtttccgtttttgactcagaagcctctgaatttttgtttgacttctgattatttgttaagtcattgccaagctgaaaaatttgattattataaataccattattttatcaattgcctagcacgacttaccaataaaccaacgtgtcccattgccactttcattgctggcatattgggtaaaaggcctaatgcgaatacgtttgtgattgcggtgaagttgccgcactcatcgcaacagtatctagaacaggatcgtgccaattgctggcaaaagactgtgaagcaggtgcccctcttcttggagttttcgggaggaacatacttcgaccaatccctaaacatgttgcattgtgttcccttcgattcgaagagcttttcaactgctggtttttgagcatcgtctgtgactttatcctccggctttggattctttttcttcgcagtcttttttggtttttgatccaccttttcagcgtcttctgtgggctcttcagtagcattttcataattgactgctttctgtaacttcgtggattgtctgcttggattaggtacttctgaaggacgctcctggacgaacgtggatctcctgcgtggattctgcctgacaccgattgaattgataatcctggctgtttttggagtttttgaattttttggagtctttggagtttttggattttttggagtttttggagtttttggagtttttggagtttttggaactcctgtggtggatggactcttcttataggtgcactttaatagtggatttttgcgaaaacactcggtgcagtagtaggtgtcgtgctgttccccgatatttgccggcaatccgatgcaatctccatggaaccactcgttgcaattgtcacagcatctatataggatcaaatacttcggttacgagcaaggatgagagacatcagctacctacatcataaatccattgatgtggctctggcgacaaatgcaatacacatccttggaggatactgcagtatcggcttcctgattattattattatgtgttggttattaaggcgcatatatctcaatgctaaagaaacttacaccaaaaacatttattttctgaactggggccatttctgatttccgaatatcactcacttgaacagaatacttttttaatgtgttcagtcctatttcagctttgattgctatgactcgcctacttttcccatttttcgataaaataaaagtgtgaccccccgattggcaattccatatgaagctcggcgaaacagaagtcacgccacaaaatattttttattgtatttcggtcgctcagagcactaaaaattcatgcaacttcgatgtgctatactgcaattgcaactccatttccatcagactctctttggggcatgaattatttatttacgagtgcacatggtgcaattctgtattatcagttcactgcctggcggtacattttcaatgaacttgtcaggacttcttgcaaactagggacgaaaattttgtctctgaggccctagttcatctgtcatatctgacagttagtctaaataaatattgtcttccaacctaaaataaacactaaacaaatcttaaaattgtagatgggttggtaagaagaaacttattcaaaaacgagattatgtttctaattagctgcttccagagtcggtctgcatttaattattttacaaattttgcctgtagttccttatcgcatttagtgcttgcgcaagcaattaattttcttgtttacccacatggccaacaatttttggaagaaccctttagctaatgctgtttttatgcccacccacgttggcttctatctgtttccacactttttttttttttttttatttttcgagctccctcccagtggagccattaacgtttttccatcatgtgtctggtttttgcaatttagatagttgaattgcgccattgctgcacttggcacagcgcaaaagtttgatggaatttaaaattaaataaaatgctcctaaattccctgttaagctaacgcgtattactcggcaaattaagcatttatagtacatgtgggcttaaaaaatcaacgaaaggcagaaagcctttcaggaagtattattggttatctgacacacccaattagctgacttccgatcgaattaagtcgccccccctttttccaccgcatgtcgcatatttcatgccataaacattaacccactcgattttatgtcacaatcgctctggctttacttttgcatcgcaccccaaaaaaaaaagtgaattgcacgtggcacgaacaacattttcatatggcatttacacttatcaacattatgtttggcgacgcctgtttgtggttatgtgccacacattcgggctaacagtgggtatgaataattgaatattcctcgtttttgctctccgtttttttgtccagttgtttgattaattgtgcacacgccgcgtgtcctcgcgctgggtaaaaaaacgagatggcttcatcatactttaaggccggtacagcagatgaatacaattgcattttgaccgcagaacgacggcttctgacctaaaaaagaaaacgattgacaggtgcacaaaacgaatgttgaggctcaaaggcagcagcacaaaaaccgtacacaatattgtgtaaacatggcttgctcaaagccaaaaatgatttgaatatggctacttagatgaaaaagtacgtgaaataaaattgatggaaaaatgctttagaaaatagggaaagtgcgatttcattaaaatttatgttggtaattattttcaaaactagtaactcaaccaataagagaccttaagaaagggtagataaacttaagattacgagtaggaaaagcaaataccacaacttcgatttgcatttggggctcgtaaaggtaaattttggctgaactgtctgtcggcgaatggaaaatgcaatcgacaagcgttttgaaaggcaagaaactgcttttgtgagcagtcaaaaggcagcaataaaattacttgcgtcacacaacgagcagggatttgaaatcgaattgcaggcagagataaaaaaaaatgccaggaacacacactctaatattgtacgtacatatgagcgtactggagattgcggatgtaaagtcctgattaaagaatttttctttcagctcgatttgcattttctagccaatctgctgaagaatggaattaggggatttttgggattccggcatttcctgcagcaaaattcagctgatttttagtagcttgacctcttaaaaatacgatgcaccattttaaatgacccacgaaaaaactaagaagagctacggtaaggatccttaaagcttgcaatttaaaacaacaatatttacgttattggcttaatagtcttgttaatcttgtttagaggcaaattggcttataattagtttaagatttctaagcacatatttcaccagcaattacatgaagtattcgttaagttatactacatatatcttgagtccattatttcagaaatccagtaatataaagtaataaaagccaactattaaactacttttatgtcgccatatgatgtaaagtttcctttcagagtctttaactatgaaagtgcagctataaaaagaagtcttcttatgacttaagaaaacggaaatggaagttgccatataaattctactagaatatagagtaacatgattgtaataattttaaagtaatagatttcggatacatctgaagtttatggtaaacaataaatggatgtttatttgaaaaatgcttttaaagcgtgagaaataagaacaaatttaagaaaagaaaacttctacgaataattatattaagttttaatgctatgccggaactgtggtcgaaagcaataaatatataatatatatatatttgtactgattgcgttgcatttggaaaattgaatcataaaaatgcaaattgctgctcccaaggctataaaaggaaatatcgtgcctcttgaaataaacaatgaggcataaaagtgaagtgaaggatttgtgaataatctatttcccataaaacgaacgggaatcggaaatgtttattgaaacaaaaagttactgcctacattatatatcagtctaattgattactttagatattaacattccagctacccagctgcccactagctaatcatcttcataatcagtttattgtgtgtggctcattaattaaaaaagaaaaacttgcgttttccccagccactgagtatgtcgactgaagagtgattaaaaaagttttcctccttctttttttcttagcttcttttcaatgggaaactcggttgagctttttagtagtttataaatttaaatggggcttcaatttgaacagaagcaacataaaacattttcaattttcaatatagtgattgaaagtaagactcttcacagtaattgctgtaacttatagggattatttaatgcctcgaattgttgagcctgcaaaccttaaattttaagtgctcaaacccaatctcttaattggaggcactaaactaatttaacgtgctgtaacattttgtcaacgaaaaatgcatgtcaaaaccatgctggttgccaagttgaggccgtggtaatttcattttctattcagacacgaactgacatattaaatttcagagcctgccgcataagtgggtcctcacttagtttcactccgagggcaatgaaaaagtttcgcctagaaagtgcggcggttcgtcaatgtttcgcatgaaacatacatatatacacatatacacttggctatatgtcggcttacatatatgtgcgtagtgacacatttcagcacacaacacacttatgcacttagtcgctgattgtaatttgctcataatttacaattataaacttgtggcgaaaatgacttaattgttgaatgtggcaagctggttgatggagcaaaatggtttgatccaagaagaatatatcaagtttgcaagttagattggagggtattttctccaataattagcaacaggtttcccttctaaaagagacccgtggatctgtgacaagttccacacaatgcgtaaacaaataaaaggatgtgtccccatgcaacatgttgcagcgaacgtgttgcacggttgggagaggtctttcgaccttttccccggaaaaatttcccttagcgatacattatgttagacaaatcgttattgtacagaattagtgttaaacgaatgctctaagcaaacggttcactggagttgtaggtttttacaagcaaaaccccttgaagtgtgagcgaaacacgagaatatgatttaatttttatacactaaatataatgctgcttcttttttttcgatttcgtttaagccgcataaatcactgaaacgcgcaccttattgcagatttattcttcaaaaattggtgtgaaacaaatggggttaaaagttgttcaaacaaaggggaatttgaaaggcttaagcacagacacacattataatagaccttcataaatgccacaatacatcatttaagcacacatagtgattttcaaaaagctgctcgtgaactaagggtttaagtactaactaaaacagtaagggataagctttgaatacagattataaaacagttaatgggccctaaatttatttattgtttacttatcgaataatgcatgcaattatcacgtaatttatagccaacaaaaagagattcacaaccttaggtaaataatttgagattttacgttgttccagaaaaagcgaaaactggagtcaaagcggcttaaagtatcagccatcatcaatctgcagcgctagacaaatggaatatttacatttcgatttagaatcgttgccaaaaagcagctgacagctttgcaaatattttttgtttaaagcggaataaaagtgctgaatggcaaacattttgtttaaaatcattttaactctatacgaatacgaatgtgctacaaatctttaagtctatcaagaaaaccgctgaacagcgaacggcaattgaaattggcaatggctgaggatagggcaaaataaaaccccaattgatttaaaatccagccaataaaactgcaacaaaagcgaagcaaagtgaaagcaaacaagttgcttgcacgccgataaaatcaaaggaaaatgggggagaaattttaaataaattcgcgacgaggtgagggttcggtggaaaagcacgcggaaaaacaataagaaaccgaaagctgcaaatataaaatctaaaattgaccataaacccaacggtggcccagaaatgaagataagcggcgaacgcgaaaaggaaaacaccaaattgatatacgctccctttgttttttgggtctgtggatgctcaatttttgccaggacgagccgtaatttgctgggaggattcgggcgagatggcagtgtcatcataataatttaaagtggaactgataatctttggcaggcaaaagtgtccttagctggcaggaaaagtcgaaaaggtggctgcaaactgaaggcgaaagtgcttaaataaagctgtttttgttgcgttcgctttgcgagtatctcagccatctttggtattttggttgccaaaatgttcgccagcattttccagagacaaaactcatgtcactctgctgatgttcaagctgttggcttttcgggaacaacataagtttagtttattatcagttttatgctaatcgaattgaagacacttgacacagctgtcactgccagttaaagttgcaaattttaacaaatttatatacaatgttcaaaagtttcatactaaaataaaaaaggatgacattatttatatgaaatagaactgctatttgtagagattcctgtaaataaaccgaaaaggaccttttggattgcggttatgagcgccgcttgtttccaaattatacaactggaagaatttaataaccattactgaaaggcccaattgtgtaccaaaaccaatttacatgaagctataacaagccagctcataactcaaaaatttcagcaatcaacaatgccctcatatctattattttcttgatgcacacacaatttcgcagccaaaattcaaatgagagatgggaactacaagggggatggatgttctcacacaaattcacaaacaatcgcaccctaatgcatgtgggtgccttggtaatgcatttacagatgagtcggtaactaaaactggacgagtttgcatggcaaagaaagccgtcgaataatatgggctaatgtggggcattcagctgcaatgttgtttcacagaaaagtggttcgattaaaggcaatcaagaagctgctttattggtaagcaatcataataataattgttaattattcgattgagtattataattttcctgcaaacttggtaaatttgtatatataaaagtaatgtatgaatattattcaaaaattcccctagtggaattttgtatttactcacaaaaaatctaaagcaagctgtgttctgggcaccctttttatcaagtcaactatgcaaatgagcttgccaaatgtgcttaactcaagtgggaacatatgcgagttccggtcagtttcttgccacttttttgtttcgcctgacaaatctgattatgttatttagattagccacagaagtcggttgtcagttggcagtaaacctttttcagccgccttcctgtcacatggggtaatcataaattattacgtaatatgccagttcttccagaggcaccagaatgacccaaattgggtgaatttcagtgagctttcggctgtcagatcaaaaggggaatggtttcaattgatgctcacctgcctgctttttgccccgggcgttgattgcaaatcttcaagtgggtttgacagccccccctgttcttgtatccatgtatcctatccagacaggacatgagcagcagagaagaagaccgaggagctgctccaaaaaaggagaagacgccgtgcaaacacgcagggagctaacagaaaattggattttatgcttatttacatttgccgcttgccagcaggtgggatatctaccaaaaagaggttacgatgcgaatgcgtggagcatatccccctgtttgatatatgcacacacatatattcatccgcaccagacttaaaagtgagccataaaaagtaggcaactttccgctttccgtatcggttccattaaagccaactgttgctggccatattctgtgaaatttatacgcgcttgcatatcgattaaactttcatcgcacgatgatttttacaatgatttttaagcagcaagctgttgccctcgttcacctcgtgccattgttgaaagtggatttcagttttttttttcaaaattaataataaatgtttttacgcgtttcactcaggcgccatgtaaggtacacatatcaatggtatgaaaaaggtgttgcagtaaagggattttgaaattcagttgggcacgcttttgtaaatttccttcgcctttaccttcttataaattaccaaagattttatcgatccaagcaagagaaatgttgcgtcatcgtgaaggtcgtcgcagcaggaaaacttatttatctttggcttacaaatttatacactgctattgagcaggaccaagtggtccccggggtataataataatgatagcaggcggccgctcaaacggggcgtatgagtaatttatggtaagcaattgacttgttgacatgaccgctggcgtatgtgtgcgccgaatatacgtattatatgcattccaagtaaagattgcagatagtcccagagcactcataatcttcgcaagaaaaaataagaccgtgcacaaaagagccacaaatccctggtaatcttcagcgtaattgacatctgattgaagaagcatctggctgcttgccaggtccgctacgtgccacctggctaatcacacagccaggaacgacaggtgtagaggagcggcgcccacggacaggtgatgagctcgtggcggccgggtgtggcaactgaaatccacgtgaaagccaacaccttgtcacccggcgacatcgcgcacaaaaaccttggctgccacccaaaaaccctgcatcctgcatcccacatcccttatccacacatcaaaaggactcggacgtgacatgtgcttatataactcctgacgacccaaatatcgggcaacgcagatggaaaacgaccgcggtcagcgggatcatcgagtttcacagataaaagctgaagattctgacacagcaggatatatttcgcgggcctagagaattacaaaacacttaactacctggtactattcatttgcatttctcttaatacttattcctttctgatttcgcttttatgatttctttactatttgcccatttctcttgcgagaggctaaaagcctcgagatttaggccagtactgtgctccatatttgaggtactcaattctattgaatgactaggtaaactctgagtttctcccttaaccggtcgttctctattgattagccggaattctcggggctaggcccaaaacaaatgccacgtcctccaacaatgccggcaaacacacgaataacaaagcaatctcagggcgggtgaagagcagctctagttggtgctgcagtcgcccacgaaggaagtccttgggcagcaggcactgtttgtatttccctcgcattctggccggaagtggctcctggacattcagagcagtgtcaagaacatgaacgccgccaatgttgcaacatgggcccgcatctatatctattcccccaagcggctttcacgccccgactcccagtgacccccatgtcttgccaccgacgatgatgatgtcgatgtctcagttgcctgcaataatgccacagatttcctatcagacgtttgcatcacgctggacctgacccttctacccaggattgttgcctatttaaggcgatttcctgctgccatcatccgctgcggagtttttcacggagatgttggcacgttatcgtacacagtatattataacttaatttcagagggccgcagaggaatatgactctggatgccgtgcgttacggaaatagtaaaattctaaataaatatatgggtattctatagctcttgcataaggtgttcagtccaaaaattatttgggttactatgggtacgtttaccaactagttttatggtttgataactttttcacaactgaaaggaatgggtgcattacatttagcactggtaacgaatgctcgttgaaaatcaagggattttccgatggccaactaacacgcctctggaatgcatacgaaaagccgtaaatctgcgagtcgcattgaaccagatgcattaggctgcataaatatctgctgatgcggacataatttcagtcatgggcggcactaagtactcgcactgactgtgcatatattgctgtcaaacactttcggcttttggctttcgaccgaatacgcttttccagcttttccggctttttcggccctccggcctggccgcgccccttatctgcgaatgcgaaatttggccataaagggaaaatgcagccgaggcacgcggatgcctttgaatgctgtcttcttgcacacaaaagagcggatgatgaaattttattgttttagctggttgtcatgttacgcagagataacaaattcgtttacgataattccagttagtttacagccaggacattcgaacgaaagcatatcctttgtctgaatgcagatcgttagtgagttttatgccatcctttggcaaactgcaatcgagaaaccttgattgcaccaccacactattcaaggcttaaagcttaatatccccgacatcgaacttaaatttcggccgagttgtgtctgcgacaattgctcacaaattatacaaacatttcgctgcctttcacgtagtttggccataaaatttcagtcaatttaatttccagcatttgttttacatacatatttatgtggaggcacgtgccagaacgtccagaacgcctgtctgtctgttccacacttttgcttttgcttgtcagccgccgaaggacgagggtaagatgtccttgtttgggggcgcagccagtcaagggcggctccctgaccgcatttgctccagctcgggaattttcagtcatgttttttagtgcagaaattaaagcaaacatggacgacccatgttgggaattgtaagcagaggcaaatggatattttcacagtcaatgcactgtcaaataaattatgtgtcttaaaataaatattaatagtttccattgaactatcccactaagtaagcttcctttaaactataagtaatcttaaatacaagttttaatgttgccattttgattcgaacattgcctgactgttggtgttggtgcaatcatgaaaccggaagttagttagccaacattggagtttataaaattacacattgttgacagtgcgaacaaagatggcagaagaagtcgtcggaagcgcgtgactcgactggaaacttggcagcaaactaaccaactagttctcggctaatatgcaaaagtcacacgacccagtcggtggccacgtactaggtctatatttaatgtgtgtgtatgcatgctatatgccatgtttaactcgggaatcgcgcatgaatgaagactgctgcaatcgtagcctcacctggcggatgtggaagtgaagatggaaggggaagtggaattggaagtggaggttgaggtccagttgggggcaaaataaattgttgttgaaatgagaaatgcggctgctgtttgttttgttaatgaagtcgcttgtggcccttcaactgcatgttcttttgtttgatttcgagagaagtttcggaaattatttgcttaaacaacagggcatgtacatataaattaattaaatgtattgtgcaggtccctcgccgcggtctccggcgtaggttgcaggtaacagggggttcctctgtcactgggaggcagggcggttgccgcagacctcttctcctagattgggagatatggtgggagaacgtctctccgttgttgactgcccttaaggctagccaaccaattcaatgataacagcagtagcttggagttgattgaaggcgcgatgcgctctttattgaatacaaaatcaaactga

SEQ ID NO: 6272 - DNA, 1587 bp, DROSOPHILA
atgactgaaaattcccgagctggagcaaatgcggtcagggagccgcccttgactggctgcgcccccaaacaaggacatcttaccctcgtccttcggcggctgacaagcaaaagcaaaagtgtggaacagacagacaggcgttctggacgttctggcacatgctgtgacaattgcaacgagtggttccatggagattgcatcggattgccggcaaatatcggggaacagcacgacacctactactgcaccgagtgttttcgcaaaaatccactattaaagtgcacctataagaagagtccatccaccacaggagttccaaaaactccaaaaactccaaaaactccaaaaactccaaaaaatccaaaaactccaaagactccaaaaaattcaaaaactccaaaaacagccaggattatcaattcaatcggtgtcaggcagaatccacgcaggagatccacgttcgtccaggagcgtccttcagaagtacctaatccaagcagacaatccacgaagttacagaaagcagtcaattatgaaaatgctactgaagagcccacagaagacgctgaaaaggtggatcaaaaaccaaaaaagactgcgaagaaaaagaatccaaagccggaggataaagtcacagacgatgctcaaaaaccagcagttgaaaagctcttcgaatcgaagggaacacaatgcaacatgtttagggattggtcgaagtatgttcctcccgaaaactccaagaagaggggcacctgcttcacagtcttttgccagcaattggcacgatcctgttctagatactgttgcgatgagtgcggcaacttcaccgcaatcacaaacgtattcgcattaggccttttacccaatatgccagcaatgaaagtggcaatgggacacgttggtttattggttaaaaaaccaaaatcggaaggaaggaaatcgagatatcgtagtccgagcagtagcctggaaagaagcccagatgtttcccgaactgccgctaaaaggccgaagctccaagaagaacttccttcatctagctctagaagctcacggaagttagttgaagaatctcgatctgaaacggagcgacataaagctaagcataagacttccaaaaaagaaaagactagttcccagcgagcttattctctgtcgcctattccatctcccaagtcatacagggctgcgaggaatacatctgaaacagcacccaatagtcctgttaatctaaagaaaacttttaagcaaaaacatgtcattagctcaccaacagggaagaaaagagtgtgcagatcacaaacaatatctgcggatgatccattaccttctcaaccaaaatcgactgaagttagtcctatggcaagtgcggggacttcttctagcaataagaaacctgtgcctgaaacctcttgccaaaaatatagaaaactatcatttactgatgagaattgcgagaaaatcaaaatcataagatgcattgtgtccaatatgtcgcccaccgagaaagctctgttggccagaaagaggatgatgatgaagttggcatcggagcagcacatacgtcaggcaccaggtgaaatataa

SEQ ID NO: 6273 - protein, 528 aa, DROSOPHILA
MTENSRAGANAVREPPLTGCAPKQGHLTLVLRRLTSKSKSVEQTDRRSGRSGTCCDNCNEWFHGDCIGLPANIGEQHDTYYCTECFRKNPLLKCTYKKSPSTTGVPKTPKTPKTPKTPKNPKTPKTPKNSKTPKTARIINSIGVRQNPRRRSTFVQERPSEVPNPSRQSTKLQKAVNYENATEEPTEDAEKVDQKPKKTAKKKNPKPEDKVTDDAQKPAVEKLFESKGTQCNMFRDWSKYVPPENSKKRGTCFTVFCQQLARSCSRYCCDECGNFTAITNVFALGLLPNMPAMKVAMGHVGLLVKKPKSEGRKSRYRSPSSSLERSPDVSRTAAKRPKLQEELPSSSSRSSRKLVEESRSETERHKAKHKTSKKEKTSSQRAYSLSPIPSPKSYRAARNTSETAPNSPVNLKKTFKQKHVISSPTGKKRVCRSQTISADDPLPSQPKSTEVSPMASAGTSSSNKKPVPETSCQKYRKLSFTDENCEKIKIIRCIVSNMSPTEKALLARKRMMMKLASEQHIRQAPGEI

SEQ ID NO: 6274 - DNA, 3385 bp, DROSOPHILA
tggaggcatagaagctgtccttaacattttcaggactctgcatggctggcttggtaaggaactttccaacaactgtgtgggtaggatgtgtgtgttttgttatcgactgactttcaagcagcccatccacttacattcttccacgttggctttgaccttatcgtttacaagctgctgaagctgctcctccgttgtttccgcatctttaaactggttgatcccttgctatgggtggttagaccttgtccgttggcttccacgacggtgatgagtgtcctaaacgcctctggtgtcgtgaactaattggttgggaaagcttgtaattcgatttgatagttgggagcaattgactgcgtatttaccctggacagcccgcttccaggtgtgaggaatttggtccagtgtgttttttgtgtttagtttactttgtatattgcgtcagaattctttttgctttgtactatataaagtatagttttctgattggtctgtattgttattttcgaaattgactttcaaacgggaaaccaaataagtatagcttcagtgaaaatggtactttctgcaagaacgataatagcgtttcagttcggcgatataaaaaaaatgataatagtaggggagccgggtgaacctcgcccccttactataaacgacataaagaacgtggttcgcgccaaatttgggatagtgaacttcgttttgcttaataaagaactggattatgtcataccggacgaagatctgctccagtaccttggcctgatgacacgtttctgcaattttgtcatagaggtgagggaagtccccctggataacggtgtgcatgagcttttagcgcctaatgtaccttccccggcagcaacaaattgaaaaaagacggccacacgtacattaacaagcacacttgtacacttcttcaaaatctttaacataaatatattttacaatatgtacgtacataagagctttttaatgaaataaaaaattaattcttagtttagttcatgtcgtcatcatcgtcgtagtcgtccatttcgtcgtcgtcatcgtcatcttcgctggtctcgtcgggatcggacgcctgggcgcggcacttggggcactggcagatgaacacgtagttctcgcgcaagaccttgtgcctcgagtggcgactacgctccagcatgcattcgtccaggtaggagatgcagatctcttcgccctgttgaatgggagccaaggccttgagcacgacaatgtcgttggaatagggaaatgtggagcaggcattcggcacgcaactgtggttgattttgctctgcagcaggtatagtccagagccctcgttattcaagaattcgccagcaactgtcggggcgatgttgatatggataattggctaacaaggtgatctgagaaataattacattctccgactttggcgtacagtccgtcgatgaccgtgtcgagctgttccttttccgaatccgttagtggtagatcggacaccttggcaacccactgggaaagcacgcttgttgcaattccctggctgttagttcccagaatggccatcaatgtcttgaaagcatccggtgttttgaactggaaaacaaaagatgtattcgcgttttaacgcactctgtaaggatatgcatactatggagaactcctcgcccgtgaaagcattgcagaacgcaagatacaactgctccatctgctgctcaaagttctcgcccagcattttgtgatagatcttctgctcgcgattcacaatcagcgactggaaggactgcaattgctcgaggaactcctccttcttggtgctctgctggtaaagagccatcaggcggacaatcagcattatgctacccgtctcgggcggatagtgcatctttttccaagtctcattcagtacattgatgggatgtgtgtcgtcggagtggaaggcgcccatgcaagccacgcggtggtagcgcttctgcgcctccattaggcagtcctcggagcagtagcgcaccttgcaccgtgggcactgggtgaactgggccacccactgggcggtgggatcgtgttgaagcagcggcacctccactttgggatcactggccaggcggcgcacattctctaacaccgtctccagtggccgcatgcagtggtcacacgccgcatagccgtaggccacgttccacgagaactgccgggacacgaacggttcctcctcgaagatcacctcgtccttcgcgaaatttttggtcgcgatcatcgcacgtccctgatgaattttttaatgtattcagggatagtatggtgacgggacttgacctaccttgccgggcaactcccgaatttcaaaattattcattgtttactcggctttttggctttgtttttgccaatccaattgcacgtgtagtgcagtgtggccgcaccctcgagcacgaatataaaatactatggtatttaagccgttaaggtttcctataaaatatttaaagtttaatttcataaacttttccttccgggctaaaatcaagtaatgggtcatgaagatgcaacttattcaattagtttcttcatagatctaaaaaaactatagtcagtgcctgattagttgggttgatattttttagatgcaattcaaagattcgtgtagctcaaacaacagggtgcaccttgtgtatttataaaaccaattctaaccgaaattgactgaacatggttattgcgatgtcagtatatcgatgtcttgagctatcgatagcacaaggtgcaattgtccgaaccaaacgatatacaaatcctgagaagagaggagaaaagaaagacttatttggtcctcgcaaattgccacatccgattccccggcctactagaaatggcagacgaagcgggcagccaagccgatggcaagcggcagtttatctgcggcgtgatcgagggattctacggccggccgtggaccacggagcagcgcaaggacctgttccgcaagctgaaatccatgggcatggggtccagtccttcgtacatgtacgcaccaaaggacgactacaagcaccgcgcctactggcgagagctatacaccgttgaggaggcggatcacctttccagtaaataacctttgaactcagctagtccttttgttaagtgccttccatgcaggtctcattgcagcggccaaggaggcgggcatcaccttttactacgcgttatcgcccggactggacatgacctacagcagccccaaggagatcgcaacgttgaagcgcaagctggaccaggttgcgcagtttgggtgtgaggcctacgccctgctctttgacgacatcgagtcggagctctcaaaggcggacaaggaggtctttcagacgtttgctaacgcgcacgtgtcggtgac

SEQ ID NO: 6275 - DNA, 1190 bp, DROSOPHILA
attggcaaaaacaaagccaaaaagccgagtaaacaatgaataattttgaaattcgggagttgcccggcaagatgatcgcgaccaaaaatttcgcgaaggacgaggtgatcttcgaggaggaaccgttcgtgtcccggcagttctcgtggaacgtggcctacggctatgcggcgtgtgaccactgcatgcggccactggagacggtgttagagaatgtgcgccgcctggccagtgatcccaaagtggaggtgccgctgcttcaacacgatcccaccgcccagtgggtggcccagttcacccagtgcccacggtgcaaggactgcctaatggaggcgcagaagcgctaccaccgcgtggcttgcatgggcgccttccactccgacgacacacatcccatcaatgtactgaatgagacttggaaaaagatgcactatccgcccgagacgggtagcataatgctgattgtccgcctgatggctctttaccagcagagcaccaagaaggaggagttcctcgagcaattgcagtccttccagtcgctgattgtgaatcgcgagcagaagatctatcacaaaatgctgggcgagaactttgagcagcagatggagcagttgtatcttgcgttctgcaatgctttcacgggcgaggagttctccatattcaaaacaccggatgctttcaagacattgatggccattctgggaactaacagccagggaattgcaacaagcgtgctttcccagtgggttgccaaggtgtccgatctaccactaacggattcggaaaaggaacagctcgacacggtcatcgacggactgtacgccaaagtcggagaatttgctggcgaattcttgaataacgagggctctggactatacctgctgcagagcaaaatcaaccacagttgcgtgccgaatgcctgctccacatttccctattccaacgacattgtcgtgctcaaggccttggctcccattcaacagggcgaagagatctgcatctcctacctggacgaatgcatgctggagcgtagtcgccactcgaggcacaaggtcttgcgcgagaactacgtgttcatctgccagtgccccaagtgccgcgcccaggcgtccgatcccgacgagaccagcgaagatgacgatgacgacgacgaaatggacgactacgacgatgatgacgacatgaactaa

SEQ ID NO: 6276 - protein, 384 aa, DROSOPHILA
MNNFEIRELPGKMIATKNFAKDEVIFEEEPFVSRQFSWNVAYGYAACDHCMRPLETVLENVRRLASDPKVEVPLLQHDPTAQWVAQFTQCPRCKDCLMEAQKRYHRVACMGAFHSDDTHPINVLNETWKKMHYPPETGSIMLIVRLMALYQQSTKKEEFLEQLQSFQSLIVNREQKIYHKMLGENFEQQMEQLYLAFCNAFTGEEFSIFKTPDAFKTLMAILGTNSQGIATSVLSQWVAKVSDLPLTDSEKEQLDTVIDGLYAKVGEFAGEFLNNEGSGLYLLQSKINHSCVPNACSTFPYSNDIVVLKALAPIQQGEEICISYLDECMLERSRHSRHKVLRENYVFICQCPKCRAQASDPDETSEDDDDDDEMDDYDDDDDMN

SEQ ID NO: 6277 - DNA, 10624 bp, DROSOPHILA
tgggcacagctagaggttaaggttgagaaactggccaggaagtatccgctcgggggttaatggatacggatacacggatggggatgttcacagctatggatgagcacatatgtatgtacatacatacatacatacatacatacatacatatgtatgggcatatgtacacgaagatctggatgtgctcatcgctagatgaagtgcgacagaaagggcaacaaacatggccagcgtggccaatggcaacgggatttgcccaaaaatccaaaatgcatccagacatatgcatatgtgtatgtgggtgctacatacagtgatcactcgtatagaaggcagaaaaagttgacaattggagatttggtagtctggcacatttctatcctacatccgttgattttgtttcattttttaacaagatttcagactcatttcccgaagtatttattttgccgatattaatacttttttctagttattgaaaaaaatggtgactttggtttaaagtcctaggtcaaactgaagtattccataaatattaaaagaaggaaatactacacaaataatgcatcttcgattagatatacttcttctacgctcagatctagtatcgtgcatcccatttccagttgtcaagtgtccactgtaatttccaattccaatgaaagatgagtacggccctctcgctcttccacacacacacacacgcacccaatgtgtaatcctatttgcgccaaataaagaaaaagaagaagacaaatttgaaacgaagaatgagaaggaaagaaaatccaagctgcgctgcctccgttgaaaaaaaaatgagaaaaaccagactgcttctctcttctctcttttctcttttcatttcaaattttacgctctcgctctcgcggacagcgacgccgccggcggcagcgcagcgcagccgttgtatttataaatacaactttataaatacaacatcagtcgattttcatctgccgaatcggttgcgctgcggctgcgctgagaataagatacaaaactcgtgcgcggcgcttcaagaaaccaactcaaaagcagacaaatcaaataactaacttgtagaaaataaaaatataataaaacataaacagaatttctcaattctaagcctacaaagaaatatcaaacgcaaactgcatatttttttcacgttttttttttaaacgacaaaccattgggaatttttggaatactaagctttaaggccaaagaagtgtgaaaaatattaagtgaaccaaaaaataagtgctatctgaattaagttatctgacaagaattaaaaaaaaaacctacacactaaacataaaacacaaaacaccaaaaagccaccaaaaatcatttttcaacgggaaccaagcctaaaacagtgcgaaatccggagttggaatgccgtcgcaactgttgaacacaatttcacaactaaatatccactaaggtaattttttaacagtgattgttttggatttttttttatgttgtttctgtgatttgtgcgtgaacaatttgttgttgctttggataaataatcgagcgcagaaaacatggattatcaaaaggatgaaattggaaaagttattgggtcttcagctaagctaacatttttgtgttaaattgttaagaacaaaaattgttgaatttaaaattagcacaaccgttttaaaataaaatttaaaagcttagttttcaaacacatttgaaatgcaatttttaaatgcaattgaagtgcagcagtgttttaaaatcgacttagatattagaaatattatttaaaaaagatgaagtaatgaaaatatatatgccagtttaattcttccgtaaatcgttaaaataatttaatgatccaaattcattatattccgattaaatcaaaaggaaaatgtttatataaaattattttcctacgatcacaatgtttgaaaacatttcaattcaagtccattcccaaaacccctcccttggtgttttgggtcaagttctgcctgcaattagccgggtcaaaaaattacccatgaccgatgctaaaacccttgaactttgacacaccacgcacacacagacagtccagtccgaaaagccagaaatttccgtggtcagggatgatgaggcgacgtttatagggtttaattcagattgatgatctgtttaatatcgcaggggttgtgctccatgtcaaacggttcacttcactcggcttgattccgttagatggcgattagaaatttgttttttcactgaccaagttgtgttcattgataattcccaagggtcataaaggtgtgaaaaccgcccaacaattccccgccccaaaaagtatatattcgggagggaatctttatctcaatgacttttcatgactcatggacaacgaaattgaaatcagccaaccaaaatgaaaggccaaaccgaaagccaatggacaacaaacaactaacacacatttaccgaaaaaattatatgtgtatatgactggatgtatgcatgtgtgtatgtatatatagcgaacagtgggctcgttatcggtagaaatttttgatcagcctctgaggtttcagagtttctttatttttgttgcctttcggggggaagttaggattttcaaatcgatccactaccacccaaagaaacaacaacaacgacacaacgacaacaactgggacaccgctcatagtcatagccttgataacggtaaatgctaatgagtgtacccacatttttcacccacacaccgaaattcttgataagagcagcattgccagatgtgtattgaattcaattcttcgcacctttctgcggatgcacttgcaacagtcgccaattcttcttattcgctcttcacaggaactcgatttcaaatagcttttccgcttctgttttttcatctttccgttgcattgtttacttgcctgaatcagctgtttacgttactcaagatttagtttagtattacgcgacaatcgaagactggagaatgcagggtgccccactatcgattttctgttattaattgaaccctacacccagtttacagaatggaacgctgtcagtgtggatatcatttgtttacgcgtgatttctttccatcttcagactttcataaagctagtaattacatttttgaatcagcgagtgttgcaaaactttggtggggttggacaaaaagtaataaaaatacttgcgattataagtgtttagtatatttgatacacttcttttgtcttcgagttatctaattagtgtcaacacttgttcaagtgcttcgatttttcgatagagttcttattacacgtgctttatctatacccatctctaaaagtcctttcttctttttctctcgaatcttctaaatcagcacagttaactagccgttggaaaaatgctcgccgcacagcaacagcacaacaacagcacagtggaatcggaaatggagcgccagcgacgggactccaccacatcggagtcctcgctggagcatctggatctgggacgtacgcccaaaaaactgggcggtaacagtggctctacacagaccacatccacgccacatgagctggctacggtgacatcttcgcgcaagcgcaaaattcgccatttgcaattgaatcaccatcagcagcagcagcatcaccagcagtcggatctgctgagtgatgaagacgtggcggaggcggaggcggaggaggatgaggacgaggaggatggcgaccaggtggccgccttgggctcaaggaatctgggacggcacaagcagcgtcgcagtggtggcgccaccacacaggcatccattgtgatggactacagcagtggcgatgccagttcgctgcgcaagaaatttcgtctgaatcgctcggcggccagtctctcggaatcgggattcgtggacgccagcagcaccactggccacagtggctatctgggtaacagtagcagcgctacgaacactactgcgaccagtggtattggtgctagcgcagtggctccatctccagtcggcggagcagcgatcaacgcagcatccagcagcagcggcagcagcagtggcggatccggtggctcctcgccccagggacagtgcctctccagcggtgaatcaggcatcggagccggcgacgagcatatgaaatacctttgcccaatctgtgaggtggtctcagccacgccgcacgagttcaccaaccacatccggtgccacaattacgccaatggcgatacggagaacttcacctgccgcatttgctccaaggtgagtcattgtggtcactcaaattgtgtgcaccctttgtttttcattagattagatatagatttaaggaatatcgaaagaagcgttcaaatctcaaacgaagactttcaatattgctttgaaagcaagttagtttcgagtagttgagatgaactactgctttaaattgatgaatagacagatgtgctaggacttagaagagctagccgtaggttattaacccctgatcgcctgattactcactcacctgttcttcgtttctcccaccatccaaattgaaactataaacaggtgctatcctcggcttcatccctggacagacacgtgctggttcacacgggcgagcgtccctttaactgccgctactgccacctgacgttcaccaccaatggcaacatgcaccgtcacatgcgcacccacaaacagcatcaagttgcgcagtcgcagtcgcagtcgcagcagcagcagtcgctgcagcagcagcaacagtcgcagcagcagcgccgtcagcagcagcaacatcagccgtcgcagcagcagcagaatcccgcccagcagcaattgatgggcaacacgttatccgcccgagcggagagctacgaaagcgatgccagctgctccacggacgtgtccagtggacatagtcacagtcgcagcagcagttcccttaacaacaacaacaacaactcgcacaaggctaacaacaatctaaaggacttggaggagctggaggtttcgactgaggatcaggatacggagaacaagcagcgtcgactgaagaccaccatcaacaacaacatcatcgagagtgagcagcaggaggatatggatgatgaggaggccgacgatgcggatgtggccatgctgaccagcactcccgatgtcgccactcttttggccggagccagtgcatctggcgccgcctcgcgttcccctaccccatcgccatccgcctcacctgccttgctcctaagttgtcccgcctgcggagcctccgatttcgagaccctgcccgctctctgcgtccatttggatgcaatgcactcagacataccagccaagtgtcgggactgcgaggtgatctttgccacccatcgtcagttgcagtcgcactgttgtcgcttacccaacgctctggccggtggcttaccgccgcttctcggagccagcagttcgccattgcacaacgaggagccggaggatgaggagcacggtgacgatgaggatctcgagcagaaggagaggttagcgagtcaaagcgaggactttttccatcagttgtatctgaagcacaagacagcaaatggatgcggagccatctcgcatccgccatcgcccatcaaacatgagccggcggacaccaaggatctggccgatatccagagcatcctgaacatgaccagctccagttccagttttctgcgcaactttgagcagtccgtgaacacgcccaattcgagtcagtacagcctggacggtcgggatcaggaggaggaggcacaggacgcgttcacctcggagttccgtcgcatgaagctgcgcggcgagtttccctgcaagctgtgcacggccgttttcccgaaccttcgtgccctcaaaggtcacaatcgggtacatttgggtgcagtgggtccagccggaccctttcgctgcaacatgtgtccctacgccgtttgcgacaaggccgccctggtgcgtcacatgcgtacccacaacggagatcgtccgtacgagtgcgccgtgtgcaactatgccttcaccaccaaggcgaactgtgaacgtcatctgaggaatcgccatgggaagaccagtcgcgaggaggtgaagcgagccattgtctaccatccggcggaggatgctggctgtgaggacagcaaatcgcgtctgggtgaagatctggctgatacgagtttccgttcgatcagtcccacgccaccgcctcctccggtaaatgagagcaaatcccagctgaagcacatgcttctcggcgagaatcacctggctcctgttaaccaacagccgccgctgaagatccaggtgaagagcctcgaccaactagtggacaagaagccatcggcaccagctccccagcagcaacagcagcagcagcagcaggagaagagcggatctgccctagacttcagcatggatgttttggatctcagcaagaagccaactggcggagcatcgctgacaccggcggtcactcgcacaccgacgcccgctgcagttgctccagtgacgcctggcggcgttggaactcctgacctggccgccgccattgagcagcaacagctgctactggcccagcagcaactctttggtgctggcggcgagtatatgcagcagctattccgcagtctcatgttccagtcccagacgtcgggattcccgttctttccctttatggcaccaccaccgccacaagcaaatccggagaagccaccgatggtgagtccaccaaaccgtatcaatcccatgcccgtgggcgttggagttggcgtgccagtgccacctggtggtcccgttaagatggtcatcaagaatggagtcctaatgcccaagcagaaacagcgacgctatcgcaccgagcgtccctttgcctgtgaacactgctcggcgagatttacgctgcgttcgaacatggagcgccatgtaaagcagcagcatccgcagttctatgcacaacggcagaggagtggccaccatgtgatgcggggcaggggtgcctccaatgtggccgctgctgccgccgctgctgccgctgccgcagctgcaacagtcatggctggcggaccaggatcctccggattcggctccaatcaccatcatggccatggccatggttcccatggttcccatggtcatgctcccatttcggagcaggtcaagtgcgccattctggcgcagcaattgaaggctcacaagaacaccgatctgttgcagcaggctttggcccacggctccagcagtgtggccggcaatcctctcctgcactttggctacccactgaccaaccccagtcccatgcacaatggtagcagccagggcaatggccaggccacggccatggatgacgatgagcccaagttgattattgacgaggatgaaaacgagcatgatcatgaggtggaagcagaagacgtggatgacttcgaagaggatgaagacgaggaggagatggatgagccggaagatgagccagaattgattctagatgagcagccggccgaaaaggaagccgaagaggagcaggagctgcccaagccgctagagcaattgggtaccaaagaagcggcacaaaaaatggccgaaaccattttggagcaggccatcaaggcgggcaagccattgagtccaccacccaccaaggagaatgcctcgcccgccaatccaactgtggccacaacaatgcaagagccagccattacggcgcccagtactaatcccagcagtttgaaaacgatgatcgctcaagccgaatatgtgggaaaatccctcaaagaagtggccagttcaccgttcaaggatgagtcccaggacctggttccagtggccaagctggtggacaatgccaccagccagaacatgggcttcaacagctatttccggcccagcgatgtggccaatcacatggagcagagcgacgaggagggcctcgtggcctccggaagcgccagtgagagcaacaacagcggtaccgaggacgtcaccagcagcagttccagcagtgagcccaagaagaagtccgcctacagcctggcgcccaatcgtgtctcctgtccgtattgccagcgcatgttcccatggagcagctcgctgcgcaggcacatcctcacccacactggccagaagcccttcaagtgctcccactgcccgctgttgttcaccaccaagagcaactgcgatcgccatctcttgcgcaagcacggcaatgtggagtcggccatgtccgtgtatgtgcccactgaggatgtgagtgaaccgataccagtgcccaagtccgtcgaggagatcgagctggaggagcagcgacggcggcaggaggcagagcgcgagaaggagctggagctggagcgcgagcgggagttggagcgagagcgggagctggaaagggagcgccagctggagaaggagaaggaacgcgagcgccagcagctcatccaaaagctggcggctcaaatgaatgccgctgctactgctgctgccgtcgttgctgcagcctcagcggtaaatggtggcgcatctggtggaccccatggacccattgcagatgccttggctggcggagatctgccctacaagtgccacctgtgcgagggttcctttgccgagcgtctgcagtgcctggagcatatcaagcaggcccatgcccacgagtatgccctgctcctggccaagggagccattgaaactgagtcgctggaagccaatcctcaccagcagccgtcgcagcaggccgtgcattccgatgacgaggctccgaatggcggcggtaaccggggcaagtatcccgactacagcaaccgcaaggttatctgtgccttctgcttgcgtcgcttttggtcaacggaggatctgcgtcgccacatgcgcacccattcgggcgagcggccattccagtgtgatatctgcctgaggaagttcacactgaagcacagcatgctgcggcacatgaagaagcacagtggtagggcccacaatggcgatacaccgggatccgattgctccgacgatgagcaggtgagcagcccgcccagcacaccacatcccacccagccgaccagcgccaacaacaacaatagctgtcacaataacaataataatgccaacaacaataacaacaataacaacaacaacaacaacaacagcagctccaagctgggactaaagctccacgacctgctggacaaggcgagcgaatggcgggccagtcgcctgggtgagcacaaggagaacatgggcgaggccacgccctcgggagcaacggtcgctggctcggatctgattggcaatctattgggcatcagtgatcagggcattctcaacaagctgctctcctccgccgacgaggcggccaaacttctgggtgtggacaacaagtgaacgcaactcgagtgacaatcgagcgacaccaagagccataaatactggagtagcagcagttttacaccgccttacgtataccaaagcttaaatagttttcattaatggtagtctacttaaaaaatacaaaataacaaagaaaagaaaaaaaacgaaaatgaaaacctgattagaatgtaaaacaggagtgcgctaaacagctcgattatattttaggagtcacaggctcaagctatagagcaaaagtaaaaaaaaaaagaaaaaaaaaacaagagaagagaagagctacaactggacacacctgttttgcagagttttttggaacatattttttggagacctctttttttttgccaaccccctatgttaagcggtccaaccaacaaaccacaagctaatcaaaatctttggagacaaacactattttttttttacaatttttttttcctagctctataactaattatacctattttacaattagccgctaagtagctgcaatgacaaactgaaaaaaaaccctaaaaaataacgaacttttgacatgacaaaaaaagacttgacacacaaaaaaaaaaataataacaaaaatacacacctaaaataataaaatactatatgatgtacattgaaagaggccttgagaaccgcagcgtggcttaaatctagttatataatgcaggatgcagacgacattttagctgcctgcaagtgaggatagtcaggtatttgtaagactaggcttagaaacattttttttaggatcttatttaacgaaactcattcattgctgtagcctatggaaaatacacacacacacacacacacattgaataacatactaaacatatagctatttaaatatacgaaaagcatgatgatatacataattaaattagtggacttcttacagcaataaccaaagcatttcgcgtttgtagcgttgtttaagctaaacgaaattacatttacccaatgcatgcctatctatatataacgacatatttataaaaaaaaaaagcacactactatattatataaaatatatggttctatttaatgtggatgcagcagcagcaacaaactactgaacaaattaaactatgtacttagcgattatgaatgaatgtacttaaaactgtaaaagtgtacttaaaattgtaaactcagaaagacacacgcaacgagaatggattacaaattgaattctaataaaataacgatgaaagaacaaaataattggcgctgttttta

SEQ ID NO: 6278 - DNA, 6395 bp, DROSOPHILA
ctgcgctgagaataagatacaaaactcgtgcgcggcgcttcaagaaaccaactcaaaagcagacaaatcaaataactaacttgtagaaaataaaaatataataaaacataaacagaatttctcaattctaagcctacaaagaaatatcaaacgcaaactgcatatttttttcacgttttttttttaaacgacaaaccattgggaatttttggaatactaagctttaaggccaaagaagtgtgaaaaatattaagtgaaccaaaaaataagtgctatctgaattaagttatctgacaagaattaaaaaaaaaacctacacactaaacataaaacacaaaacaccaaaaagccaccaaaaatcatttttcaacgggaaccaagcctaaaacagtgcgaaatccggagttggaatgccgtcgcaactgttgaacacaatttcacaactaaatatccactaagatgctcgccgcacagcaacagcacaacaacagcacagtggaatcggaaatggagcgccagcgacgggactccaccacatcggagtcctcgctggagcatctggatctgggacgtacgcccaaaaaactgggcggtaacagtggctctacacagaccacatccacgccacatgagctggctacggtgacatcttcgcgcaagcgcaaaattcgccatttgcaattgaatcaccatcagcagcagcagcatcaccagcagtcggatctgctgagtgatgaagacgtggcggaggcggaggcggaggaggatgaggacgaggaggatggcgaccaggtggccgccttgggctcaaggaatctgggacggcacaagcagcgtcgcagtggtggcgccaccacacaggcatccattgtgatggactacagcagtggcgatgccagttcgctgcgcaagaaatttcgtctgaatcgctcggcggccagtctctcggaatcgggattcgtggacgccagcagcaccactggccacagtggctatctgggtaacagtagcagcgctacgaacactactgcgaccagtggtattggtgctagcgcagtggctccatctccagtcggcggagcagcgatcaacgcagcatccagcagcagcggcagcagcagtggcggatccggtggctcctcgccccagggacagtgcctctccagcggtgaatcaggcatcggagccggcgacgagcatatgaaatacctttgcccaatctgtgaggtggtctcagccacgccgcacgagttcaccaaccacatccggtgccacaattacgccaatggcgatacggagaacttcacctgccgcatttgctccaaggtgctatcctcggcttcatccctggacagacacgtgctggttcacacgggcgagcgtccctttaactgccgctactgccacctgacgttcaccaccaatggcaacatgcaccgtcacatgcgcacccacaaacagcatcaagttgcgcagtcgcagtcgcagtcgcagcagcagcagtcgctgcagcagcagcaacagtcgcagcagcagcgccgtcagcagcagcaacatcagccgtcgcagcagcagcagaatcccgcccagcagcaattgatgggcaacacgttatccgcccgagcggagagctacgaaagcgatgccagctgctccacggacgtgtccagtggacatagtcacagtcgcagcagcagttcccttaacaacaacaacaacaactcgcacaaggctaacaacaatctaaaggacttggaggagctggaggtttcgactgaggatcaggatacggagaacaagcagcgtcgactgaagaccaccatcaacaacaacatcatcgagagtgagcagcaggaggatatggatgatgaggaggccgacgatgcggatgtggccatgctgaccagcactcccgatgtcgccactcttttggccggagccagtgcatctggcgccgcctcgcgttcccctaccccatcgccatccgcctcacctgccttgctcctaagttgtcccgcctgcggagcctccgatttcgagaccctgcccgctctctgcgtccatttggatgcaatgcactcagacataccagccaagtgtcgggactgcgaggtgatctttgccacccatcgtcagttgcagtcgcactgttgtcgcttacccaacgctctggccggtggcttaccgccgcttctcggagccagcagttcgccattgcacaacgaggagccggaggatgaggagcacggtgacgatgaggatctcgagcagaaggagaggttagcgagtcaaagcgaggactttttccatcagttgtatctgaagcacaagacagcaaatggatgcggagccatctcgcatccgccatcgcccatcaaacatgagccggcggacaccaaggatctggccgatatccagagcatcctgaacatgaccagctccagttccagttttctgcgcaactttgagcagtccgtgaacacgcccaattcgagtcagtacagcctggacggtcgggatcaggaggaggaggcacaggacgcgttcacctcggagttccgtcgcatgaagctgcgcggcgagtttccctgcaagctgtgcacggccgttttcccgaaccttcgtgccctcaaaggtcacaatcgggtacatttgggtgcagtgggtccagccggaccctttcgctgcaacatgtgtccctacgccgtttgcgacaaggccgccctggtgcgtcacatgcgtacccacaacggagatcgtccgtacgagtgcgccgtgtgcaactatgccttcaccaccaaggcgaactgtgaacgtcatctgaggaatcgccatgggaagaccagtcgcgaggaggtgaagcgagccattgtctaccatccggcggaggatgctggctgtgaggacagcaaatcgcgtctgggtgaagatctggctgatacgagtttccgttcgatcagtcccacgccaccgcctcctccggtaaatgagagcaaatcccagctgaagcacatgcttctcggcgagaatcacctggctcctgttaaccaacagccgccgctgaagatccaggtgaagagcctcgaccaactagtggacaagaagccatcggcaccagctccccagcagcaacagcagcagcagcagcaggagaagagcggatctgccctagacttcagcatggatgttttggatctcagcaagaagccaactggcggagcatcgctgacaccggcggtcactcgcacaccgacgcccgctgcagttgctccagtgacgcctggcggcgttggaactcctgacctggccgccgccattgagcagcaacagctgctactggcccagcagcaactctttggtgctggcggcgagtatatgcagcagctattccgcagtctcatgttccagtcccagacgtcgggattcccgttctttccctttatggcaccaccaccgccacaagcaaatccggagaagccaccgatggtgagtccaccaaaccgtatcaatcccatgcccgtgggcgttggagttggcgtgccagtgccacctggtggtcccgttaagatggtcatcaagaatggagtcctaatgcccaagcagaaacagcgacgctatcgcaccgagcgtccctttgcctgtgaacactgctcggcgagatttacgctgcgttcgaacatggagcgccatgtaaagcagcagcatccgcagttctatgcacaacggcagaggagtggccaccatgtgatgcggggcaggggtgcctccaatgtggccgctgctgccgccgctgctgccgctgccgcagctgcaacagtcatggctggcggaccaggatcctccggattcggctccaatcaccatcatggccatggccatggttcccatggttcccatggtcatgctcccatttcggagcaggtcaagtgcgccattctggcgcagcaattgaaggctcacaagaacaccgatctgttgcagcaggctttggcccacggctccagcagtgtggccggcaatcctctcctgcactttggctacccactgaccaaccccagtcccatgcacaatggtagcagccagggcaatggccaggccacggccatggatgacgatgagcccaagttgattattgacgaggatgaaaacgagcatgatcatgaggtggaagcagaagacgtggatgacttcgaagaggatgaagacgaggaggagatggatgagccggaagatgagccagaattgattctagatgagcagccggccgaaaaggaagccgaagaggagcaggagctgcccaagccgctagagcaattgggtaccaaagaagcggcacaaaaaatggccgaaaccattttggagcaggccatcaaggcgggcaagccattgagtccaccacccaccaaggagaatgcctcgcccgccaatccaactgtggccacaacaatgcaagagccagccattacggcgcccagtactaatcccagcagtttgaaaacgatgatcgctcaagccgaatatgtgggaaaatccctcaaagaagtggccagttcaccgttcaaggatgagtcccaggacctggttccagtggccaagctggtggacaatgccaccagccagaacatgggcttcaacagctatttccggcccagcgatgtggccaatcacatggagcagagcgacgaggagggcctcgtggcctccggaagcgccagtgagagcaacaacagcggtaccgaggacgtcaccagcagcagttccagcagtgagcccaagaagaagtccgcctacagcctggcgcccaatcgtgtctcctgtccgtattgccagcgcatgttcccatggagcagctcgctgcgcaggcacatcctcacccacactggccagaagcccttcaagtgctcccactgcccgctgttgttcaccaccaagagcaactgcgatcgccatctcttgcgcaagcacggcaatgtggagtcggccatgtccgtgtatgtgcccactgaggatgtgagtgaaccgataccagtgcccaagtccgtcgaggagatcgagctggaggagcagcgacggcggcaggaggcagagcgcgagaaggagctggagctggagcgcgagcgggagttggagcgagagcgggagctggaaagggagcgccagctggagaaggagaaggaacgcgagcgccagcagctcatccaaaagctggcggctcaaatgaatgccgctgctactgctgctgccgtcgttgctgcagcctcagcggtaaatggtggcgcatctggtggaccccatggacccattgcagatgccttggctggcggagatctgccctacaagtgccacctgtgcgagggttcctttgccgagcgtctgcagtgcctggagcatatcaagcaggcccatgcccacgagtatgccctgctcctggccaagggagccattgaaactgagtcgctggaagccaatcctcaccagcagccgtcgcagcaggccgtgcattccgatgacgaggctccgaatggcggcggtaaccggggcaagtatcccgactacagcaaccgcaaggttatctgtgccttctgcttgcgtcgcttttggtcaacggaggatctgcgtcgccacatgcgcacccattcgggcgagcggccattccagtgtgatatctgcctgaggaagttcacactgaagcacagcatgctgcggcacatgaagaagcacagtggtagggcccacaatggcgatacaccgggatccgattgctccgacgatgagcaggtgagcagcccgcccagcacaccacatcccacccagccgaccagcgccaacaacaacaatagctgtcacaataacaataataatgccaacaacaataacaacaataacaacaacaacaacaacaacagcagctccaagctgggactaaagctccacgacctgctggacaaggcgagcgaatggcgggccagtcgcctgggtgagcacaaggagaacatgggcgaggccacgccctcgggagcaacggtcgctggctcggatctgattggcaatctattgggcatcagtgatcagggcattctcaacaagctgctctcctccgccgacgaggcggccaaacttctgggtgtggacaacaagtgaacgcaactcgagtgacaatcgagcgacaccaagagccataaatactggagtagcagcagttttacaccgccttacgtataccaaagcttaaatagttttcattaatggtagtctacttaaaaaatacaaaataacaaagaaaagaaaaaaaacgaaaatgaaaacctgattagaatgtaaaacaggagtgcgctaaacagctcgattatattttaggagtcacaggctcaagctatagagcaaaagtaaaaaaa

SEQ ID NO: 6279 - protein, 1893 aa, DROSOPHILA
MLAAQQQHNNSTVESEMERQRRDSTTSESSLEHLDLGRTPKKLGGNSGSTQTTSTPHELATVTSSRKRKIRHLQLNHHQQQQHHQQSDLLSDEDVAEAEAEEDEDEEDGDQVAALGSRNLGRHKQRRSGGATTQASIVMDYSSGDASSLRKKFRLNRSAASLSESGFVDASSTTGHSGYLGNSSSATNTTATSGIGASAVAPSPVGGAAINAASSSSGSSSGGSGGSSPQGQCLSSGESGIGAGDEHMKYLCPICEVVSATPHEFTNHIRCHNYANGDTENFTCRICSKVLSSASSLDRHVLVHTGERPFNCRYCHLTFTTNGNMHRHMRTHKQHQVAQSQSQSQQQQSLQQQQQSQQQRRQQQQHQPSQQQQNPAQQQLMGNTLSARAESYESDASCSTDVSSGHSHSRSSSSLNNNNNNSHKANNNLKDLEELEVSTEDQDTENKQRRLKTTINNNIIESEQQEDMDDEEADDADVAMLTSTPDVATLLAGASASGAASRSPTPSPSASPALLLSCPACGASDFETLPALCVHLDAMHSDIPAKCRDCEVIFATHRQLQSHCCRLPNALAGGLPPLLGASSSPLHNEEPEDEEHGDDEDLEQKERLASQSEDFFHQLYLKHKTANGCGAISHPPSPIKHEPADTKDLADIQSILNMTSSSSSFLRNFEQSVNTPNSSQYSLDGRDQEEEAQDAFTSEFRRMKLRGEFPCKLCTAVFPNLRALKGHNRVHLGAVGPAGPFRCNMCPYAVCDKAALVRHMRTHNGDRPYECAVCNYAFTTKANCERHLRNRHGKTSREEVKRAIVYHPAEDAGCEDSKSRLGEDLADTSFRSISPTPPPPPVNESKSQLKHMLLGENHLAPVNQQPPLKIQVKSLDQLVDKKPSAPAPQQQQQQQQQEKSGSALDFSMDVLDLSKKPTGGASLTPAVTRTPTPAAVAPVTPGGVGTPDLAAAIEQQQLLLAQQQLFGAGGEYMQQLFRSLMFQSQTSGFPFFPFMAPPPPQANPEKPPMVSPPNRINPMPVGVGVGVPVPPGGPVKMVIKNGVLMPKQKQRRYRTERPFACEHCSARFTLRSNMERHVKQQHPQFYAQRQRSGHHVMRGRGASNVAAAAAAAAAAAAATVMAGGPGSSGFGSNHHHGHGHGSHGSHGHAPISEQVKCAILAQQLKAHKNTDLLQQALAHGSSSVAGNPLLHFGYPLTNPSPMHNGSSQGNGQATAMDDDEPKLIIDEDENEHDHEVEAEDVDDFEEDEDEEEMDEPEDEPELILDEQPAEKEAEEEQELPKPLEQLGTKEAAQKMAETILEQAIKAGKPLSPPPTKENASPANPTVATTMQEPAITAPSTNPSSLKTMIAQAEYVGKSLKEVASSPFKDESQDLVPVAKLVDNATSQNMGFNSYFRPSDVANHMEQSDEEGLVASGSASESNNSGTEDVTSSSSSSEPKKKSAYSLAPNRVSCPYCQRMFPWSSSLRRHILTHTGQKPFKCSHCPLLFTTKSNCDRHLLRKHGNVESAMSVYVPTEDVSEPIPVPKSVEEIELEEQRRRQEAEREKELELERERELERERELERERQLEKEKERERQQLIQKLAAQMNAAATAAAVVAAASAVNGGASGGPHGPIADALAGGDLPYKCHLCEGSFAERLQCLEHIKQAHAHEYALLLAKGAIETESLEANPHQQPSQQAVHSDDEAPNGGGNRGKYPDYSNRKVICAFCLRRFWSTEDLRRHMRTHSGERPFQCDICLRKFTLKHSMLRHMKKHSGRAHNGDTPGSDCSDDEQVSSPPSTPHPTQPTSANNNNSCHNNNNNANNNNNNNNNNNNNSSSKLGLKLHDLLDKASEWRASRLGEHKENMGEATPSGATVAGSDLIGNLLGISDQGILNKLLSSADEAAKLLGVDNK

SEQ ID NO: 6280 - DNA, 2711 bp, DROSOPHILA
gcagtcagctgtttataacccaaacaatcacacgtgaatttcttaaaaagtaaataaataaaattttaaacgaaaactaaaacaaaaatgtcctctcccagtgaatcctcttcagcttctgagcacgaggctagcgatgacaacgaaactcaggtacaagtaatacaactatacagaaatatggtttactacatatgcgagaacttcgttttagaatgccattcgcgaagatctcaaaggaatgtcattcgaggagataatgaaactaaaagaggagctgggcgccaaggtgtacaaagaggctgtgctcggtagcaagagttctagaccccaaaaaccaaaggccaaaaccgacctcaagcggctaaacaaaaaccgacctcgtgaaatgaccaccagacgacaggttccatttttgggcgccgagcacagagtggagcggaaaaaaaatgttgaactcagagatccaagatttgacgaaaaatccggaacatatagtgcagaaaccttcaagaagaactaccagtttgtctcccagattcgagcaaaggaagttggtcagctgaagaaaaaactggacgaagtggaggatgaggcggagaagcaccatataaaggacaccatgcagcgacttatcaataaaaatgtggaggacaagaagtggcacaccaaacagaagcaactgaaaaaggagcgctccgccattcagaagaaacacgatttgggacaacaacctcattatctgacaaagagtacgtttctgatcgacagcgaaatcaaattttaatttgtttttttttccgacagaggagcgtcgagctaaggaactagttgcccaattcgagaagctgaaaaacactggaaaactcaacaagcacatggaaaagcgacgcaagaagaacgccgccaaggaccgcaaacgcattggtatagaataagacttacgctttaagtataaatgtattttaaacaattaaaagcacagtgcaaataagcaaatctagcccgtgcgcaacatctttgcttcccgcttctcctgcaactcgcgccgttgctgttccacaattaacttgcgctcctccaggaactcgccataggccgccggatctatttccctgaccactttgatgccacaggtccgagcaatgctgatgagcatctcacacatttgctaagagacaaggcataaacttgagtcgaagttatatctcaaacttttcggaataccgacctgcatggtaagaagtacattgggcgggtcctgaatcttaatagctgcaatctcgtacaaatgcttgagagtgatcatgccggcaacctccttgccaggagtcatggtgcccctttgtatgcccgccgcttgcttcaggaaaaatgtggccggcggatggtggatggccaagtcgtagctgcgatcgctgtttacggaaattctgcacggcagcggtacgccctctttcatttccgcggtcttggcattaaagtccttgcagaaagcggcgatattaatcgctctctgtgtgtggttaaaaacaaaattatatacatattttagttttaaagccggctaactcacctgtcccaacatcggtcccaatggcggacctgcagcagccattcccgcaggtatattcgtcttcagtttgctcgtgtgcgtcacacgttccaccgtcttctttagcgatttcagcttacccgctgccttcgacattttaattgatttattttaactaaacaattgattcaaactgttatgcaaagcgaaatgtgttggtggaaggaagaagaagcagcaacagctgatggtattgctgtcgtttctagttggaacgtatagctgaatagctaaaaacatacttccgaatgtggtctttagcaacattaaacatgagatgatggtttaaaagatccaaatgtcatttgcacaatagcaggcttttaaaaatactatatacaatactatgaaagcagctaaaattttaaaagccctttgaattatagctaaatgtacaatagccaaattcccgtgataagcagacgattagccacccctgatgcgaagaagaagcatcgcggccaacagctgtttgcattgcctatcgcctatcggtagtcgagggtgtcgcagcaggcagcttttgtggcagagtgccaaattgaaatcagctgccagctgagaagtgataaattaaataacaataacaaacgccgtgtaatcacataaacccatggctttgcgcggttcccaccgcttggaagtgatcttcaaacgctgcattgcctccccggtgttacacagtcatgcagccaatcggaggagcagtcaactagcgatcaaagaaggcgatccaaacagcaatggtaacagtgggcaatatcagcaaaatggtgaacaaaaagaaaaaggctggagacgattggttcgattctttgtgcccttctccctgggcgctgtggtcagtgcggcgatcatacagcgggaagacttaacgccaacgatcgccgcttccaaaatgaccggtcgtcggcgggacttcaactttatagctgatgtggtggcaggttgtgcggattcggtggtctacattgagattaaggacacccgccactttgactacttcagcggccaaccgattacggcatcgaatggttccggcttcattattgagcagaacggtctcatccttaccaacgcccatgtggtgatcaac

SEQ ID NO: 6281 - DNA, 591 bp, DROSOPHILA
atgtcgaaggcagcgggtaagctgaaatcgctaaagaagacggtggaacgtgtgacgcacacgagcaaactgaagacgaatatacctgcgggaatggctgctgcaggtccgccattgggaccgatgttgggacagagagcgattaatatcgccgctttctgcaaggactttaatgccaagaccgcggaaatgaaagagggcgtaccgctgccgtgcagaatttccgtaaacagcgatcgcagctacgacttggccatccaccatccgccggccacatttttcctgaagcaagcggcgggcatacaaaggggcaccatgactcctggcaaggaggttgccggcatgatcactctcaagcatttgtacgagattgcagctattaagattcaggacccgcccaatgtacttcttaccatgcagcaaatgtgtgagatgctcatcagcattgctcggacctgtggcatcaaagtggtcagggaaatagatccggcggcctatggcgagttcctggaggagcgcaagttaattgtggaacagcaacggcgcgagttgcaggagaagcgggaagcaaagatgttgcgcacgggctag

SEQ ID NO: 6282 - protein, 196 aa, DROSOPHILA
MSKAAGKLKSLKKTVERVTHTSKLKTNIPAGMAAAGPPLGPMLGQRAINIAAFCKDFNAKTAEMKEGVPLPCRISVNSDRSYDLAIHHPPATFFLKQAAGIQRGTMTPGKEVAGMITLKHLYEIAAIKIQDPPNVLLTMQQMCEMLISIARTCGIKVVREIDPAAYGEFLEERKLIVEQQRRELQEKREAKMLRTG

SEQ ID NO: 6283 - DNA, 20706 bp, DROSOPHILA
gtaaaggggcggagacggccaggggcttggcgtctttgtattgatattcttacagtctctggttaacaagagattgcccacaaagcattaatttggtccaaagctgacacgcatgctattaatggaaattttcccttccaccggtcgttgtctccgagtgtttcggaatttcgtttgattaatagacgccgcctaaatcttgattagatttttctaaaagcctaggaccagcagcctcagttggggtctgagtctctggatttcaatcaacttgacgctggaacgcagcttctttcgtttccattcgcccgtatttcgtagattaaaggagagcgtgggttgaagaggggttcggttcactttttgtgaggtcatcgaaaaaggaggatatatgtggaaaacctatagaacctttgggactttcgtagtctatttgagatagttaagtatgcaagagctttaattcccttgagttcgttgcctcagtcatttgattttcttcaagttcgtttcctcagtcatttgattttccaccttaatttgtgtgtttgacctattacaaaagttgtaaataatgtgaaatactttttatttagtatgtttgttaagtttttggcttgggctgcagttaaagtcgattttacgctttagcgcctcatatttcaccgaattgagctttactaattttatgctcgacggagtatgaaaatgctgatatgcctggtgagcgcgatgcatgaaagcggcttgttaattgaaaggcttacgccaacaactggtacacacacgtcaatacctaattagcactaagcaacaattaccttaaccatagctaatttcaatttcaacttcttttcgttgcaggcgatagacgaaaattataagtgatgcaaaatgacgaattctacgatgcattcagagtgtgagcaacaagacaaaagtgcgacaaatgaaagtagtgcaacataaatttagtacaaacattagaaacagcctccagatggagaggctactgctcctgtttttcctgcttctggccggcagggaatccttgtgccaaacaggcgacaccaaactggagctactggcaccgcgtggccgaagttacgccaccacctatgaacaatatgccgcctttccgcgaagaagaagctcatcatcctcgccatcgggtgagatgcaatcccgtgcggtggacaccagtgccgatttcgaggtgctcgagggtcagccgcgtggaactacggttggttttatacccacaaaaccaaagttctcttatcgattcaatgaacctcctcgggaattcacactcgatccggtaacgggtgaggtgaagaccaatgtggtgctcgatcgggaaggtatgcgggatcactacgatttggtggtgctctcctcacagcccacctatcccatcgaggtgcggattaaggttctggatgtcaacgacaattcgccggagtttcccgaacccagcatcgcgatttccttctccgaaagtgccacttcgggtactcgattgcttctcgatgccgccacagatgcggatgttggtgaaaacggggtgaccgatcagtatgagatcgtggctggaaatgtggacaacaaatttcggcttgtgactacggcgaatcccagtggagacacctcgtatctgcatctagaaaccacaggaaatctcgaccgtgagtcgcgtggcagttaccaactaaacatctctgccagagacggaggatctccaccgcgttttggctacctccaagtgaacgttaccattctggatgtcaatgataatccaccgatcttcgatcacagcgattacaatgtgtccctaaacgaaacagctctcccgggaactccggtcgtgaccgtcatggcttcggacaacgacttgggggacaatagcaagatcacctactatctggccgaaacggagcaccaattcacggtgaatccggagacgggagtcatttccaccacggaacgcgtaaactgcccccagcaaacgaacgtgaagagctctgctagccagaaaagctgcgttttcactgtattcgcccgggatcatggatctccacggcaggatggacgcacctatgtaactgttaatctgctggacacaaacgatcacgaccccatcatcagtttccgcttctttccggatggcggaaaagtggccactgtggatgagaatgcggtaaatggtactgttgtggcagccgtggccgttaaggattccgattccggcctaaatggcagaacatcggtgcgaattgtttccggcaatgagctgggacactttcgcctagaagaagctgccgacttgcatatagtaagggtaaatggagtcctggatcgcgaggagatcgggaaatacaatctgaccgtggtggcaatggatcaaggaacaccggcgcgaacgaccacggcacatcttatcatcgacgtaaacgatgtgaatgatcatgaaccggtgttcgagaaatcagaatattcagcggtgctgagtgaactggcacccacgggaagttttgtggcctcaattactgccacggatgaggatactggggtcaatgcccaggtgcactatgatattctctcgggtaatgagctcaagtggttctccatggatccactgacaggtttgattgtgactacgggtccgttggatagagagattcgcgacaccgtagaactgagcatctcggccagagacggtggacctaatcccaaatttgcgtacactcagctgaaggtgatcattctggacgagaacgatgaggcgccgcagtttagccaaagagagcagaatgtgactttaggtgaggatgctcctccgcaaacgattgtggctctgatgacggccactgatcatgatcagggcacgaatggatcggtgacctttgccctagcgcccagtgtggagcgcctgtatccgctacagtttgccctcgatgcgttgacgggccaattaacaacgcgaaggcctctggatcgtgagaaaatgtcacagtatgagatctccgtgattgcccgcgatcagggagcacccacgccccaatcggccacggccaccgtttggctgaatgtggccgatgtaaacgataacgatccacagttttatcccaggcactacatctactcgctcgccgatgacgatgatgatatcaagctcaagaaggaggtggagaaggagaggatcctgctccatgtcacggcctcagataaagacgatggcgataatgccttaattgagtacagactcgagtcaggtggcgagggtctcttccagctggacgcccgatcgggtgccatcagcctgcgtggtgatgctcctgcatcgatgcattggaagccacactacaagctcctcgtatcggctcgtgatgctgggcaacggcggagccagcaagatgccattgtggaaattgtgctcaagtccaagttggagatgcttgaatgcggtcaggcacaagctggtggttatgagttccagatggtcgaggatcacgagcagcaaaggaacagccaaccaaatcgcgaggtgggcatcgtgcaggtaaaatccacgaatggcaaggcgaactctcatatcgaatatgatatcatccaaggcgacagggctcagaatttccgaatcgataccagaagtggtcgcatcaccaccgcccgacctttggatcgcgaggagcaggccaattatcgtttgactatcttggccagctccagttccagctccagtgcagccgccagcagcgtttcatatggccagtgcattgttaatatagccattatcgatctgaatgataatgctcccgttttcgccttggatcgcgagtcagagcccacaatctcgctgccggagaatgcggccgtgggtcaggagatctacctatccagggtcagagatcgggatgcgggcgtgaatagtaggatcagctatagcctcaccaacaatcccaatcagcagttccgcattggaccggtcacgggagttctctaccttcagaggcccataagagcagagcctggatccctcatccacgtggaactaatggccacggatgcgggtagtcctccgctctccagtaaactgagtctatctgtgctgatagccgatgttaacgatcacactcccgtctttgatcacacatcctatgagacttccctcccagaaaccacgaaagtgaacactcgatttttcgctttggctgctacggatattgatttgggggacaatggacggatctcgtacgagatcatcgagggcaacactgagcgcatgttcggtgtctttcccgatggctatctgtttgtaagagctccactcgatcgtgaggagcgggattactatgccctaactgtttcttgccgggatgctggtcaaccatccagatcttcggtggttccagttgtcatccatgtcatcgatgagaacgacaatgccccacagttcacgaacagcacatttacgtttagtattccggaaaatgctcctgctgacacgtttgtgggaaagctaaccgcagttgatcgggatatcggaagaaatgccgagctcagttttaccctgtccagtcagacgcaggactttacgattgacaccaggaatggtttcataaaaactctgcgacccttcgatcgcgaggctctggtgaaagtcagcagaaatgcggaggcaagcggagaggatggttctctcaggggttcaatggctggcaactatatgctactggaggccacagtttcggacaatggcattcctcgcttacaggacaaagtcaaggtgaaggtcatcgtcaccgatgtcaacgataatgcaccggaattcctgagagcaccctatcatgttaccatttctgagggcgcctctgagggcacgcatataacgcatgtctttacccaagatgcggatgagggtctgaatggagatgtctactactcactggcgaagggaaatgaggctggtcagttcaatttggatagcgccacaggacagctttcgttggggcgcaggttggaccgggagtcccaggagattcatcacctgatcgtcgtggccaaggatgctgctctcaagcatccgctgagctctaatgctagcattacaattgtggttctggacgagaacgacaatgctccggagttcacgcagtcgagcagtgaggtttccgttttggagacaagtccaacgggcactgaattgatgagattccgagctagtgatgcggatcaaggggtaaatagccaggtggtcttcagtatatcggctggaaatcgccgtgataccttccacatcgacagcattacgggtagcctctatctgcacaagcctctggactacgaggacataaccagctatactctcaacatcactgcctcagattgtggcactccgtcgttgtctaccaccgttttgtataacgttctcgtcgtggatgacaacgacaatccgcccatctttcccagcactgcgattgttcggcagatcaaggagggaattcccctgaaaacacccattgtgaccgtaaccgccgacgatccggattcgggacttaacggcaaggttagctatgccattagcaagcaggaaccccaacttccacagggacgacactttggcataaacacggaaacgggtgtgattcacacgctgagggagattgatcgcgaatccattgatacctttcggctaaccgtggtggccacggatcgtgctcagccttcggagcgccagctctcgacggaaaaactggtcaccgtgattgtggaggacataaacgataacgcaccagtttttgtgtccatgaatgcggctatcctgcctccaaagttctcgacttccaagggcagcagcacagcggtgatgcaggttcatgccaaggatgcggactcgtccagcaacggattggtgacctacgagattgtcagtggcccccaggagctgttcaagctgcaaaggaacacgggtatcataacctttaccccaggtcctcagttcaagcaggaggttcgctaccagctgacccttaagtccaccgacgaagccgttcaaagcgaacgtcgcagcagcgaggtctacattacaatcataacgccaggctccggcggaagtgagtcctccgttccacagttcgagcaacggagtaagctttccggttccgtctacgagaatgaaccaattggaactagtattctgacggtgactgctcatctggcgtccgccgagatagaatactttgtgacgaatgttacggcaaccggatcgcgtggtcaggtagatcgcctcttcgacatcgatgccaagctgggaattctgtccaccgccgctgaactggaccgtgaagccggaccagaggagtacgaggtggaggtatacgccatcgcacttggcggacagccacgtacatcccgaacgaaggtgagttactagaaaccccattagatcatcaagtaatatttaaagctgagaaaaagatacctcgatatgttcaactacacgaaactctccttttgttgagcccaaattgaagacaccatgcatcatacttactttgatcaaaaggtccggaatccgcgagtgggggtttatcagattccgattacttacataaaggggctttcgcacagacattgtggaccgaccttttctttactttgtaacgaaaggtacttcttgcttgaaatgagtatatagggaatatgggatattgttgccgagtcggccatttctggggcagtttcaagggcttatcagtgcaagtcgagaccgcactaatgcgcttttaatgtcttgtgctgatatgaaatgttgattacacgccaaccactccggagctgcaactccagctccagtcccctcatccagtcatccttttgtgcacatgcacatgcggttatgccttcagattcagatgcaaattaacaggccaacgtagaggactcgccggctgcttccctaagccgcccggctatctgttgaatgaatttgatggagggggaatggtgcagggcagtagtggtaagcagacagacctgtgtatcgagaaaatatttcacatcccagcgctgcataaatgggccgcagggatagaattataataagttgcttcattggcagatgcctttaattatgcccagtaccctactcagcgctgtcgaggcatcccgatggcccatggatcgccgcccctctgcgtttgcagggtatattgtcgacctctgcgaaccaattcatactggttttcgagcgaaaataaaaaaaagtcagaagagagaacaaaggcaaaaggagcacggcccaaatacacttgaacaaattaagatcaattaaagtgtaataactatgattgagttgttaatgaaatagtaaggatttcatattatgaactactttagcatgttgtgaaaaatgttaatctattgttgcataaactttaaaagcagtaagattattccgttttgattgttgaacttaaatttgtagatagattagcgcaactgctgatcctttgtatgcgtaggtatgccaacaatgcacgcatgcaaatgtgtgtagttccatttccagttccagtttcgtgcaaaaggctgcagcggaaaaaggtagacaaaacaaaaaaaaaccccagccttgggttagtacaagcaactatggtttagtggttgtttcgatcgctggtcctcgcgtgcgaagatcgtttcaatcaattcattgttgcattgatttaaaacgattgtcatgttttcaattttttttcgcgttaattttaaataactttaatgctgagactgcaagaaaagcacgctcatgccgacgaatttggaggcagtcctaattagatgcattagctaatccccaatttcgtaattcgactgagtttataaagggtaaagaatgtatatacatgctacatacgttcagtgttgaccataatgatcgtagaatcccattaagctgctttctagtccgcagatcttagcctgctttcgaaacgaaggcaattaaatgtgaacaaacaagcgagtgaatgtcatttagctttccatcaaaatgtcccctgatccgagtgcagggtttggaatttcacgcaaatttatggccatcccaaggccagtttctatattcagctgggttcttttttctttctggccattaagcgatttgacaaatggtaacattttctgcagctgcacccgctttccaccgcctcaaattagttctattagccgcacacatttcacccggcctcgggcaaccaaatgctgttttgctccaatggctgcccactaatgcattcgtgagtggaagtggatctcctagctgggtcctagcctccgccgtctgatgttacacaatttgcataaattttattacaaatgcagtatttactcgcccggcaccgacttaacaccatcacctcagcacacgacgctatatattttacgagtgaatctggtgtcgagaatttatggccccatgggctccacttcttctgccctccatgtgcgcgacactatcaagaaataagaggtgggattttgtagagcgttagctggacttacaaaaatgctaagagcatatcgatacttcgtcctttccgactcttgtacacataatgactttagaaaggcacttgcaaaattgtacattaattagaactagtgaaaaataattataaacattaaagtgccgcaataaaggttaacaagccggtttcgttcagagagaagtggcctaaactataattcgctcggtcataagcagaaagttcaagctgcggcaactggcttcgcatatcccataaaccatataacattacccagtttaagcgggtcaattcgaggccaggttaagcgagatgaagaatgcgattgacattgcgacaaaagtttggtgggcacataagtggaggctcgtacatggaatactttgggcatttagtgccgaatatggcactaaagtttccgctcgatgccatatcgccgttgccagtttgtggttcctcctcctgccaagtgggtcagtgttattgacgcaacgcaatactttggtatgtatcttttctgcaggtcagagtaaccgttctcgacaagaacgatagtccaccgcagttcctcgacacaccgttcgtctacaatgtcagcgaggatctacagattggacacaccatctctacgctgcgagcccacgatccggatacgcttggttcggtgacgttccttctgatggatgggcacgatggcaagttcctgctggaaccgtccactggaaaactgatcctcaacgataccctcgatcgggagacaaagagcaagtatgagctaaggattcgcgtatccgacggagtgcagtacacagaggcatatgccactatacaggtgagaaatcttctaaccattttagatacagcatcgagtattttcttaaattattctttaaactccccatcaggtgagcgataccaatgataatccacccttattcgaggataccgtgtactcctttgacataccggaaaatgcccaacggggctaccaagtgggtcagattgtggccagggatgccgatctgggccaaaatgcccaattgtcctacggcgtggtctcggattgggccaacgatgtcttcagcctgaatccacaaacaggaatgctgaccctaactgcgcgactggattacgaagaggtgggaagatgatatgatataatcggagttcaactctacttacttcattctattcattaggttcagcactatatcctgattgttcaggcgcaggataatggccaacccagcttgtccaccaccataacggtctactgcaatgtcctcgatctgaacgataatgcacctattttcgatcccatgagctattcgagcgaggtgttcgagaatgtgcccatcgccacagaggtagtcactgtgtcagcaaaggatatagattcgggtaatttgaagctgttgcctcccgcagattccctagtttatcacacactttatttatgacaggcaacaatgggctcattgagtacagcatcaccgcaggagatgtcgactcagagtttggaatcgatagcaatggcactatacgcactcgccgcaacttggacagggaacaccgatcgacgtacacacttacggttaccgcccgagattgtgccgatgaatttgcatccttcagcgaactggaggagacgcagctgaagctcaagtatcgatcgcctagaaagtaccaacaaacacgtcaagagtttttggcccatcaaaagcagcagcggctctcctcgactgtaaaggtaagattccagattccaggatatataaaatctggaaccatgagtttttgaaagtcggcttttagttctaatcttgctgttgaagagaaaagctgttaacgagactgtcaggtcagactgaaacgttaagttcgtgaagccctaattaaatagaagactagtttcaggcacggccaaacccgtttgcttcctttatcgattgtgtggcagtttgaaaaacctactcacattcaccgttttatctatagaatgccatgaaacacaattagccaaatactgatccgcaccttttttccaggtgacgatactcatcaaagatgtcaacgacgaagtgcccgtcttcatttccgcaaacgaaacggcgatcatggagaatgtggccatcaatacggtcgttatcgctgtcaaggctgtcgacaatgacgagggccgcaacggatacatcgattatctgatgaaggaggccagagatgaggacatgggtcaatcggatccgctgcccttctccctgaatcccaccgatggacagttgcgcgtagtcgatgccttggaccgtgaattgcgctcaagttatttgctaaacatcacagcccgagatcgtggagagccaccccagtccacggagtcgcagttgctcattcgaattctggacgagaacgacaatagtcccgtcttcgatccgaagcaatactctgcctcggtggcggaaaacgccagcattggtgccatggtccttcaggtatccgccacggatgtggatgaaggtgcaaatggacgcatccgctattccatagtgctgggcgatcagaaccatgacttcagcatcagcgaggatacgggtgtggtgcgggtggctaagaacctaaactacgaacgactttcccgatactcgctcaccgtacgcgccgaggattgtgccttggagaatcctgctggcgacactgccgagctgaccatcaatattctggacataaacgataatagaccgacatttttggattccccatatttggcacgtgtcatggagaacactgtaccgccaaatggtggatatgtgctcactgtaaacgcctatgatgcggacactccaccgcttaattcgcaggtgcgctactttctcaaggaaggcgatagtgatctcttccgcatcaatgcctcttcgggtgacatcgcgctgttgaaacccctggatcgagagcagcagagcgagtacaccctgacactggtggccatggacacgggttcgcctccacttacgggcacgggaattgtgcgagtggaggtgcaggacattaatgacaacgatccggtattcgaactgcaatcctatcatgccactgtgcgcgagaatttaccgtcgggaactcatgtcctgacccccagagcaacggataaggacgaaggactaaacgccaagctgcgctttaatttgttgggagagcacatgcatcggtttcacatagattcagaaacgggcgagattagcacagctacaactcttgatcgtgaagagacttccgtgtaccacttgaccttaatggcccaggatagctcgattaccgagccacgagcatcgtctgtaaatctcacaatcagtgtgtccgatgtcaatgacaatatcccgaaattcgattcgaccacctacaacgtagcagttccggagaggatcagcaagggtgagtttgtgtttggagctcgagccttagacttggatgatggcgagaatgctgtggtacattacacgattagcgggcgagatcaacattactttgatatcaacaccaaaacgggtgtggtgagcaccaagctggagcttaagaccaagaccaagtctcacgatgatttaacctatacgattgtgatatctgcaatggatcagggcgagcaatctcttagttccaaggctgagcttacagttatcctccgaccaccggagctctttcccacctttgcctacatggccaacagtcactttgccatgtcagaggatgttaggccgggcaagatgataaccaaagtcagtgccacatcgcccaaaaagggtttggtgggtaaaattcgctatgccatagccggcggaataatgggggattctctgagagtggatcccaatagcggattactgagcgttggtcaggatggcctggactatgagctgacacatctgtatgagatttggattgaggccgccgatggagacacgccaagtctgcgtagtgtaactcttataacgctcaacgtaacggatgccaatgacaatgctcccgttatggaacagctcatttacaatgccgaggtcctggaggaggagtccccaccgcagttgatagccgttgtgaaagccagcgatcgtgactccggcgacaatggaaatgtcatctatcgcctacagaatgacttcgacggcacatttgagattacggaatcgggtgagatttacaccaggatgcgactggatcgcgaggagatcggcgattatgcgttcgtagtggaggccgttgaccagggtgttcctcatatgacgggaacagctagtgtcctactgcatctactggacaagaacgacaacccgcccaagttcacacgcctcttttccctgaatgtaaccgagaacgccgagatcggtagctttgtgatccgagtcacctcttctgatttggatctgggtgcaaatgccaatgcttcttactccttcagcgagaatcccggcgagaagtttcgcattgagccgcagagtggaaacatcacagtggccggtcatcttgatcgcgagcaacaggatgagtacatcctgaaagtggtggcctctgatggagcctggcgtgccgagacacccattaccatcacaatccaggaccagaatgacaatgcccccgaattcgagcatagcttctacagcttcagtttcccggagctgcagcaatcgattgctttggtgggccagatcatagccacggatcgcgataaacagggtcccaactcagtgatctcctactcgctgcagcagccgtcgcccatgttcagcatagatccagccacgggtgaggtcttcagtaagaaggtacgtagttgaatacaatctattggatatatcctaataacttgaattcctgacaggcggttcgcttcaagcactctcagtacgttcgctcaccggagaatatgtacgccctcaccgttctggccacggataatggtaagcctcctctgtactccgagtgcctggtgaacatcaatatcgtcgacgcccacaacaatccaccaaagttcgaacaggcggaatatctggcgccgctgccacaggatgcagttcgtggtcagcgaatagttcgagtccacgcaaatgacaagcaggatctgggcaccaacgaaatggactactccctgatgacattcaatttgagttcgatcttcagtgtcggcagacacgatggttggattactttggtcaaacccattcaagtgccgccaaacactcgatatgaactggttgttagggccaccgatcgtggtgttcctccccagtccgatgagacacgagtcgtgatcgtggtaaccggggagaatatggacacacccagattttccgtaaacagctatcaagtcattgtgcccgagaatgagcctgttgggtccacaattctaactgtgggcgccactgacgatgatacgggtccaaatggaatgctgcgctactccatttccggtggcaatgagcgtcaagacttcagtgtggatgaacgtacgggtggcatagtgatacaacagcaattggattatgaccttatacaggaataccatttgaatatcacagttcaggatctgggctaccatccactatcctcagttgcaatgcttacgatcattctgactgatgttaatgacaatccacctgtgttcaatcacaaggaataccactgttatatacctgaaaacaaaccggttggcacctttgtattccaggctcatgccgcggataaggattcaccgaaaaatgctattatccattatgcattcctgcccagcggaccagacaggcacttcttcataatgaaccagagtaatggcaccatttcttcggcagtttcctttgactatgaagagcgccgcatctacacactacagataaaggcgaaaaatcccgattcgagcatggagagctacgccaatctctatgtgcatgtcctgggcgtgaatgagttttatccacaattcctgcagcccgtctttcactttgacgtatcggaaacatcggcggtgggcactagagtgggtgccgttcaggccaccgataaggacagcggcgaagatggacgtgtctactaccttctggtgggttccagtaacgacaagggtttccgcatcgataccaatacgggcttgatttatgtagcccgacacttggacagggagacacagaaccgtgtggtactcacagtgatggccaaaaactatggcagtattcgtggtaacgacactgacgaggcacaagtgattatatcgattcaggatggcaacgatccgccggagttcataaagcactactatacctccacgatttccgaggcagctccggttggcacgaaggtcacaacggtcaaggccattgacaaggatgtgcgcacacaaaataatcagtttagctattcgatcattaatggcaacctgaaacaaagctttaagatagatgtgcaaacgggtgagattagcacggcaagtcgtttggatcgtgaggagacatccacctataacttggtgattggagccattgacacgggactgcctccacagacgggaagtgcaacggtgcatatcgaactagaagatgtgaacgataatggacccacattcacacctgagggtctgaatggttatatctccgagaatgaaccggctggcacttccattatgacactaatagccagtgatcccgatctaccgcgcaatggaggacccttcacctatcagttgattggtggtaagcacaagtcctggctaagtgtggacagaaactctggtgtggttaggtccacaaccagtttcgatcgcgaaatgacacccattctagaggccataattgaagtcgaggacagtggaaagcccaaacaaaagtcccagcacctgctcacgatcactgtattggatcagaacgataatccatcgaccacgaggagcttgcacatagcagtcagtctgttcaacggcgatctgccttcgaatgtgaagctggccgatgtgcgtcccaatgatattgacatcgtgggcgattatcgttgtcgcctccagaagaatcccgcccagagtcaactgcagttggctattcctcgggcctgtgatctgatcaccacctcacatacgacgccaatagcttcggttttcagctatacgggaaatgacggaaaacatggggatgttagctccaaagttagtgtcgccttccagagttttaacaacgaaacattggccaactcagtgtccatcatggtacgaaatatgacagcttaccacttcttggctaatcactatcgaccaattctggagatgattaagtctagaatgagtaacgaggatgaggtcattctatatagtcttctagagggtggcagtggcaattccaccaatctccaactgctaatggcagtcagattggcgaagaccagttaccaacaacccaaatatttgattgaacgcttgcgagagaagcgttcagcgttttcggaactcctgcaaaaggaggtgattgtgggctatgaaccctgcagtgaaccggatgtttgtgaaaatggcggagtctgcagtgccaccatgcgactgctggatgcccatagctttgttatccaagacagtccggccttggtgctgagtggtcctcgggttgtgcacgactacagctgccagtgcaccagtggattctcgggcgagcagtgcagtcgtcggcaggatccttgcctgcccaatccttgccattcgcaggtccaatgccgtcgcctgggtagcgatttccagtgcatgtgtcctgccaatcgggatggcaagcactgcgagaaggaacgcagtgacgtgtgctatagcaagccgtgtcgcaatggaggaagttgccaacgcagtccggacggatcctcctacttttgcctatgtcgtcccggattccgtggcaatcagtgcgagagcgtgtcggactcatgccgacccaatccctgtctgcacggtggcttgtgtgttagtctcaagccaggatacaaatgcaactgcacgccgggacgatatggacgacattgcgagcgttttagctatggattccaaccgctgtcctacatgacttttcccgctctggatgtgaccaccaatgatatatccattgtgttcgccacgacgaaacccaactccttgttgctgtacaactacggaatgcagagtggcggcagatccgatttcctggccatcgaactggtgcacggcagggcgtatttctcatctggaggagctcgtactgctatcagtactgtgattgctggacgaaatctggctgacggtggatggcacaaggttacggccacccggaatggacgtgtgatgtcactcagcgtggccaagtgcgcagattccggtgacgtttgtacggaatgcctgcccggagattctagctgctatgcggacgaagtgggaccagtggggtaagtctaaattatagctattacatctattagacccataattttggaatatatatctttcacagaactctcaacttcaacaaacagcccctgatgatcggtggcttgtcctcggctgatcctatcttggagcgacctggtcaagtgcacagtgatgatctggtgggctgtctgcacagtgttcatatcggaggacgtgccctgaacctcagcttgccgcttcagcagaagggcattttagccggatgcaatcggcaggcgtgtcaaccagctttggccgccgaacgctgtggaggattcgctggacaatgcatcgatcggtggtccagttcgctatgtcagtgcggcggacacttacagtcgcccgattgctcggactccttggaacccatcaccctgggcgaaggtgcctttgtggagtttagaatttcggaaatatatcgtcgcatgcagctgctggacaatctgtataacagcaaaagtgcctggctggataaccaacagatgagagaacgtcgagccgtaagcaatttcagcacagcttcccagatctacgaggctccaaagatgcttagcatgctgttccgcacctataaggatcagggtcagatcctttatgcggccaccaatcaaatgtttacctcactgtccctgcgcgagggtcgtctggtttactactccaaacagcatcttaccatcaatatgacggtgcaggaaacttctacgctcaacgatggcaagtggcacaatgtgagcttgtttagcgagagtcgaagtctgcgactcattgtcgatggaaggcaagtgggtgatgagctggatattgccggggtgcacgacttcctcgatccctatttgaccattctgaatgtgggtggcgaagcatttgttggttgcctggccaatgtgacggtgaacaacgaactgcagccgctaaacggatcaggcagcatctttccggaggttcgttatcacggcaagattgagtccggctgcagaggagacattggccaagatgccgcccaggtggccgatcctctcagcattggcttcaccctggtcattgtcttcttcgtcattctggtggtggctatactgggctcctatgttatctatcgattccgcggaaagcaggagaagattggtagtttgagttgcggtgtgcccggcttcaagattaagcaccctggtggtccagtgacgcagagtcaggtggatcacgtcttggttcgcaatctgcatcccagtgaagccccgtcaccgccagttggagctggagatcatatgcgaccgccagtgggtagccatcacctggtgggtcccgaactattgaccaagaagtttaaggaacccactgcggagatgccacagccgcagcagcagcagcaacgtccccagcgacccgatatcatagagcgcgagagtcctctgataagggaggatcatcacctgcccattccgccgcttcatcctctcccgctggagcacgccagttccgtggacatgggttccgagtacccggaacactacgacctcgagaacgccagctccattgctccgtccgacattgatatagtctatcattacaagggctatcgtgaggctgctggcctacgcaaatacaaggccagtgttccacctgtttccgcctacacgcatcacaagcatcagaactctggctctcagcagcagcagcagcagcaccgccacacagctccctttgtgacccggaaccaaggtggccaaccgccaccgccgcccaccagtgcatcccgcacccatcagagcactccactggcccgactctcgcccagctcggagttgagttcccagcagccgcgcattctcactttgcacgacatttccggaaagccgctgcaaagtgccctgctggccacgacctccagttccggtggcgttggcaaggacgttcacagcaacagcgaacgcagtctgaacagcccggttatgtcgcagctgtccggccaaagttccagtgccagcaggcaaaagcccggagtgccacagcagcaggcgcagcaaacttccatgggcttgaccgccgaggagattgagagattgaatggcagaccacgaacttgtagcctaatctccaccctggatgccgtctcctccagcagtgaggcgcctcgagtgtcgagcagcgctctgcatatgtcgctgggtggagatgtggatgcccatagttcgacttccacggacgaaagcggcaacgacagcttcacgtgctcggagatcgagtacgacaataacagtctcagtggcgacggcaagtattccaccagcaagagtctcctcgatggacgcagtcccgtgtccagagcactaagcggtggtgagacgagcagaaatccaccgacaactgtggtcaagacaccgcccattccgccgcacgcctacgatggattcgagtcatcatttcgcggatcgctcagcacgctcgtggccagcgacgatgatatagccaatcacctgagcggtatctaccgcaaggccaatggagccgcatccccatcggccaccaccctcggctgggagtatctgctcaattggggacctagctacgaaaatctgatgggcgtcttcaaggacattgccgagctgccggacacaaatggaccgtcgcagcaacagcagcagcaaacccaagtggtgtccacgctacgaatgccatcatcgaatggaccggcggctccagaggagtacgtgtaatatatgttgtgtatgctcttcaacgaaagttaaagtgttcctaaagtctgagccccaattcactgcaagcacataacaaaaaaacttgaaactattcaatgacttttccgagatttcgtgtggtcaaaaacaaagagagaaattctcgatagtacgtaaatgtatttgtaaattttgtgtaaagctatatcatttcatagtagatcctaagtaatgccattttattttgcaatgtacaacgaaaacgtaacgaggataggtagtaagttaaacaaagtgtagaatcgtgcatatgtcggaaaataagcaactaatcttatgagaacgccttgtatcaaggtcaaccatcctaaagtgcactttctgttaagggttcgaaagtaaaaaaaaaaacaataacgactgatatgtacttccgtacattattaacacacccagttaatttcaattgctgattatttcgatttctgtacttgtgtatatgttttccgagtgctatattaagatagtttcagcaccagtgtgtattgatttgtgtcgccatttaagtacattctaacattgctctaatttattgacaatctcgccaacattccctaactgccttagtcgtacttatagataattaatgtcagagatacttcgcattcctctagatataaactcaaacaccttgtatatgtatgtaattcgtagtgaaatgttattaaatacatattaaccatcatatataaacttgcattttgattttttattacaacttttattttaaaatttttctttggcgccaaattactgtgctattttcagtgttaccagacattatatagacaaagacctagaacgacaattgaagttttaaattgttaagaaaaagaacttataaaatttactatatatatgaaatattcgtagtaagaatattatgttgggcagtttatcaatgtttccgacacagcaaccgcacataaatccttattttcaaagtataagctta

SEQ ID NO: 6284 - DNA, 15441 bp, DROSOPHILA
atggagaggctactgctcctgtttttcctgcttctggccggcagggaatccttgtgccaaacaggcgacaccaaactggagctactggcaccgcgtggccgaagttacgccaccacctatgaacaatatgccgcctttccgcgaagaagaagctcatcatcctcgccatcgggtgagatgcaatcccgtgcggtggacaccagtgccgatttcgaggtgctcgagggtcagccgcgtggaactacggttggttttatacccacaaaaccaaagttctcttatcgattcaatgaacctcctcgggaattcacactcgatccggtaacgggtgaggtgaagaccaatgtggtgctcgatcgggaaggtatgcgggatcactacgatttggtggtgctctcctcacagcccacctatcccatcgaggtgcggattaaggttctggatgtcaacgacaattcgccggagtttcccgaacccagcatcgcgatttccttctccgaaagtgccacttcgggtactcgattgcttctcgatgccgccacagatgcggatgttggtgaaaacggggtgaccgatcagtatgagatcgtggctggaaatgtggacaacaaatttcggcttgtgactacggcgaatcccagtggagacacctcgtatctgcatctagaaaccacaggaaatctcgaccgtgagtcgcgtggcagttaccaactaaacatctctgccagagacggaggatctccaccgcgttttggctacctccaagtgaacgttaccattctggatgtcaatgataatccaccgatcttcgatcacagcgattacaatgtgtccctaaacgaaacagctctcccgggaactccggtcgtgaccgtcatggcttcggacaacgacttgggggacaatagcaagatcacctactatctggccgaaacggagcaccaattcacggtgaatccggagacgggagtcatttccaccacggaacgcgtaaactgcccccagcaaacgaacgtgaagagctctgctagccagaaaagctgcgttttcactgtattcgcccgggatcatggatctccacggcaggatggacgcacctatgtaactgttaatctgctggacacaaacgatcacgaccccatcatcagtttccgcttctttccggatggcggaaaagtggccactgtggatgagaatgcggtaaatggtactgttgtggcagccgtggccgttaaggattccgattccggcctaaatggcagaacatcggtgcgaattgtttccggcaatgagctgggacactttcgcctagaagaagctgccgacttgcatatagtaagggtaaatggagtcctggatcgcgaggagatcgggaaatacaatctgaccgtggtggcaatggatcaaggaacaccggcgcgaacgaccacggcacatcttatcatcgacgtaaacgatgtgaatgatcatgaaccggtgttcgagaaatcagaatattcagcggtgctgagtgaactggcacccacgggaagttttgtggcctcaattactgccacggatgaggatactggggtcaatgcccaggtgcactatgatattctctcgggtaatgagctcaagtggttctccatggatccactgacaggtttgattgtgactacgggtccgttggatagagagattcgcgacaccgtagaactgagcatctcggccagagacggtggacctaatcccaaatttgcgtacactcagctgaaggtgatcattctggacgagaacgatgaggcgccgcagtttagccaaagagagcagaatgtgactttaggtgaggatgctcctccgcaaacgattgtggctctgatgacggccactgatcatgatcagggcacgaatggatcggtgacctttgccctagcgcccagtgtggagcgcctgtatccgctacagtttgccctcgatgcgttgacgggccaattaacaacgcgaaggcctctggatcgtgagaaaatgtcacagtatgagatctccgtgattgcccgcgatcagggagcacccacgccccaatcggccacggccaccgtttggctgaatgtggccgatgtaaacgataacgatccacagttttatcccaggcactacatctactcgctcgccgatgacgatgatgatatcaagctcaagaaggaggtggagaaggagaggatcctgctccatgtcacggcctcagataaagacgatggcgataatgccttaattgagtacagactcgagtcaggtggcgagggtctcttccagctggacgcccgatcgggtgccatcagcctgcgtggtgatgctcctgcatcgatgcattggaagccacactacaagctcctcgtatcggctcgtgatgctgggcaacggcggagccagcaagatgccattgtggaaattgtgctcaagtccaagttggagatgcttgaatgcggtcaggcacaagctggtggttatgagttccagatggtcgaggatcacgagcagcaaaggaacagccaaccaaatcgcgaggtgggcatcgtgcaggtaaaatccacgaatggcaaggcgaactctcatatcgaatatgatatcatccaaggcgacagggctcagaatttccgaatcgataccagaagtggtcgcatcaccaccgcccgacctttggatcgcgaggagcaggccaattatcgtttgactatcttggccagctccagttccagctccagtgcagccgccagcagcgtttcatatggccagtgcattgttaatatagccattatcgatctgaatgataatgctcccgttttcgccttggatcgcgagtcagagcccacaatctcgctgccggagaatgcggccgtgggtcaggagatctacctatccagggtcagagatcgggatgcgggcgtgaatagtaggatcagctatagcctcaccaacaatcccaatcagcagttccgcattggaccggtcacgggagttctctaccttcagaggcccataagagcagagcctggatccctcatccacgtggaactaatggccacggatgcgggtagtcctccgctctccagtaaactgagtctatctgtgctgatagccgatgttaacgatcacactcccgtctttgatcacacatcctatgagacttccctcccagaaaccacgaaagtgaacactcgatttttcgctttggctgctacggatattgatttgggggacaatggacggatctcgtacgagatcatcgagggcaacactgagcgcatgttcggtgtctttcccgatggctatctgtttgtaagagctccactcgatcgtgaggagcgggattactatgccctaactgtttcttgccgggatgctggtcaaccatccagatcttcggtggttccagttgtcatccatgtcatcgatgagaacgacaatgccccacagttcacgaacagcacatttacgtttagtattccggaaaatgctcctgctgacacgtttgtgggaaagctaaccgcagttgatcgggatatcggaagaaatgccgagctcagttttaccctgtccagtcagacgcaggactttacgattgacaccaggaatggtttcataaaaactctgcgacccttcgatcgcgaggctctggtgaaagtcagcagaaatgcggaggcaagcggagaggatggttctctcaggggttcaatggctggcaactatatgctactggaggccacagtttcggacaatggcattcctcgcttacaggacaaagtcaaggtgaaggtcatcgtcaccgatgtcaacgataatgcaccggaattcctgagagcaccctatcatgttaccatttctgagggcgcctctgagggcacgcatataacgcatgtctttacccaagatgcggatgagggtctgaatggagatgtctactactcactggcgaagggaaatgaggctggtcagttcaatttggatagcgccacaggacagctttcgttggggcgcaggttggaccgggagtcccaggagattcatcacctgatcgtcgtggccaaggatgctgctctcaagcatccgctgagctctaatgctagcattacaattgtggttctggacgagaacgacaatgctccggagttcacgcagtcgagcagtgaggtttccgttttggagacaagtccaacgggcactgaattgatgagattccgagctagtgatgcggatcaaggggtaaatagccaggtggtcttcagtatatcggctggaaatcgccgtgataccttccacatcgacagcattacgggtagcctctatctgcacaagcctctggactacgaggacataaccagctatactctcaacatcactgcctcagattgtggcactccgtcgttgtctaccaccgttttgtataacgttctcgtcgtggatgacaacgacaatccgcccatctttcccagcactgcgattgttcggcagatcaaggagggaattcccctgaaaacacccattgtgaccgtaaccgccgacgatccggattcgggacttaacggcaaggttagctatgccattagcaagcaggaaccccaacttccacagggacgacactttggcataaacacggaaacgggtgtgattcacacgctgagggagattgatcgcgaatccattgatacctttcggctaaccgtggtggccacggatcgtgctcagccttcggagcgccagctctcgacggaaaaactggtcaccgtgattgtggaggacataaacgataacgcaccagtttttgtgtccatgaatgcggctatcctgcctccaaagttctcgacttccaagggcagcagcacagcggtgatgcaggttcatgccaaggatgcggactcgtccagcaacggattggtgacctacgagattgtcagtggcccccaggagctgttcaagctgcaaaggaacacgggtatcataacctttaccccaggtcctcagttcaagcaggaggttcgctaccagctgacccttaagtccaccgacgaagccgttcaaagcgaacgtcgcagcagcgaggtctacattacaatcataacgccaggctccggcggaagtgagtcctccgttccacagttcgagcaacggagtaagctttccggttccgtctacgagaatgaaccaattggaactagtattctgacggtgactgctcatctggcgtccgccgagatagaatactttgtgacgaatgttacggcaaccggatcgcgtggtcaggtagatcgcctcttcgacatcgatgccaagctgggaattctgtccaccgccgctgaactggaccgtgaagccggaccagaggagtacgaggtggaggtatacgccatcgcacttggcggacagccacgtacatcccgaacgaaggtcagagtaaccgttctcgacaagaacgatagtccaccgcagttcctcgacacaccgttcgtctacaatgtcagcgaggatctacagattggacacaccatctctacgctgcgagcccacgatccggatacgcttggttcggtgacgttccttctgatggatgggcacgatggcaagttcctgctggaaccgtccactggaaaactgatcctcaacgataccctcgatcgggagacaaagagcaagtatgagctaaggattcgcgtatccgacggagtgcagtacacagaggcatatgccactatacaggtgagcgataccaatgataatccacccttattcgaggataccgtgtactcctttgacataccggaaaatgcccaacggggctaccaagtgggtcagattgtggccagggatgccgatctgggccaaaatgcccaattgtcctacggcgtggtctcggattgggccaacgatgtcttcagcctgaatccacaaacaggaatgctgaccctaactgcgcgactggattacgaagaggttcagcactatatcctgattgttcaggcgcaggataatggccaacccagcttgtccaccaccataacggtctactgcaatgtcctcgatctgaacgataatgcacctattttcgatcccatgagctattcgagcgaggtgttcgagaatgtgcccatcgccacagaggtagtcactgtgtcagcaaaggatatagattcgggcaacaatgggctcattgagtacagcatcaccgcaggagatgtcgactcagagtttggaatcgatagcaatggcactatacgcactcgccgcaacttggacagggaacaccgatcgacgtacacacttacggttaccgcccgagattgtgccgatgaatttgcatccttcagcgaactggaggagacgcagctgaagctcaagtatcgatcgcctagaaagtaccaacaaacacgtcaagagtttttggcccatcaaaagcagcagcggctctcctcgactgtaaaggtgacgatactcatcaaagatgtcaacgacgaagtgcccgtcttcatttccgcaaacgaaacggcgatcatggagaatgtggccatcaatacggtcgttatcgctgtcaaggctgtcgacaatgacgagggccgcaacggatacatcgattatctgatgaaggaggccagagatgaggacatgggtcaatcggatccgctgcccttctccctgaatcccaccgatggacagttgcgcgtagtcgatgccttggaccgtgaattgcgctcaagttatttgctaaacatcacagcccgagatcgtggagagccaccccagtccacggagtcgcagttgctcattcgaattctggacgagaacgacaatagtcccgtcttcgatccgaagcaatactctgcctcggtggcggaaaacgccagcattggtgccatggtccttcaggtatccgccacggatgtggatgaaggtgcaaatggacgcatccgctattccatagtgctgggcgatcagaaccatgacttcagcatcagcgaggatacgggtgtggtgcgggtggctaagaacctaaactacgaacgactttcccgatactcgctcaccgtacgcgccgaggattgtgccttggagaatcctgctggcgacactgccgagctgaccatcaatattctggacataaacgataatagaccgacatttttggattccccatatttggcacgtgtcatggagaacactgtaccgccaaatggtggatatgtgctcactgtaaacgcctatgatgcggacactccaccgcttaattcgcaggtgcgctactttctcaaggaaggcgatagtgatctcttccgcatcaatgcctcttcgggtgacatcgcgctgttgaaacccctggatcgagagcagcagagcgagtacaccctgacactggtggccatggacacgggttcgcctccacttacgggcacgggaattgtgcgagtggaggtgcaggacattaatgacaacgatccggtattcgaactgcaatcctatcatgccactgtgcgcgagaatttaccgtcgggaactcatgtcctgacccccagagcaacggataaggacgaaggactaaacgccaagctgcgctttaatttgttgggagagcacatgcatcggtttcacatagattcagaaacgggcgagattagcacagctacaactcttgatcgtgaagagacttccgtgtaccacttgaccttaatggcccaggatagctcgattaccgagccacgagcatcgtctgtaaatctcacaatcagtgtgtccgatgtcaatgacaatatcccgaaattcgattcgaccacctacaacgtagcagttccggagaggatcagcaagggtgagtttgtgtttggagctcgagccttagacttggatgatggcgagaatgctgtggtacattacacgattagcgggcgagatcaacattactttgatatcaacaccaaaacgggtgtggtgagcaccaagctggagcttaagaccaagaccaagtctcacgatgatttaacctatacgattgtgatatctgcaatggatcagggcgagcaatctcttagttccaaggctgagcttacagttatcctccgaccaccggagctctttcccacctttgcctacatggccaacagtcactttgccatgtcagaggatgttaggccgggcaagatgataaccaaagtcagtgccacatcgcccaaaaagggtttggtgggtaaaattcgctatgccatagccggcggaataatgggggattctctgagagtggatcccaatagcggattactgagcgttggtcaggatggcctggactatgagctgacacatctgtatgagatttggattgaggccgccgatggagacacgccaagtctgcgtagtgtaactcttataacgctcaacgtaacggatgccaatgacaatgctcccgttatggaacagctcatttacaatgccgaggtcctggaggaggagtccccaccgcagttgatagccgttgtgaaagccagcgatcgtgactccggcgacaatggaaatgtcatctatcgcctacagaatgacttcgacggcacatttgagattacggaatcgggtgagatttacaccaggatgcgactggatcgcgaggagatcggcgattatgcgttcgtagtggaggccgttgaccagggtgttcctcatatgacgggaacagctagtgtcctactgcatctactggacaagaacgacaacccgcccaagttcacacgcctcttttccctgaatgtaaccgagaacgccgagatcggtagctttgtgatccgagtcacctcttctgatttggatctgggtgcaaatgccaatgcttcttactccttcagcgagaatcccggcgagaagtttcgcattgagccgcagagtggaaacatcacagtggccggtcatcttgatcgcgagcaacaggatgagtacatcctgaaagtggtggcctctgatggagcctggcgtgccgagacacccattaccatcacaatccaggaccagaatgacaatgcccccgaattcgagcatagcttctacagcttcagtttcccggagctgcagcaatcgattgctttggtgggccagatcatagccacggatcgcgataaacagggtcccaactcagtgatctcctactcgctgcagcagccgtcgcccatgttcagcatagatccagccacgggtgaggtcttcagtaagaaggcggttcgcttcaagcactctcagtacgttcgctcaccggagaatatgtacgccctcaccgttctggccacggataatggtaagcctcctctgtactccgagtgcctggtgaacatcaatatcgtcgacgcccacaacaatccaccaaagttcgaacaggcggaatatctggcgccgctgccacaggatgcagttcgtggtcagcgaatagttcgagtccacgcaaatgacaagcaggatctgggcaccaacgaaatggactactccctgatgacattcaatttgagttcgatcttcagtgtcggcagacacgatggttggattactttggtcaaacccattcaagtgccgccaaacactcgatatgaactggttgttagggccaccgatcgtggtgttcctccccagtccgatgagacacgagtcgtgatcgtggtaaccggggagaatatggacacacccagattttccgtaaacagctatcaagtcattgtgcccgagaatgagcctgttgggtccacaattctaactgtgggcgccactgacgatgatacgggtccaaatggaatgctgcgctactccatttccggtggcaatgagcgtcaagacttcagtgtggatgaacgtacgggtggcatagtgatacaacagcaattggattatgaccttatacaggaataccatttgaatatcacagttcaggatctgggctaccatccactatcctcagttgcaatgcttacgatcattctgactgatgttaatgacaatccacctgtgttcaatcacaaggaataccactgttatatacctgaaaacaaaccggttggcacctttgtattccaggctcatgccgcggataaggattcaccgaaaaatgctattatccattatgcattcctgcccagcggaccagacaggcacttcttcataatgaaccagagtaatggcaccatttcttcggcagtttcctttgactatgaagagcgccgcatctacacactacagataaaggcgaaaaatcccgattcgagcatggagagctacgccaatctctatgtgcatgtcctgggcgtgaatgagttttatccacaattcctgcagcccgtctttcactttgacgtatcggaaacatcggcggtgggcactagagtgggtgccgttcaggccaccgataaggacagcggcgaagatggacgtgtctactaccttctggtgggttccagtaacgacaagggtttccgcatcgataccaatacgggcttgatttatgtagcccgacacttggacagggagacacagaaccgtgtggtactcacagtgatggccaaaaactatggcagtattcgtggtaacgacactgacgaggcacaagtgattatatcgattcaggatggcaacgatccgccggagttcataaagcactactatacctccacgatttccgaggcagctccggttggcacgaaggtcacaacggtcaaggccattgacaaggatgtgcgcacacaaaataatcagtttagctattcgatcattaatggcaacctgaaacaaagctttaagatagatgtgcaaacgggtgagattagcacggcaagtcgtttggatcgtgaggagacatccacctataacttggtgattggagccattgacacgggactgcctccacagacgggaagtgcaacggtgcatatcgaactagaagatgtgaacgataatggacccacattcacacctgagggtctgaatggttatatctccgagaatgaaccggctggcacttccattatgacactaatagccagtgatcccgatctaccgcgcaatggaggacccttcacctatcagttgattggtggtaagcacaagtcctggctaagtgtggacagaaactctggtgtggttaggtccacaaccagtttcgatcgcgaaatgacacccattctagaggccataattgaagtcgaggacagtggaaagcccaaacaaaagtcccagcacctgctcacgatcactgtattggatcagaacgataatccatcgaccacgaggagcttgcacatagcagtcagtctgttcaacggcgatctgccttcgaatgtgaagctggccgatgtgcgtcccaatgatattgacatcgtgggcgattatcgttgtcgcctccagaagaatcccgcccagagtcaactgcagttggctattcctcgggcctgtgatctgatcaccacctcacatacgacgccaatagcttcggttttcagctatacgggaaatgacggaaaacatggggatgttagctccaaagttagtgtcgccttccagagttttaacaacgaaacattggccaactcagtgtccatcatggtacgaaatatgacagcttaccacttcttggctaatcactatcgaccaattctggagatgattaagtctagaatgagtaacgaggatgaggtcattctatatagtcttctagagggtggcagtggcaattccaccaatctccaactgctaatggcagtcagattggcgaagaccagttaccaacaacccaaatatttgattgaacgcttgcgagagaagcgttcagcgttttcggaactcctgcaaaaggaggtgattgtgggctatgaaccctgcagtgaaccggatgtttgtgaaaatggcggagtctgcagtgccaccatgcgactgctggatgcccatagctttgttatccaagacagtccggccttggtgctgagtggtcctcgggttgtgcacgactacagctgccagtgcaccagtggattctcgggcgagcagtgcagtcgtcggcaggatccttgcctgcccaatccttgccattcgcaggtccaatgccgtcgcctgggtagcgatttccagtgcatgtgtcctgccaatcgggatggcaagcactgcgagaaggaacgcagtgacgtgtgctatagcaagccgtgtcgcaatggaggaagttgccaacgcagtccggacggatcctcctacttttgcctatgtcgtcccggattccgtggcaatcagtgcgagagcgtgtcggactcatgccgacccaatccctgtctgcacggtggcttgtgtgttagtctcaagccaggatacaaatgcaactgcacgccgggacgatatggacgacattgcgagcgttttagctatggattccaaccgctgtcctacatgacttttcccgctctggatgtgaccaccaatgatatatccattgtgttcgccacgacgaaacccaactccttgttgctgtacaactacggaatgcagagtggcggcagatccgatttcctggccatcgaactggtgcacggcagggcgtatttctcatctggaggagctcgtactgctatcagtactgtgattgctggacgaaatctggctgacggtggatggcacaaggttacggccacccggaatggacgtgtgatgtcactcagcgtggccaagtgcgcagattccggtgacgtttgtacggaatgcctgcccggagattctagctgctatgcggacgaagtgggaccagtgggaactctcaacttcaacaaacagcccctgatgatcggtggcttgtcctcggctgatcctatcttggagcgacctggtcaagtgcacagtgatgatctggtgggctgtctgcacagtgttcatatcggaggacgtgccctgaacctcagcttgccgcttcagcagaagggcattttagccggatgcaatcggcaggcgtgtcaaccagctttggccgccgaacgctgtggaggattcgctggacaatgcatcgatcggtggtccagttcgctatgtcagtgcggcggacacttacagtcgcccgattgctcggactccttggaacccatcaccctgggcgaaggtgcctttgtggagtttagaatttcggaaatatatcgtcgcatgcagctgctggacaatctgtataacagcaaaagtgcctggctggataaccaacagatgagagaacgtcgagccgtaagcaatttcagcacagcttcccagatctacgaggctccaaagatgcttagcatgctgttccgcacctataaggatcagggtcagatcctttatgcggccaccaatcaaatgtttacctcactgtccctgcgcgagggtcgtctggtttactactccaaacagcatcttaccatcaatatgacggtgcaggaaacttctacgctcaacgatggcaagtggcacaatgtgagcttgtttagcgagagtcgaagtctgcgactcattgtcgatggaaggcaagtgggtgatgagctggatattgccggggtgcacgacttcctcgatccctatttgaccattctgaatgtgggtggcgaagcatttgttggttgcctggccaatgtgacggtgaacaacgaactgcagccgctaaacggatcaggcagcatctttccggaggttcgttatcacggcaagattgagtccggctgcagaggagacattggccaagatgccgcccaggtggccgatcctctcagcattggcttcaccctggtcattgtcttcttcgtcattctggtggtggctatactgggctcctatgttatctatcgattccgcggaaagcaggagaagattggtagtttgagttgcggtgtgcccggcttcaagattaagcaccctggtggtccagtgacgcagagtcaggtggatcacgtcttggttcgcaatctgcatcccagtgaagccccgtcaccgccagttggagctggagatcatatgcgaccgccagtgggtagccatcacctggtgggtcccgaactattgaccaagaagtttaaggaacccactgcggagatgccacagccgcagcagcagcagcaacgtccccagcgacccgatatcatagagcgcgagagtcctctgataagggaggatcatcacctgcccattccgccgcttcatcctctcccgctggagcacgccagttccgtggacatgggttccgagtacccggaacactacgacctcgagaacgccagctccattgctccgtccgacattgatatagtctatcattacaagggctatcgtgaggctgctggcctacgcaaatacaaggccagtgttccacctgtttccgcctacacgcatcacaagcatcagaactctggctctcagcagcagcagcagcagcaccgccacacagctccctttgtgacccggaaccaaggtggccaaccgccaccgccgcccaccagtgcatcccgcacccatcagagcactccactggcccgactctcgcccagctcggagttgagttcccagcagccgcgcattctcactttgcacgacatttccggaaagccgctgcaaagtgccctgctggccacgacctccagttccggtggcgttggcaaggacgttcacagcaacagcgaacgcagtctgaacagcccggttatgtcgcagctgtccggccaaagttccagtgccagcaggcaaaagcccggagtgccacagcagcaggcgcagcaaacttccatgggcttgaccgccgaggagattgagagattgaatggcagaccacgaacttgtagcctaatctccaccctggatgccgtctcctccagcagtgaggcgcctcgagtgtcgagcagcgctctgcatatgtcgctgggtggagatgtggatgcccatagttcgacttccacggacgaaagcggcaacgacagcttcacgtgctcggagatcgagtacgacaataacagtctcagtggcgacggcaagtattccaccagcaagagtctcctcgatggacgcagtcccgtgtccagagcactaagcggtggtgagacgagcagaaatccaccgacaactgtggtcaagacaccgcccattccgccgcacgcctacgatggattcgagtcatcatttcgcggatcgctcagcacgctcgtggccagcgacgatgatatagccaatcacctgagcggtatctaccgcaaggccaatggagccgcatccccatcggccaccaccctcggctgggagtatctgctcaattggggacctagctacgaaaatctgatgggcgtcttcaaggacattgccgagctgccggacacaaatggaccgtcgcagcaacagcagcagcaaacccaagtggtgtccacgctacgaatgccatcatcgaatggaccggcggctccagaggagtacgtg

SEQ ID NO: 6285 - protein, 5147 aa, DROSOPHILA [sequence omitted]

SEQ ID NO: 6286 - DNA, 3904 bp, DROSOPHILA
aaaatattattggataaagaaacgtgttgcctaaaagcatttatagctagtctaaaggcaaacgtaaaagggtaaatttttatgcagcttattaaagagtacatttgaactacgtaccacaactaatatctttttaaaaacctaactgatgaaaagatgcaaaaattcggaacaaagccatcttaatgcgagaattttttcttgattgtttttgccttgattgactcaactttgaatctcgtttgattgcagcactcaaggacgcggtgactcgggccagtgccgaggagataatcattccctttggcattggaatcgcgggaatggtggcgcagacaaagcagatgattaacatcaaggaggcctacaaggatgctcgcttcaattgcgaaatcgatctgaagaccggctacaaaacgaacgccatcctctgcatgcccatttgcaattacgagggcgacatcataggcgtggcgcaaattattaacaaaacgaatggtggatatttaaaggatttgtcctcctcccaaatttattaacttatatccctcgtaggctgcatggagtttgacgagcacgatgtggaaatttttcgccgctatttgaccttttgtggaattggcatacagaatgcccagctctttgagatgtccgtccaggaataccggcgtaatcaaattctcctcaatttggcgcgcagtatcttcgaggagcagaataatcttgagtgcttagttaccaaaattatgacagaggcccgggaactactcaaatgcgaaaggtgctctgtgtttctagtggatctcgactgttgcgaggcggtaagtcagtttcagtaatatagtaatagcttttagtgggtctaattatttggaaaaagtattcatatcaatatctgaatattagatttaattattagtatttgttttattttctcagcagtaaaaatatttattttcgataatatcttattgtattattccctaattgttatagaaacctaaccgcgtcgttgaagtttaagtcgaggatactcagccagtttcatggtcatgttgtccacataaaccagatccttgtagagagtgcttgtgctaatcttgtagttcctgagtattctgcataaggcaaactttgaagacatcattgcatattttgaccctgagaaaatgacataaggaattgatttaatatatattccgagattacatggcggtgatcaacccaccaatgcaatttctctttcccctcgcaaatggaatgtaggcatatgggtgcttttgttccatgttttccgccaagaagttatccggattaaagttgtctgcatctggtccccagacttcgggatttctgtgagtgtgaaacatgtcgatgccgatgacgactcctttgggaatgagaactccattcgagagacgaacatcattctttgtttcccttgctgttattggaatagcaggtatcaggcgtagtgtctcctttatcacgcgctccaagtagtccagtttctgcatatctgggtatgttattccaaagtgtccggcatctgggaagacaccatttagctcctcaaagaccgcttcctggtgctcgggatgattggccagtaggaagagtgcgtgataaactgttagagctgatgtatcatagccggcggcaatcattatacaacattcgctcttcacatccatataggtgatatcgcctttacggtacagttccattgccctattgatcacaatgttcgattcgggatctgaatcagtctttggcaatggattgacttttttattaaccacctgaaaaaatatgattaaagtaaaaatatctcaagaccatcattacctacgttgtccaacattttttgaattctagaaaagttgtcagctcgtaacttatcataaccgcatatttttgaaatcatcctgttttgaaccaagggcatcaatatattgagagtcgaatgagatatgagcctataaaaatgaatgggattgtcgcattttaagtaaataaaattggtttcggtttgcttaaagtttctcttacgattcgaagctttccacgaggctgccatttttgaagtgctcatcatgtttaacttcagaacccattgtggtttcttagaacagggtaaaaaatcagaaaagcttatcaaacaataccttgattagatggcttacgggcggctattttaaaagaccatctaagcatctctggaaccacatctatttcgcctttgtcgacataagtatctagtaaattcatcaggactttcgtctcggcatcgaaaatgtgaaagaagctaagcaaaagatcctgtttaaacgatgggttaaagtgcttgcggcgatcaagccaatgaggatctattaaatgcttagattgttaattaaatttgattaactgttaagaatgctgcagtgtaggcaccttgttttcccagcaatccatttcccatacaagaagttatggcattcacaatatgctggctcttgttgtggcaatcaggagacgaaaagatatcctcaacgactttcggatctcgtgtcactataaatggcaccggacccatccacgttaaaatagtcgagccgtacttattcaaatactttgttcgaaagcttagtttacctattttcgagtaggttataataattcaatatttgtaatctttttattcgttcacttgggtttaagtctaaaatttacgtttataggtgatgatattttccagggagctacccaaaatgggtagtcctatgggtccgggaatctttagcatcaggaaatataaccttcggcgactccataagaaataaatccaaaaaagagctccgaccgccagtaacaaattgatagttaacataatagaactgtcacttcgatgaattatattcgctatagaatggttttgccgactgattcgtctcgagtctttggtaggggtttatatagatgtggtgcggtagtatcaggtcgtttatacgtaattataaaaaaattgtagttataatctaggttattgaaaagtattaaaacgtataatttctaagatatttcttacgacgaagttctggaatggggtcaattagataatacaatatataataatcagttaataattgtgcatatattataaaaacaagttactcgtttgagtaggttaatatggaatatattgtatttaccgtttgtattacgcccctgtctgcgtatctaagtcatttgaatcgatattgatattcaaattaattgatcgacatttctcagacaacaatagtgtgtccaagcaaaatggttagcgattggcgagtttttcccaaatatgctgcataaataataaagttaaatcctgtggtcaccacccaatgtccttcacagtttaatttacattttaaaaacggctcagcgtgaccattttgtttgtgtgttcgtcgtcaacccaaaatgaacttaaaatgttcaatctacaaggttttctttttgcgacataattgtgggcgtggctccacgtggctggaattcagtaatattcaagtgtcaggcatcgcgtgaaattctgacagttcggtggtaaaatgtccttgggggtttgtaaaataatgtccaagtctgggcaatttacatttgtgccgaagctttgctgattgcctgcctttaattaaattgactcgtgcctgaattattcaaattataataattgacaacgtaactagtctgggccaggtttgcatagagttgcggaagtatagaaaatactataaataaaaagaaagtttaacgacttctctgatctttcagcaattagatagatattgtctagatagcaattatcacacgataagacaggtattttaaaagcagtaacgagtatcttaatccgctctaattgctccgc

SEQ ID NO: 6287 - DNA, 1511 bp, DROSOPHILA
cgaatataattcatcgaagtgacagttctattatgttaactatcaatttgttactggcggtcggagctcttttttggatttatttcttatggagtcgccgaaggttatatttcctgatgctaaagattcccggacccataggactacccattttgggtagctccctggaaaatatcatcacctataaacgtaaactaagctttcgaacaaagtatttgaataagtacggctcgactattttaacgtggatgggtccggtgccatttatagtgacacgagatccgaaagtcgttgaggatatcttttcgtctcctgattgccacaacaagagccagcatattgtgaatgccataacttcttgtatgggaaatggattgctgggaaaacaagatcctcattggcttgatcgccgcaagcactttaacccatcgtttaaacaggatcttttgcttagcttctttcacattttcgatgccgagacgaaagtcctgatgaatttactagatacttatgtcgacaaaggcgaaatagatgtggttccagagatgcttagatggtcttttaaaatagccgcccaaaccacaatgggttctgaagttaaacatgatgagcacttcaaaaatggcagcctcgtggaaagcttcgaatcgctcatatctcattcgactctcaatatattgatgcccttggttcaaaacaggatgatttcaaaaatatgcggttatgataagttacgagctgacaacttttctagaattcaaaaaatgttggacaacgtggttaataaaaaagtcaatccattgccaaagactgattcagatcccgaatcgaacattgtgatcaatagggcaatggaactgtaccgtaaaggcgatatcacctatatggatgtgaagagcgaatgttgtataatgattgccgccggctatgatacatcagctctaacagtttatcacgcactcttcctactggccaatcatcccgagcaccaggaagcggtctttgaggagctaaatggtgtcttcccagatgccggacactttggaataacatacccagatatgcagaaactggactacttggagcgcgtgataaaggagacactacgcctgatacctgctattccaataacagcaagggaaacaaagaatgatgttcgtctctcgaatggagttctcattcccaaaggagtcgtcatcggcatcgacatgtttcacactcacagaaatcccgaagtctggggaccagatgcagacaactttaatccggataacttcttggcggaaaacatggaacaaaagcacccatatgcctacattccatttgcgaggggaaagagaaattgcattgggtcaaaatatgcaatgatgtcttcaaagtttgccttatgcagaatactcaggaactacaagattagcacaagcactctctacaaggatctggtttatgtggacaacatgaccatgaaactggctgagtatcctcgacttaaacttcaacgacgcggttag

SEQ ID NO: 6288 - protein, 492 aa, DROSOPHILA
MLTINLLLAVGALFWIYFLWSRRRLYFLMLKIPGPIGLPILGSSLENIITYKRKLSFRTKYLNKYGSTILTWMGPVPFIVTRDPKVVEDIFSSPDCHNKSQHIVNAITSCMGNGLLGKQDPHWLDRRKHFNPSFKQDLLLSFFHIFDAETKVLMNLLDTYVDKGEIDVVPEMLRWSFKIAAQTTMGSEVKHDEHFKNGSLVESFESLISHSTLNILMPLVQNRMISKICGYDKLRADNFSRIQKMLDNVVNKKVNPLPKTDSDPESNIVINRAMELYRKGDITYMDVKSECCIMIAAGYDTSALTVYHALFLLANHPEHQEAVFEELNGVFPDAGHFGITYPDMQKLDYLERVIKETLRLIPAIPITARETKNDVRLSNGVLIPKGVVIGIDMFHTHRNPEVWGPDADNFNPDNFLAENMEQKHPYAYIPFARGKRNCIGSKYAMMSSKFALCRILRNYKISTSTLYKDLVYVDNMTMKLAEYPRLKLQRRG

SEQ ID NO: 6289 - DNA, 4019 bp, DROSOPHILA
gagcctgggtgtgctctgctttgagctgctagtgggccacgctcccttctactcgaagaactatgacgagacctacaagaagattctcaaggtggactacaaactgccggagcacatttccaaggcagcatcccatctcatttccaagctgctggtccttaatccgcagcaccgcctaccgctggatcaggtgatggtgcatccttggatcctggcgcacacgcagtgaacacattcttgtttaattttcagttaattccttttaattacatttttagtttagggctccccgcgtaatttaattatggcatcataaattttcatttatatagatacgagaaattaacatttatcaattaagtttattattatcattagcaataaagtttgtgtgtgttttcgaatgctagcgtacactcctatcttatgtagctacctaatctctagcgaaatgggttgacggaattgcaaatgcagaagtgaaacgtgtaggcagcgacaaaaaaaacaggcaacattgcccaaatgcagcgcagcgtttatttttatcacagaaaaccaagtatatagagtatatttgttaatgaaacttgtaaggatttagcaacgatttcgattactgctaattcgggactaataatttgcaaggcagaactgaaacagtcttcattttaaatctgtctgcatttgttcgtagctccatctcagagtattgtatttcctgcgagttttaatttcttgttcttcatttgctattaacgaaatgatggtagtcatgacgttgaacttaacttacaaactaaatagcttagggcgtgctcaagccaggatagattttgatttataatcttcaattaacgtacaaatttcaatgatcgatttgcgacatttcgttatgattaaccctagaatctatggcttaccgagcacggctttaatataaaggggtttctaagcctttgcacacttgccgctcaatattaatagaaaattatcttacttagtgtctaataacctcgcctcccttcttgcgtgctgcaccaccattggaatagtcgtcctctgcaatttaagttaaagtgttaagcatttattccgatttgtgagcacttccactcaccatcttgatcttcatccatgccgtcttccaggtggatgccttcggcgaactccttaccctggtcagcaacgatttcgttgtttagattgtctgtatcgagcaaatgctgtggctgtttcacggccacatcacccacatcgtcgtcgtcatctccgtcgccacctcctccggcaccggctgcctcggccatctgtttggccgtttcatcgggaacgggtccgggaccaggtgccggcaattcgccatcgaagaaattctggccgccaccagcggcgggcaaattaaagctaggctcgtttaacgcatccttaacttcgtgagcgcccgaatcctcgatgggtttgggagctacgcctacatttttgttgccctccatatcatttactgcgttggcgtaacgattgttgttctcgttcttcggcaggtcttcggcggcgttgtctacatcgacagcgtcgcccttagtatccgctttgtcttcaaagttctcgggaatgggagccacgttttcgggaagtttgcgctcagtcttcgctggtggcactgcaagcgggggaaggccgctgctactaacttttggggctacagatgcgttgggggcatcaccggctttcttgtccgaagcgctgcccactgaggcttgggtgctgctcttgcggggtgcacttaacggggaaacaggaccgccggatagttgcggctcctcctgctgttgcttctcactgaccgatttgggcacaatctgaaagttttcaacagagtttagtatgaggctgtggttgttggacacggcaaaaggctgcagaggcagttgcggctgctcttgggttccgtcaccgttactcttaagtgtgaagttagtagacgcgtttgttaggttttgttttgggttagttgctagcagatttaccccgccgccaatcctgtagaggccttcactcacttgcacttgggcatcgaaggacttctcgttgcggggcttttcaatgctgtgcgctagctgggcaggatttgagtggtgcgtggtgggcatctgctcggcgggcttattcagttgctgctggtgtccctggaccggtgcctcggcgggctggactttaggtacatagttgcagttggtcttgaattccgcaattgtggcttccagggcgtgaatcttgtgctcaccatcgcgctgtagcttgtccagcttttcctggagcataagtagatatggtgaagaaatttacttggatgtattagaaaagcataccttccaggcagccacctcgcgctccttgctggccttgtccttatgaagatccgccaggaccttttgcagcttttggtcgaaagcgttcgtgtcctcgatgtgtttcttcttgctcttgacgaactcggcctccaggttggtgtacttaatctccagcagcttgtacttttccacctgagcgtcgaacttctcctgcagtgcgtgttccgtgtcgtgctgcttctgcagtgcctccgccaactgaccctcgtactgctcctgcagggtcatcttttccgagcgcagcgcgctcattctcttctcggcggtaagtttttcggcattcagggctgtggatatcaccataatcagtcggcatatggacaaaacaagatagaaacaatagacccacattgcatctggacactgaggccctcttggaaggcgcggctctcgtccaattggtgttgggacatttggtagataacaatcatcatgatgagcacgatgaacatgctcatcaggatgcagatacggacgcgccctgagcgcgcgaagcgagccgaactcattttacactcgatttaagctagtaaatcaacaaattgcaactatttcctttgcagaaaaagaatggtttttcttcttgttttgctttagagctggtacgatggtatcgtcgtaacgatagtagcgattgcctatcgatgaatttagttgtattatttttttatactttatttttatcccctttgaaattttaaaaggttctgaattatgaatgttcgcagttctttgcaataatataattgttgaattccttttttttatttaatttttaaggcttgctatgtttttaacaaggcaagctcaaggtgccggtgtgaccagcttggcaccaggcgatagccaatttgagccgtagatatatttcaaaggtgtcgaaacggtcactccgctgaccagaatcgacggcgacgcgcgaagagaatatcaataaatatttttaatttagcttaattagccgcaaataagtgttgcttgtccgcagcagccgttaagttcaaagtaaccggagtcaattaatcgagcttttcagcaactagtgcaaagtgagttcaatatctcggctacgattgatgccctcacttttccgcggggtgttcggtggaatttatttaaacatttgggagagtttcgcacgcgaacgcatatacgtagcgcagcgagagagagagtggcaatcaaattaatttaataaaggtgctcgatggcggtggtaaacaccgtgaattacgtaaagtccgcacaagtggttgctcctccagtgcagccaatctggaataagtgtgccaccaataacattaacaatagtagtccagtatcagttgtgtgaatctcacctgtccgccaggtgaaccacgcacacggggaaaaaacgtcgccgtaaaacggcaagccccccgcccccacgagttcccaaacatttgggcaataatcaataactggactgccatttactgttaggtgccgcaatctacacttatttttatcttcggaagtttatagattcagctataaactattatttcaccccatcggtattcttcaacctgatatctttatgcttgagatatttcttccacctgatatctttatgcttgcggt

SEQ ID NO: 6290 - DNA, 1842 bp, DROSOPHILA
taccagctctaaagcaaaacaagaagaaaaaccattctttttctgcaaaggaaatagttgcaatttgttgatttactagcttaaatcgagtgtaaaatgagttcggctcgcttcgcgcgctcagggcgcgtccgtatctgcatcctgatgagcatgttcatcgtgctcatcatgatgattgttatctaccaaatgtcccaacaccaattggacgagagccgcgccttccaagagggcctcagtgtccagatgcaatccctgaatgccgaaaaacttaccgccgagaagagaatgagcgcgctgcgctcggaaaagatgaccctgcaggagcagtacgagggtcagttggcggaggcactgcagaagcagcacgacacggaacacgcactgcaggagaagttcgacgctcaggtggaaaagtacaagctgctggagattaagtacaccaacctggaggccgagttcgtcaagagcaagaagaaacacatcgaggacacgaacgctttcgaccaaaagctgcaaaaggtcctggcggatcttcataaggacaaggccagcaaggagcgcgaggtggctgcctggaaggaaaagctggacaagctacagcgcgatggtgagcacaagattcacgccctggaagccacaattgcggaattcaagaccaactgcaactatgtacctaaagtccagcccgccgaggcaccggtccagggacaccagcagcaactgaataagcccgccgagcagatgcccaccacgcaccactcaaatcctgcccagctagcgcacagcattgaaaagccccgcaacgagaagtccttcgatgcccaagtgcaagtgagtgaaggcctctacaggattggcggcggggtaaatctgctagcaactaacccaaaacaaaacctaacaaacgcgtctactaacttcacacttaagagtaacggtgacggaacccaagagcagccgcaactgcctctgcagccttttgccgtgtccaacaaccacagcctcatactaaactctgttgaaaactttcagattgtgcccaaatcggtcagtgagaagcaacagcaggaggagccgcaactatccggcggtcctgtttccccgttaagtgcaccccgcaagagcagcacccaagcctcagtgggcagcgcttcggacaagaaagccggtgatgcccccaacgcatctgtagccccaaaagttagtagcagcggccttcccccgcttgcagtgccaccagcgaagactgagcgcaaacttcccgaaaacgtggctcccattcccgagaactttgaagacaaagcggatactaagggcgacgctgtcgatgtagacaacgccgccgaagacctgccgaagaacgagaacaacaatcgttacgccaacgcagtaaatgatatggagggcaacaaaaatgtaggcgtagctcccaaacccatcgaggattcgggcgctcacgaagttaaggatgcgttaaacgagcctagctttaatttgcccgccgctggtggcggccagaatttcttcgatggcgaattgccggcacctggtcccggacccgttcccgatgaaacggccaaacagatggccgaggcagccggtgccggaggaggtggcgacggagatgacgacgacgatgtgggtgatgtggccgtgaaacagccacagcatttgctcgatacagacaatctaaacaacgaaatcgttgctgaccagggtaaggagttcgccgaaggcatccacctggaagacggcatggatgaagatcaagatgaggacgactattccaatggtggtgcagcacgcaagaagggaggcgaggttattagacactaa

SEQ ID NO: 6291 - protein, 581 aa, DROSOPHILA
MSSARFARSGRVRICILMSMFIVLIMMIVIYQMSQHQLDESRAFQEGLSVQMQSLNAEKLTAEKRMSALRSEKMTLQEQYEGQLAEALQKQHDTEHALQEKFDAQVEKYKLLEIKYTNLEAEFVKSKKKHIEDTNAFDQKLQKVLADLHKDKASKEREVAAWKEKLDKLQRDGEHKIHALEATIAEFKTNCNYVPKVQPAEAPVQGHQQQLNKPAEQMPTTHHSNPAQLAHSIEKPRNEKSFDAQVQVSEGLYRIGGGVNLLATNPKQNLTNASTNFTLKSNGDGTQEQPQLPLQPFAVSNNHSLILNSVENFQIVPKSVSEKQQQEEPQLSGGPVSPLSAPRKSSTQASVGSASDKKAGDAPNASVAPKVSSSGLPPLAVPPAKTERKLPENVAPIPENFEDKADTKGDAVDVDNAAEDLPKNENNNRYANAVNDMEGNKNVGVAPKPIEDSGAHEVKDALNEPSFNLPAAGGGQNFFDGELPAPGPGPVPDETAKQMAEAAGAGGGGDGDDDDDVGDVAVKQPQHLLDTDNLNNEIVADQGKEFAEGIHLEDGMDEDQDEDDYSNGGAARKKGGEVIRH

SEQ ID NO: 6292 - DNA, 3222 bp, DROSOPHILA
attttttttgcaaactgtcaacttcatgtcaattgggctatgtctgagcgtattttcaaatataacccataaaacattgtattgaataaatagagttaacacgttaacaaaatactcggtatcccactgtaactttaaaaaaaatctagaaagaagtaacgcaatttgaaatgcttttaagaactataactatctactgccaagcggaaaggggaacgtgggagatcagtcttccccagaatatttcgcaccgacttaaagtgctatatgaacatgttcatatcatatcatttccattggactgaatcttttattgccattttaaatgcatccccgagtgaatagacattgcccgtctgacaatgttaaatactaacaatatcatttgtattcatatcagttcatcaaacttagaacaaaattcaatttttagctccagattttggttgttttacactttaacttcaacggtaaacataaggtaaacatatttcctatcccccgaattcgaaccttttaatacctacaagcgtactaattatagttgatagactttttaaatatttacaaaatattttgtatataggcttttcaaggcttcaccaataattgatgaatattggcaaactcgtaaccaaaaacgtggcaataattaagctatgacactctattagagtttagaatagactccagagagattatacaagttcgagtcgaaagaaatacatatatttttttgggcgatccattttatattcaccacatagcagtgcgtaatcacgaacgttaataaactgagccatatgcaacaattatttacacatctaaatgttaatcctaaatcctagtggatctgtgttaactgcagatcgaagaaaccaaaccagatgtaacctaacaaatcaaagttgtaatgcgtatttttgaattcatttgcatttagacgcgagaaacaataataaaataaatgtaaacgcattgaatgtaaatgcatgttgttttattctttactctctcctgtgccgaagaacaagtccaatgtgttttggtagtataacgcagccagctgttctttaggctcttgtttgattccggcaatagactccaaaacttggctaaaacggaagacaaactgttagtatcgtctgcacatttgggggtaaggtattaacaatgagtacctgatttggcaaggctcacagcgtccgtctattagggattcagctgtccatttctctttcttcttgacggtgggaaacttggtggtcacgtgcttgtgtccagcatgcgagggtcgaataccacaccacgggcagtcggtttctagcattatcctgtcgttgggtagcttgcgcaccacttctgcgttttcatccgtctttagggagcacccattgaagcctatgtagagaccgccgaaggcgaggatgcgctgggcctcctccaaagttcctgtaaagctgtgcaccactccgccgccgcactcctcgatcttgttccgatttctttccaggatgcccatgaagtcctcggcagcatttctcatgtgcagaaagagaggcagtttgaactcggccgctaggtccagctgcttctcgaagtacagacgctgggtttcctgggcgcagaagtgcaagcgatcgtagtctagaccacattctcctacggcccgcaccttggttcgatttgccttgatcctggatcgcaactggtcatagtagccctctgggtctggtacgaattcctcgcaccgggtgggatgtgttcccactgtcgtgtagatgcgctctgtcgaggaaaaccacttgtgaattgagagtgtacaataaaatcgcggtatggggagtaagcaacatattcgtattactatgaaaattgatggaataaacatcagatgctcttcagaaagtgagtagctcaatcagaaagtaatttaaaagggacgtgcaatggggactcccaatttaaagcacaatttgcaaagggaacatcctaaaggtcagcttaccatccttggaggccagttccagtgcctcatccacatccttcaggcagccggcggtaacgatgactttctgcagtccctgttgccacgcgcgctccaagacgatgtgcaggtcgggctcgtgcttctgggttccgccgtagcagccctggaacatggggtccgtcaggttggccccaatgtctgtggagcattgccaggtgttagctagtcaagcctgcaggagttaatttctctcaagttaccaatatatttcatggccattccaaaacaacgccgctgcatggataaatgtgctaaaaaaaaccagcagctggaaacagctgtttcacttgcgagatttccgcaagagggcgccgcctgaacgcgctcgtggtaaccgccaggtggcgccgcacttccgttgcaatttgaatttgaaatttgcattaagtcgttctaagaacataattctaagctcagacgtgccagcagcaaattggggtttcccgcacttttccgatccaagcggagcgctcggcctaagccaatttaatgcaaaatcaatgccacagtaaattgcattctgaattgcgcataatgcaatctcattagcaaagctgtttattgtttgccgcgaacgccaaagcggctggctcctcgcaagcccccagatgccccattccgaaatccaacaccacaccccccatataaatatgcaaatttcaaatcagcagcagcacggctgctttaagccggcaatcggcatttacgcaattgcagaatttatgggaatcgcaatatataattcgaatgaaattccattagttacttttaatggatgctgcggtcggtgctgcactagttttaattgatttagtgcaaactgctcactgtgccattttccaggctggcagccgccggtgggcagggcgattcggatccgagtgcggatcccgtggtcccatggacccgtagtgcgatgcctcggtgcgccgatggaaacggaatgcgaaacgaaacagaatccattatgcaggggaatcaaacattttcaaacaccgatgcctgggacgcattgtggtttattttaactggctaatacaattgtcaataattcaatttgaattgaaattcaattagttacaagtacatgacacacatacgcacacttagagagttaatttgggtttccctagactacgtgtagtccatgggccacgatccttcgattcagt

SEQ ID NO: 6293 - DNA, 936 bp, DROSOPHILA
gcttgactagctaacacctggcaatgctccacagacattggggccaacctgacggaccccatgttccagggctgctacggcggaacccagaagcacgagcccgacctgcacatcgtcttggagcgcgcgtggcaacagggactgcagaaagtcatcgttaccgccggctgcctgaaggatgtggatgaggcactggaactggcctccaaggatgagcgcatctacacgacagtgggaacacatcccacccggtgcgaggaattcgtaccagacccagagggctactatgaccagttgcgatccaggatcaaggcaaatcgaaccaaggtgcgggccgtaggagaatgtggtctagactacgatcgcttgcacttctgcgcccaggaaacccagcgtctgtacttcgagaagcagctggacctagcggccgagttcaaactgcctctctttctgcacatgagaaatgctgccgaggacttcatgggcatcctggaaagaaatcggaacaagatcgaggagtgcggcggcggagtggtgcacagctttacaggaactttggaggaggcccagcgcatcctcgccttcggcggtctctacataggcttcaatgggtgctccctaaagacggatgaaaacgcagaagtggtgcgcaagctacccaacgacaggataatgctagaaaccgactgcccgtggtgtggtattcgaccctcgcatgctggacacaagcacgtgaccaccaagtttcccaccgtcaagaagaaagagaaatggacagctgaatccctaatagacggacgctgtgagccttgccaaatcagccaagttttggagtctattgccggaatcaaacaagagcctaaagaacagctggctgcgttatactaccaaaacacattggacttgttcttcggcacaggagagagtaaagaataa

SEQ ID NO: 6294 - protein, 291 aa, DROSOPHILA
MFQGCYGGTQKHEPDLHIVLERAWQQGLQKVIVTAGCLKDVDEALELASKDERIYTTVGTHPTRCEEFVPDPEGYYDQLRSRIKANRTKVRAVGECGLDYDRLHFCAQETQRLYFEKQLDLAAEFKLPLFLHMRNAAEDFMGILERNRNKIEECGGGVVHSFTGTLEEAQRILAFGGLYIGFNGCSLKTDENAEVVRKLPNDRIMLETDCPWCGIRPSHAGHKHVTTKFPTVKKKEKWTAESLIDGRCEPCQISQVLESIAGIKQEPKEQLAALYYQNTLDLFFGTGESKE

SEQ ID NO: 6295 - DNA, 4399 bp, DROSOPHILA
ttggttggcacaacttcttatcccgctcctgattcgtcaatgtttcgttaacctgtccaaattctcgggttagctggagtgcatcttctccagctccataaaggaaatgcagggagcttgtaagcagacaaaaggccacgatggtaagcaaccctaaatgggacactatatgtattgcaaatcaagtgacacagatctggactcacctatacccatccagcgaggtcgatgcctatggcccgcataataacccaggattgcggccgttagcatggtactgatatcgttaccaaccgaaataatgccggatacctttgttggtatcttatagcgcttctccaaggtcgttatagtcccgttaaagtacgcaaaggtcattgtcataacacagccagctagtccatatagaataacgtacatatgctcagtggcaaatctggagagagtgattcctaagcatgaaggtagttgtagagtaccttagagcttacctttgcatggaggggcccttgaatatccagaaaccgcaataagtgtcttttccaccatcttctccttccgtttcattctctggagcagattccctttctttatccgatattgcaaatggcttttcaataaagggcaaagtttcacttttctccaagtctacctttcctcgctcctctgtcatgtctcaacttttacctgcgaacaactcgaacacactgactcgctcttaatcaaatcgctcaacaatatacccaactgcatcgcatgggtaaacagccttagatcttatcaagtctgtcagattagacagtggggatcagacgagcgacatttatataccacacatggaaaatatactttaagaacatttaattgacgggattccttatcattctttcgtatctattttggaaacgtgcgaaattctcgctcaaacattttaccacctgcgggttacgtacccatatgtacatagataaaaagaaaaagaaaatttgtatgaaagcttttatttctttttagtaacaacatcatttggcttttccttcagctctatatcgtcgctctgtttggcctgcaccgttttttcgtcttcatcgaagactttcatgtccttcgcatgataccagaccccaatattccaaaagctgcccaggaaaatcagagaggcgcacacgaggttcatggtgtatctgaaggaaagatggccttaacttcttctacactttttcattagggatctactcacctgagagacttcgtatcgtatatccagcagttacccttggagctgcaggtctttccccatacaagacaatagctgtccagcatccaaccaaacacaatgggactgggaatgaaggccagcacggagtacaccatactgccgaaacctaaggagaaggttttgtccttcgagggaacgcatctcagggctaataacagattactcgatctcccagtggcgcccacgaacttaaggaagcacatgacggccaagaagataaggaactgtttgttgcagtccaccggacaggctccatccatggcgatctgagactgggatgccaaagacgtcacattagacagagagattatgctagaaacgttgcccatgcaccgacaacctgtgtatatagtctttcccagctcatttatggccttatcggtacaccccgcgtggcaggcagatatgaaggtaatattttccggactgcaaaccggagcatagtacacatactcgcagacacatgaggcactgcagctgtcaccggtgggcacgatggacagggaattggcccgatcactctcgtcgcagcccaccagtacataacacagcatgccagccaccgtcaagtaatccaccacgaagttccacgcagccattgcccgggcacttggcttgtacttggagatcacatatccagagatcaaaattcctgcggcagagaatcccaacgcccaggttcctgtggccattgtggaagttgatgccgattgcctgtactggatctcaatgtatttcggggtgaatatccagtacggcatgtagccaaacaagtacagaatagaggccagcatgttgtagacatacaccttgttcgaggccaatcgtttcagcgagtccagcatatcctgaaaggagcgtccagccagcggaatatcctcctcgccatctgctttcaagcgtctggccttggcccttggcatttctttggggaacatgcccacgaacactgctgagatagtcaggatgaatgtgaggagaatccaacctatccaccaagcgcccatccagcgcggatcgtttgtggtaatcagtggctttttgaagggatcgatatacagccggaggcacaaggataccatggagaagcccatagcaggacccagcatacgcagaaaggagctccagcctttacaaaatatacaatggaagtgaaaataaaataaagatccccatacccatcccatacttagcattgctggggtcttggaacttgcggagttatcatccatgtacgagagacctggcgcgtagaagagggaacacccgattccacctatgaactgggcaatgaagaacagcacgatgggcgtgtagtccccagctctttctagacaatttgagtttttttcatggcacagtgagtcgttcttttcggtgatatttagagaagcaccgaaggattcggacattccgtattcttctgtcagccgcaaagcttcttcgccgggtccgtagaaaatgtgaggggtcaacatgagcaggcagaaaatggctataatgatgagacctaaaacagtgcaaaggattggctatctgaagtcaattcggtgatttcaggtgtgttacccaatgcaacccagcgtggacgatgtcctcgactagcgtagtaactcagaaaggcggacgagaaaaccgtgcttatatcattgcccaccgtaatgagacccgatatcttggtgggtatattaaagcgcttctccatcgttgtgatggttccagtgaaataggtaaaggccatggccagaaagcaactagctatcccgtacacaatcacgaacatgtgagcagtcgcaaatctaaagatctagatggtatcacaagaaactcgaaagagagcactgaataatatacctctgtaaggcggggcccctgaaaattgagaagccacatgttgtatccgaagaattcaacctcttttcatcatcagccacatttatgccggcttctttatccttcagaaacttggaggcttcgatctcttcactggccatgatggtcgtccactgtcgaactactgccaaagactgaatcccaaactcagctgcaagctgcatacaattaacttgcctctgggggtaaacaaaataagcttctagatagcgaatagcggccttcatgtttatagctaagtccgtctgagctttatcttactaatcgggatctggtcgttaattgtcagcaattaccatatgagtacacagagctctactgttgcaataccgtttattatggtactggactctacgttggaaatcacacatggatattgacaaatcaaggcaccaagactctcactcacacagcacttaggagtaataataacttaggactaaatctctgtattcttttcgttgttggcctcctcctcgtgctgaacgatcttcatctccacctccttgacgtcctcgtcgaagattttcagatcctttgcgtagtaccagacccccagatcgaaaatggctccaatggcaataaagacagctgcggtgaagttgagagtgtacctaaagaaacgagttttatagatagatatttaagcattatatattaaagctcacctcatggaaagcggatcgtagagccagcagtttcccttatttgtgcaggtcttgccccacaccaaacagaccctatcgaaaacccagccaaagaatataggactaggaataaaggccagcatcgagcacagagtcattccgaatcccatggccgccgtcttgtccttttccggcacacagcgcacggaaaccaggaagttcgaggctctgccgctggctcccacgaacttcaggcaacacatcacggccaaaaaggccacaaattgtgtccaacaatttacgggacatgcgccgggcattgcctgtccattcgctagagcctccaactgactatgaaccgaggtgttctggctaacctcatcgttactcaaatcgaagctggttaggcgcttaaattggctcgtggaattaccagcatcatcgctaggaatgcaggagcaatcgtagaagatctaacaaaaaaaaattgctgcttcatttttctaaaatttgctaaacaaagtaaatacttaccttttttccttcggagttgacgagcaactttttgcacccagcgtgg

SEQ ID NO: 6296 - DNA, 2184 bp, DROSOPHILA
atgaaggccgctattcgctatctagaagcttattttgtttacccccagaggcaagttaattgtatgcagcttgcagctgagtttgggattcagtctttggcagtagttcgacagtggacgaccatcatggccagtgaagagatcgaagcctccaagtttctgaaggataaagaagccggcataaatgtggctgatgatgaaaagaggttgaattcttcggatacaacatgtggcttctcaattttcaggggccccgccttacagagatttgcgactgctcacatgttcgtgattgtgtacgggatagctagttgctttctggccatggcctttacctatttcactggaaccatcacaacgatggagaagcgctttaatatacccaccaagatatcgggtctcattacggtgggcaatgatataagcacggttttctcgtccgcctttctgagttactacgctagtcgaggacatcgtccacgctgggttgcattgggtctcatcattatagccattttctgcctgctcatgttgacccctcacattttctacggacccggcgaagaagctttgcggctgacagaagaatacggaatgtccgaatccttcggtgcttctctaaatatcaccgaaaagaacgactcactgtgccatgaaaaaaactcaaattgtctagaaagagctggggactacacgcccatcgtgctgttcttcattgcccagttcataggtggaatcgggtgttccctcttctacgcgccaggtctctcgtacatggatgataactccgcaagttccaagaccccagcaatgctaagtatgggatgggtatggggatctttattttattttcacttccattgtatattttgtaaaggctggagctcctttctgcgtatgctgggtcctgctatgggcttctccatggtatccttgtgcctccggctgtatatcgatcccttcaaaaagccactgattaccacaaacgatccgcgctggatgggcgcttggtggataggttggattctcctcacattcatcctgactatctcagcagtgttcgtgggcatgttccccaaagaaatgccaagggccaaggccagacgcttgaaagcagatggcgaggaggatattccgctggctggacgctcctttcaggatatgctggactcgctgaaacgattggcctcgaacaaggtgtatgtctacaacatgctggcctctattctgtacttgtttggctacatgccgtactggatattcaccccgaaatacattgagatccagtacaggcaatcggcatcaacttccacaatggccacaggaacctgggcgttgggattctctgccgcaggaattttgatctctggatatgtgatctccaagtacaagccaagtgcccgggcaatggctgcgtggaacttcgtggtggattacttgacggtggctggcatgctgtgttatgtactggtgggctgcgacgagagtgatcgggccaattccctgtccatcgtgcccaccggtgacagctgcagtgcctcatgtgtctgcgagtatgtgtactatgctccggtttgcagtccggaaaatattaccttcatatctgcctgccacgcggggtgtaccgataaggccataaatgagctgggaaagactatatacacaggttgtcggtgcatgggcaacgtttctagcataatctctctgtctaatgtgacgtctttggcatcccagtctcagatcgccatggatggagcctgtccggtggactgcaacaaacagttccttatcttcttggccgtcatgtgcttccttaagttcgtgggcgccactgggagatcgagtaatctgttattagccctgagatgcgttccctcgaaggacaaaaccttctccttaggtttcggcagtatggtgtactccgtgctggccttcattcccagtcccattgtgtttggttggatgctggacagctattgtcttgtatggggaaagacctgcagctccaagggtaactgctggatatacgatacgaagtctctcagcttttggaatattggggtctggtatcatgcgaaggacatgaaagtcttcgatgaagacgaaaaaacggtgcaggccaaacagagcgacgatatagagctgaaggaaaagccaaatgatgttgttactaaaaagaaataa

SEQ ID NO: 6297 - protein, 727 aa, DROSOPHILA
MKAAIRYLEAYFVYPQRQVNCMQLAAEFGIQSLAVVRQWTTIMASEEIEASKFLKDKEAGINVADDEKRLNSSDTTCGFSIFRGPALQRFATAHMFVIVYGIASCFLAMAFTYFTGTITTMEKRFNIPTKISGLITVGNDISTVFSSAFLSYYASRGHRPRWVALGLIIIAIFCLLMLTPHIFYGPGEEALRLTEEYGMSESFGASLNITEKNDSLCHEKNSNCLERAGDYTPIVLFFIAQFIGGIGCSLFYAPGLSYMDDNSASSKTPAMLSMGWVWGSLFYFHFHCIFCKGWSSFLRMLGPAMGFSMVSLCLRLYIDPFKKPLITTNDPRWMGAWWIGWILLTFILTISAVFVGMFPKEMPRAKARRLKADGEEDIPLAGRSFQDMLDSLKRLASNKVYVYNMLASILYLFGYMPYWIFTPKYIEIQYRQSASTSTMATGTWALGFSAAGILISGYVISKYKPSARAMAAWNFVVDYLTVAGMLCYVLVGCDESDRANSLSIVPTGDSCSASCVCEYVYYAPVCSPENITFISACHAGCTDKAINELGKTIYTGCRCMGNVSSIISLSNVTSLASQSQIAMDGACPVDCNKQFLIFLAVMCFLKFVGATGRSSNLLLALRCVPSKDKTFSLGFGSMVYSVLAFIPSPIVFGWMLDSYCLVWGKTCSSKGNCWIYDTKSLSFWNIGVWYHAKDMKVFDEDEKTVQAKQSDDIELKEKPNDVVTKKK

SEQ ID NO: 6298 - DNA, 3298 bp, DROSOPHILA
gcgacgccacgacaatcccagccagtggcctgtgataagccgccattagtatctggctccacattgcccgcgttggttgagccatccgctcgaaagtctctgccctcgaagcctctagctgctggggagcacctgcgcccacgacaatctctaccagcaaaggtgaccgctaatcctcctgcagctgctcgtccggatgcggcttcaacttcggcccaaaatctcaccaacgtatctaaagctcagttggcaaaagaggagatctgctacggcatcatggtcgccaaggacttgccacgtttccgcgccaaggtggagggctctgacttcatgatcaagatacctgagcatggcgtgtttcgcttcaaaacattcggattagccgctagttttctcagtcggtgagtgtgcgcagcgtccttctaagaaacggaagcttattaatgaatccgtcgatttacttgcaggcatgtggcgaaggatcctaaattgaagcagtttttgcctgccgagtggaagttccatcccttggagcagttcaataaacaggtgccatctaggagtcagcagtcccctgctgccatcgtaatcgaagattgagctgatttttcatctcatttcttggatacggttacatattaaatatgtaatctgtttagttatatctagaaatagacttgtctgttattatgattttcagccatgcgaaatggcattctattaagttgtgtatcataaaaaattactatctttaatgatgtatagcattatttcattatcacgccgcatgagtttaagtcttcgtaagctttagctaaaaactattacatttaaatacatgaaagcaacatacatttacggttattattacattttggtgggagaaaaaatgaagaaagcgcatttcaaatttgccgctcttgccagctgattgcccgtttcatttcccaaccgtttcgcatgcgaacagctgcttggcatgttacacgggcagtgaggaaaaagtcgtttaaactaaatccattgttgtttacacagcgctttaactaaattttggacacagtctatatcaataaaagcttgtcacggcggagcttcgatagccagctgataactgcgagtgctgcaacaagaccaacaaagttggcaaaatactcctccaaggtcagccttagatatagagccaacagcacaggtgatcggcataaatcgcttgcctaaacaatttgcaaatatcgttggtatcgatcgcggtgatctattcgcacagagtgcagacactctgtcactgtgatcaggggaagacctctcagctgctggacgagaagactgctcaaaatgggctttgacgagaagcgtgagcccaccggcggcagactgcgactgcaggacattccggccctcacccaggaccactgccgcatgcgggatccggcggaggtggagcgcatcatcaacgagttcgtcatcggcggaccagagcgcatgcaaatcgtctccgacttcgactacaccatcaccaagcagcgcacggaggatggaggagcagtgccctccagtttcgggatcttcaacgcctgccagtcgctgccggaaaactttaaggcggagacggacaagctgtaccacaagtaccggcccattgagatcgatccccacatgcccatcgccgagaaggtgcagtacatgatcgagtggtggaccaagtctggcgaactgaccagcggcttccccttcgaccagtcggaaatagatcagatagccagcaagtacacgcatgcgctacgtgaccgcacccacgagttctttgcggacctccagcgcttgggcattcccacgcttgtcttctccgccgggctgggcaactcggtggtctcggttcttcgccaggccaacgttttgcatccgaacgtgaaggtagtctcgaactttcttcagttccgggatggccttctagatggctttcagcagccgatgatacacaccttcaacaagaacgaaacggtgctaaatgagaccagcgagtattacgacttggtgcacaccagggaccacatcatagtcatgggcgactcaattggtgatgcagacatggcctccggggtgcctgcctcctcacacatcatgaaaatcggcttcctcttcgaccacgtagaagccaacatgaagaagtacatggacacctttgacatagtgctcgtcgatgaccagaccatggacgtgcccaggaccctgctctccctcatcgagaagcaacacaagctgaacctggaggcccccaagcagagctccctataattcccgcagggagttcacgaattcactctgaaatgtactcgtgccgcttctgctctctcattagcaggctagttgctgaccggaacacaacagaagctactaattaggtggttaggcttaaacattctactcatcttaacgaatgaatgtatacttcatggacacaaattatattaaagacaactttgtgcattgcaaatgaaattggtggtgcttgggtcagttgatagttttaccaggaaaaagcgcttagtaaaggcatttattagacgaattaagcgataacacatatggtttaatcaggaattacattgtaaagatatagcaaattgattccatgttgttatttaattaaaaaaagtcactcttgtcaatcaatttgtattaagcaaatattttaaacggcacttcatttttcagaggtcctcgaattttattgtcacgctcagaacaacagttttttttttataacatttaaattaaacgactactgagacaagtctattaataagtataaataaaacaagaaagaatgctatagtcgagcttttcgcctatcaaatacccgttagtcacccagtgtgaatgcaaacgcgaaatttcataatttttctggaatatcgatagatattggggaataaaatgggagaaaatttaaaattttttacaaagtgtgggtgcgattggttttgcggctttagggcgttagagttggacaaaaagtttttttgcaaatcgataaaaatttacacgactaataaaattatgagaaaatatccatgctctacgagtaacgggtataattaattatttcaaagtgttattgtcattttaagttactgattttctctgaaaacgtaagttactgattttctctgaaacgtactgaaattttcgaagcggttattcacgaaacgggaatctggaacgcgccgtcgactagggatggagagcctgccagtcattccaggccagtgctgggccagctgtcgataacttg

SEQ ID NO: 6299 - DNA, 1298 bp, DROSOPHILA
aaaagtcgtttaaactaaatccattgttgtttacacagcgctttaactaaattttggacacagtctatatcaataaaagcttgtcacggcggagcttcgatagccagctgataactgcgagtgctgcaacaagaccaacaaagttggcaaaatactcctccaaggtcagccttagatatagagccaacagcacaggtgatcggcataaatcgcttgcctaaacaatttgcaaatatcgttggtatcgatcgcggtgatctattcgcacagagtgcagacactctgtcactgtgatcaggggaagacctctcagctgctggacgagaagactgctcaaaatgggctttgacgagaagcgtgagcccaccggcggcagactgcgactgcaggacattccggccctcacccaggaccactgccgcatgcgggatccggcggaggtggagcgcatcatcaacgagttcgtcatcggcggaccagagcgcatgcaaatcgtctccgacttcgactacaccatcaccaagcagcgcacggaggatggaggagcagtgccctccagtttcgggatcttcaacgcctgccagtcgctgccggaaaactttaaggcggagacggacaagctgtaccacaagtaccggcccattgagatcgatccccacatgcccatcgccgagaaggtgcagtacatgatcgagtggtggaccaagtctggcgaactgaccagcggcttccccttcgaccagtcggaaatagatcagatagccagcaagtacacgcatgcgctacgtgaccgcacccacgagttctttgcggacctccagcgcttgggcattcccacgcttgtcttctccgccgggctgggcaactcggtggtctcggttcttcgccaggccaacgttttgcatccgaacgtgaaggtagtctcgaactttcttcagttccgggatggccttctagatggctttcagcagccgatgatacacaccttcaacaagaacgaaacggtgctaaatgagaccagcgagtattacgacttggtgcacaccagggaccacatcatagtcatgggcgactcaattggtgatgcagacatggcctccggggtgcctgcctcctcacacatcatgaaaatcggcttcctcttcgaccacgtagaagccaacatgaagaagtacatggacacctttgacatagtgctcgtcgatgaccagaccatggacgtgcccaggaccctgctctccctcatcgagaagcaacacaagctgaacctggaggcccccaagcagagctccctataa

SEQ ID NO: 6300 - protein, 319 aa, DROSOPHILA
MGFDEKREPTGGRLRLQDIPALTQDHCRMRDPAEVERIINEFVIGGPERMQIVSDFDYTITKQRTEDGGAVPSSFGIFNACQSLPENFKAETDKLYHKYRPIEIDPHMPIAEKVQYMIEWWTKSGELTSGFPFDQSEIDQIASKYTHALRDRTHEFFADLQRLGIPTLVFSAGLGNSVVSVLRQANVLHPNVKVVSNFLQFRDGLLDGFQQPMIHTFNKNETVLNETSEYYDLVHTRDHIIVMGDSIGDADMASGVPASSHIMKIGFLFDHVEANMKKYMDTFDIVLVDDQTMDVPRTLLSLIEKQHKLNLEAPKQSSL

SEQ ID NO: 6301 - DNA, 5349 bp, DROSOPHILA
tatacacatatttacatgtatccatctagtagtaggcccaacgacgtgtagctaatttttaaattaaactaataatcaagtgcatatagactagaaaacgtagcatagagcatagtcgactactcgaagtataattactatagttgtgacattcgaaatcactcaaaatgatcggtgtaactgcaatacaacgccttgcgcagaacgttaacgatatacagtatctatagctaaagccctagcgataccgataccggtagctataccataactataaaactaactttaaatctagcaactgactaactgacaaaccagacgcatttcagtggccaagtgttccaacagttttccaaaaactagcccaaacgacccgatgaaatgcagaaacagtaacaattctaaatgtatagcgccgcaagtcaagcaattatagatcaaagaccgcctaagcagatcggctcatcggttagaccctaagttttaaaccttgtattagccccgcgtgaacagcatcaagtattcgcaatctgtatctcgtaactaatcgcagcacatcaatcgaacgcaaaagtcttaagtaagaacgaagatagatactccccgtccccgatcccgttccttttgattctcactcgattctcgattaactttgtaagctgaatcataaattatattctaggattacgctatgtatgtatgcttatgcgactgaatttgaattaaatttacactagatatacaactattcaactgacttttcgactgtgggctgcaagcttacgatttgggtcttgtgcttaaagctttggagaagctcatacgaagcttggattgagtgttttaaggataagctttcactcaagtttcaagtttgggttttgagccgagtttattttttttagtgattgagtacgagctatattccaacttatcttccttgatttcgttgttattcagattggatgtgcttagttagtcttcgatgatgtttttgctattattttttaccctttttattgccgaacagtgaactctttctgctgctcttccggctctttcggctcttccggctcttcctgctcatccgactcatcctaacatcaggcgccaaaggtggtttctgcttcgcaagttggctggctaaggtgaacaaccggcactcggaatgctccttcagcagactgttggcgaacttcttgactcccgatatcttggtcaccctcacgttgttcatattttccactttcttggcgggatagacctccacttcgcagcagttcttgatcagcagcaggtcgctgttgtttgtgatgggataccggtagtaaagttcatttccgcagtccaggcaattcttttttgtgcgtctcagctggaatttcatcgggaagcaccgacctactatggtgttattgtccaggataacagaatgtttgtatgtgggcttgggaaggggtcgcttggtccactgtgaaagaaaaatttaagtaaggaacttgtatccttgaattaccacagacctcattcagatgcaaataggttttgagtggccggcattgcgctgagcagagattagggtgcagattctgctcctgggccacgcacatggtgcagcatcgcagcttgtccttgtcggattcgagaagcggacgtcccttgctgcactccgcccggatgttgatctcctgacgcacaggtccatccggttcaatgaccgccttaacaacctccgcctggggctcaggcaagtctgctgcaggcggtgataccctgtaatcgatgcatggtccgcaggtggattcgaagcacttcttgcatggaccgtcaacccaatttttttttatccaccgcctacaactgttctccggagcggacattttgaaggccgtacaattttttagccgggaaacgagtaattttgaaatgacatggaataatctgataaattgaagctttactctaagctcgtttatttagcttaacaaataattacattttaattctactcggggtttgaatcgattgttttcatttcaacctccttgttttttaaactgtctttgggtgacgactcctcttcatcgaaaattttgagattctttgcgtgataccacactgcaatattcaagaaaccgcccaaaaatatgaaaaatgccgccgaaagatttaaagcatatctgaaaagaaaatgggattactaggaattttcagatttcagtctataagatgacgcacctcattgattttgtgtcatagagccaacagtttcccttgttggagcatgtcttgccccacaccaaacagtagttgtctatcagccagccgaagaaaatcggactgggaatgaagcccagcagagaagccgccatggaacccaatcccagggcgaaggtcttctcatctggaggcatgcaacgcagggctaggagcagattcgtcgatttactagatgctcccacgagtttaaggaagcacattacacccagaaagataaggaactcattgaagcagtcgactggacaggttccgtccacagcaaattgggactgaaagcatggaatcatatgcatttaaaaggaataaccaatggctagagtcccccacctctggttcagagttcaaacttgaagagcccaggcactcgcaacctgtgtaaatggtccttcccaatgcatccttcgtcctttccgaacatcccgcatggcaggcggagatgaaggtgatgttgtccgcactgcaaacgggagcatagtgcacgtagtcacagtgacaagaggcactgcagctgttcccggcagacagggtggtcagggtattcaacctgtcgctaccctcgcatccaattgccacatagcacaggattccggccaccgtcacaaagtccacaatggcgttccaggcagccattgccctggcactaggcttgtatttggagatcacgtatcccgagatgaggattcctgcggcagagaatcccagagccactgttcccgttgccatggttgccatggccgctgattgtctatactgggtttcgatgtacttgggagtgaatatccagtagaccatgtagccaaagaagtagagtatggatgccattgtgttgtagacatacaccttgtttttcgagagtttcttgactgtcttcatcatgtcggcaagggatcgctcattcagtggcagtgactgtttcctttcatcctgtttcagttgaaggcgtctcttcctggcactgggcagctgcttggggaacataaacagcagaatggcggagaccaaggtaattgcagccaggaccagccagcccagccaccaggcgcccaaccagcgtggatcttcctgcccaatcagtggctccaaggtgggctcaatgtataggcgcaggcagacagcagctagggagtaaccaatggctggacccagcatccttaggaaggtagacatgcctggtgaagtgataatgcttgggatacctcaaggaattcatactcgtacagtccttcacttactcagcatggcaggtgtcttggccttgctggtattgtcgtccatgtaggctatgcccagggtatagaacagagcctgacccactcccgagattagttgagcagcaaacagaaacacttggggcacccacagaccaacctcctcctgcacacatcctcctgcagttggttggcacaacttcttatcccgctcctgattcgtcaatgtttcgttaacctgtccaaattctcgggttagctggagtgcatcttctccagctccataaaggaaatgcagggagcttgtaagcagacaaaaggccacgatggtaagcaaccctaaatgggacactatatgtattgcaaatcaagtgacacagatctggactcacctatacccatccagcgaggtcgatgcctatggcccgcataataacccaggattgcggccgttagcatggtactgatatcgttaccaaccgaaataatgccggatacctttgttggtatcttatagcgcttctccaaggtcgttatagtcccgttaaagtacgcaaaggtcattgtcataacacagccagctagtccatatagaataacgtacatatgctcagtggcaaatctggagagagtgattcctaagcatgaaggtagttgtagagtaccttagagcttacctttgcatggaggggcccttgaatatccagaaaccgcaataagtgtcttttccaccatcttctccttccgtttcattctctggagcagattccctttctttatccgatattgcaaatggcttttcaataaagggcaaagtttcacttttctccaagtctacctttcctcgctcctctgtcatgtctcaacttttacctgcgaacaactcgaacacactgactcgctcttaatcaaatcgctcaacaatatacccaactgcatcgcatgggtaaacagccttagatcttatcaagtctgtcagattagacagtggggatcagacgagcgacatttatataccacacatggaaaatatactttaagaacatttaattgacgggattccttatcattctttcgtatctattttggaaacgtgcgaaattctcgctcaaacattttaccacctgcgggttacgtacccatatgtacatagataaaaagaaaaagaaaatttgtatgaaagcttttatttctttttagtaacaacatcatttggcttttccttcagctctatatcgtcgctctgtttggcctgcaccgttttttcgtcttcatcgaagactttcatgtccttcgcatgataccagaccccaatattccaaaagctgcccaggaaaatcagagaggcgcacacgaggttcatggtgtatctgaaggaaagatggccttaacttcttctacactttttcattagggatctactcacctgagagacttcgtatcgtatatccagcagttacccttggagctgcaggtctttccccatacaagacaatagctgtccagcatccaaccaaacacaatgggactgggaatgaaggccagcacggagtacaccatactgccgaaacctaaggagaaggttttgtccttcgagggaacgcatctcagggctaataacagattactcgatctcccagtggcgcccacgaacttaaggaagcacatgacggccaagaagataaggaactgtttgttgcagtccaccggacaggctccatccatggcgatctgagactgggatgccaaagacgtcacattagacagagagattatgctagaaacgttgcccatgcaccgacaacctgtgtatatagtctttcccagctcatttatggccttatcggtacaccccgcgtgg

SEQ ID NO: 6302 - DNA, 2552 bp, DROSOPHILA
acatgacagaggagcgaggaaaggtagacttggagaaaagtgaaactttgccctttattgaaaagccatttgcaatatcggataaagaaagggaatctgctccagagaatgaaacggaaggagaagatggtggaaaagacacttattgcggtttctggatattcaagggcccctccatgcaaagatttgccactgagcatatgtacgttattctatatggactagctggctgtgttatgacaatgacctttgcgtactttaacgggactataacgaccttggagaagcgctataagataccaacaaaggtatccggcattatttcggttggtaacgatatcagtaccatgctaacggccgcaatcctgggttattatgcgggccataggcatcgacctcgctggatgggtatagggttgcttaccatcgtggccttttgtctgcttacaagctccctgcatttcctttatggagctggagaagatgcactccagctaacccgagaatttggacaggttaacgaaacattgacgaatcaggagcgggataagaagttgtgccaaccaactgcaggaggatgtgtgcaggaggaggttggtctgtgggtgccccaagtgtttctgtttgctgctcaactaatctcgggagtgggtcaggctctgttctataccctgggcatagcctacatggacgacaataccagcaaggccaagacacctgccatgctgactgctgtctgcctgcgcctatacattgagcccaccttggagccactgattgggcaggaagatccacgctggttgggcgcctggtggctgggctggctggtcctggctgcaattaccttggtctccgccattctgctgtttatgttccccaagcagctgcccagtgccaggaagagacgccttcaactgaaacaggatgaaaggaaacagtcactgccactgaatgagcgatcccttgccgacatgatgaagacagtcaagaaactctcgaaaaacaaggtgtatgtctacaacacaatggcatccatactctacttctttggctacatggtctactggatattcactcccaagtacatcgaaacccagtatagacaatcagcggccatggcaaccatggcaacgggaacagtggctctgggattctctgccgcaggaatcctcatctcgggatacgtgatctccaaatacaagcctagtgccagggcaatggctgcctggaacgccattgtggactttgtgacggtggccggaatcctgtgctatgtggcaattggatgcgagggtagcgacaggttgaataccctgaccaccctgtctgccgggaacagctgcagtgcctcttgtcactgtgactacgtgcactatgctcccgtttgcagtgcggacaacatcaccttcatctccgcctgccatgcgggatgttcggaaaggacgaaggatgcattgggaaggaccatttacacaggttgcgagtgcctgggctcttcaagtttgaactctgaaccagagtcccaatttgctgtggacggaacctgtccagtcgactgcttcaatgagttccttatctttctgggtgtaatgtgcttccttaaactcgtgggagcatctagtaaatcgacgaatctgctcctagccctgcgttgcatgcctccagatgagaagaccttcgccctgggattgggttccatggcggcttctctgctgggcttcattcccagtccgattttcttcggctggctgatagacaactactgtttggtgtggggcaagacatgctccaacaagggaaactgttggctctatgacacaaaatcaatgagggtatcaccgcctgcagcagacttgcctgagccccaggcggaggttgttaaggcggtcattgaaccggatggacctgtgcgtcaggagatcaacatccgggcggagtgcagcaagggacgtccgcttctcgaatccgacaaggacaagctgcgatgctgcaccatgtgcgtggcccaggagcagaatctgcaccctaatctctgctcagcgcaatgccggccactcaaaacctatttgcatctgaatgagtggaccaagcgaccccttcccaagcccacatacaaacattctgttatcctggacaataacaccatagtaggtcggtgcttcccgatgaaattccagctgagacgcacaaaaaagaattgcctggactgcggaaatgaactttactaccggtatcccatcacaaacaacagcgacctgctgctgatcaagaactgctgcgaagtggaggtctatcccgccaagaaagtggaaaatatgaacaacgtgagggtgaccaagatatcgggagtcaagaagttcgccaacagtctgctgaaggagcattccgagtgccggttgttcaccttagccagccaacttgcgaagcagaaaccacctttggcgcctgatgttaggatgagtcggatgagcaggaagagccggaagagccgaaagagccggaagagcagcagaaagagttcactgttcggcaataaaaagggtaaaaaataa

SEQ ID NO: 6303 - protein, 849 aa, DROSOPHILA
MTEERGKVDLEKSETLPFIEKPFAISDKERESAPENETEGEDGGKDTYCGFWIFKGPSMQRFATEHMYVILYGLAGCVMTMTFAYFNGTITTLEKRYKIPTKVSGIISVGNDISTMLTAAILGYYAGHRHRPRWMGIGLLTIVAFCLLTSSLHFLYGAGEDALQLTREFGQVNETLTNQERDKKLCQPTAGGCVQEEVGLWVPQVFLFAAQLISGVGQALFYTLGIAYMDDNTSKAKTPAMLTAVCLRLYIEPTLEPLIGQEDPRWLGAWWLGWLVLAAITLVSAILLFMFPKQLPSARKRRLQLKQDERKQSLPLNERSLADMMKTVKKLSKNKVYVYNTMASILYFFGYMVYWIFTPKYIETQYRQSAAMATMATGTVALGFSAAGILISGYVISKYKPSARAMAAWNAIVDFVTVAGILCYVAIGCEGSDRLNTLTTLSAGNSCSASCHCDYVHYAPVCSADNITFISACHAGCSERTKDALGRTIYTGCECLGSSSLNSEPESQFAVDGTCPVDCFNEFLIFLGVMCFLKLVGASSKSTNLLLALRCMPPDEKTFALGLGSMAASLLGFIPSPIFFGWLIDNYCLVWGKTCSNKGNCWLYDTKSMRVSPPAADLPEPQAEVVKAVIEPDGPVRQEINIRAECSKGRPLLESDKDKLRCCTMCVAQEQNLHPNLCSAQCRPLKTYLHLNEWTKRPLPKPTYKHSVILDNNTIVGRCFPMKFQLRRTKKNCLDCGNELYYRYPITNNSDLLLIKNCCEVEVYPAKKVENMNNVRVTKISGVKKFANSLLKEHSECRLFTLASQLAKQKPPLAPDVRMSRMSRKSRKSRKSRKSSRKSSLFGNKKGKK

SEQ ID NO: 6304 - DNA, 3293 bp, DROSOPHILA
tatttctctttgtgtgccgagcgttgtggaaatacatttaaatacggaacaacgtgaggttaattgtgcggagcacacttgttaattagggaatgtcagcgggcgcgacagttggcgctcccctcaccccttcccaacccaccgaaatccgaaaataatgcttccaagccacgttttcattggattacgtaagctgtaaaccagtttatgatgttgttgttgttactgttgttgccagtgtgtgtcaaggaaaagctaaacacaattacaacgcccttctgtctggtaattaaaaacggaagccatgcccgaagccatagtaggctggctaacgagacctgcacatcggcccaaactggttggctttggctttaggccactttcgaggaaaatccgcccacgacgagccgaaaaccgcaaaacacgtccgccagtggaaatcgcatcgaaagttttgcggtttcgagccatttttccattaactcgaaattctagaagatcaattcaaatcaatgttcatgtgagattttccttatgaatacctgtatttttatataccgagatacgtatgtacaaacaatcttatcctacaatttcctgtttttgaggcagctttatcttataaaaactgttcgaaacaaaattataatttccatatacatatcttcaacgtgaggtttttgctcccttttttctgttcttaattttcctattggccaggcaatagtgcatttgcataaataaaacatttattggtagtaaaagttaaacaaatatgtacgtaattcccgaaacatttcaaatttgcataaataaacaaacgcgattggtaacagagagcggaaaaacaagttacagtaattaccgttgggagggggtgacgaaacaaaccaaaacaaaacgaattatgctcgtgtgagtgtgcgcgacgcaacaggttgaggctgcttggcgcagcttttgaccgatcagtttagttcagttagcattgtcaactgctcacgaacggttcgaaaagcggagcgcgcgtaaaatcattctgtaaatcattcaaaaggcggaaaactcaaggtgtgtgtgtgggttttgttttcaaattccgtgtgcttgtgtgtgtgagagagggcgagagcgacagtgtcgtagcaggcagtgttgtaaggtgccgaaacagcgatcccaaccggcacactagttgtcctgctcgcactccagtgaggcaaatgtcaaagtctggtcagtagcaaaacagaattgcagccaagaaaagcggaatcagcgacaaaattagccattagttgggttttacatatagattaggccagcgaaacgacataacgctccaagtggtaaagtgagacctgccagtggcggcacccaacccgaaaaagcctaaccagcgaccactttccagttatccaatggaggcggccaaggattttgcggtggccaagtaccaggacttatgtaacttcctggagcgggatacgcgcggcagtgagctggccatctatggcacctcggccatcatgctggccgtggcctatgccaaacggaagccggcctacctggtgcgccagtttaagcagccctcgcacatcccggagcgcctgatcaacgagcgcgtcatgcacacgggcaagatcgccggggtcaagcagcaggagcaggacaccctgctgatgatccagcaccggccgcttttcccgatcttcactagcagcaaacgcctgctgcccgtcaaactgccgggcgtgcgcgtcaatgccaacggctactcctggctgcagcagtgtctcattgggcgcgaggccacctttctgccccttaaatccgccaagggacaggactttgttgtctgccagctgtgcctggtccatccgccgaggggcaaccgcctgctggacgtctcggagaccctgctcaagctccgcttcgcccgattcgtgcaggatgccgccgccgcggttaagaagaacgggaagtactaccagcatctgaagaaggtggagcagaccacagcggaaaaggaggcctggctctcctgggccgccggctatccctacatctggcgccgctacaacgaactgaggcagcgctggttgcccaaggagaagctgctgccggagctagtgcgctgattgcgatctccccgttcctgcctcgatgctatttacagggctacctagctcgccaccattaacttagttccatggccagctactctctatatttttattatgcctgtttactagcttgtgcatttgtgtcttagtgttgcttgctatctattgttatacgattggcaaatatcatatacgatataagacagcatttgtttacaaaccctcgagcacaagtacacaagtcagtctcaaaagcttattagtaaggggaatagctagcgcgacttgcccaacgcgactttcgatgcccaggcggtacgtgatcgtgtgctaatttccacacccagtagagccaagaacgtcagcattttttaaatattcaaataagcgaaatgtttttaccacggatgacatcagtgcgtgtgcctgtgtgtgtacgtgtgcgtgtttcccaaataaaatgccgaaatacctaacttttcacgcttgtatctgaatttcttaattccattccatttttttcgtctcccgaacgatcagttgcagttcttcatccatctccaccagcaatctctggcaaaactcaggcaaaatgagctgcggaatctccatggttaaatatatcctatttatatttaatttgctctgttcggtgagtagcatagatacatttaagattacataatttcgagcggccaagcttagatcgacttctcagccttttaggctggcagtgagatcataactttcgtgcggaataaactggttttcccaaaattggtgttttcagtattgaaaggctgagaaagtcgaggcccacaaaagtggtgagcatgagtacattttaaagccacagaaggcactctcgttaaatgcatttttgtatttttgtgttctttaggtcggctttcatatttacatatcatgaaattaaacatatctcaattaatgtttattaaggacccttaaagtaggatctattatagcatttatggtgtctcttttccggtcagcactatcactttccggttacgaaacgcactgtacgtgcaaagtgggggcagagcttgagatcatcatcagtattccaaaaccagttattaaaattgggctacgtttgtgacgtagcggtatccgaaaaattctgtataattttgtgtacactac

SEQ ID NO: 6305 - DNA, 1228 bp, DROSOPHILA
cacgaacggttcgaaaagcggagcgcgcgtaaaatcattctgtaaatcattcaaaaggcggaaaactcaaggtgtgtgtgtgggttttgttttcaaattccgtgtgcttgtgtgtgtgagagagggcgagagcgacagtgtcgtagcaggcagtgttgtaaggtgccgaaacagcgatcccaaccggcacactagttgtcctgctcgcactccagtgaggcaaatgtcaaagtctggtcagtagcaaaacagaattgcagccaagaaaagcggaatcagcgacaaaattagccattagttgggttttacatatagattaggccagcgaaacgacataacgctccaagtgttatccaatggaggcggccaaggattttgcggtggccaagtaccaggacttatgtaacttcctggagcgggatacgcgcggcagtgagctggccatctatggcacctcggccatcatgctggccgtggcctatgccaaacggaagccggcctacctggtgcgccagtttaagcagccctcgcacatcccggagcgcctgatcaacgagcgcgtcatgcacacgggcaagatcgccggggtcaagcagcaggagcaggacaccctgctgatgatccagcaccggccgcttttcccgatcttcactagcagcaaacgcctgctgcccgtcaaactgccgggcgtgcgcgtcaatgccaacggctactcctggctgcagcagtgtctcattgggcgcgaggccacctttctgccccttaaatccgccaagggacaggactttgttgtctgccagctgtgcctggtccatccgccgaggggcaaccgcctgctggacgtctcggagaccctgctcaagctccgcttcgcccgattcgtgcaggatgccgccgccgcggttaagaagaacgggaagtactaccagcatctgaagaaggtggagcagaccacagcggaaaaggaggcctggctctcctgggccgccggctatccctacatctggcgccgctacaacgaactgaggcagcgctggttgcccaaggagaagctgctgccggagctagtgcgctgattgcgatctccccgttcctgcctcgatgctatttacagggctacctagctcgccaccattaacttagttccatggccagctactctctatatttttattatgcctgtttactagcttgtgcatttgtgtcttagtgttgcttgctatctatt

SEQ ID NO: 6306 - protein, 239 aa, DROSOPHILA
MEAAKDFAVAKYQDLCNFLERDTRGSELAIYGTSAIMLAVAYAKRKPAYLVRQFKQPSHIPERLINERVMHTGKIAGVKQQEQDTLLMIQHRPLFPIFTSSKRLLPVKLPGVRVNANGYSWLQQCLIGREATFLPLKSAKGQDFVVCQLCLVHPPRGNRLLDVSETLLKLRFARFVQDAAAAVKKNGKYYQHLKKVEQTTAEKEAWLSWAAGYPYIWRRYNELRQRWLPKEKLLPELVR

SEQ ID NO: 6307 - DNA, 8777 bp, DROSOPHILA
agcatgcttcttttctatgcgcatatacatataacacctagttaacacctatcttcaggtagctaaattaatatcatatgttgagtgtgtaaaatcaggacattttccgaagttttcgccgtctttttccaacatagtattcgcgtaacccaattatcggtaatcggaagaagcacgtgtgccaccacctccctcatcatcttgctaaagcaacaacaacagccgctagcccatgccgttcgttcccgggaaatgtctggaagtaaacagcggccagggctcacacacggacccacacactcgcaagcatgcatgtggcggtgatgctaagttggaatcggggttattttgtgatctgatcgcagtgcattgcgttcttctgtgtggcagccgaacttcagtgcaactaggagatgagttcgtcgtggaactgaatcacctggaattttggcaactgagcgcagtcagcaaaagtgcggaaatcaaagcaaaaatgtgttgatgctgctcttcttagcgcatcacatcgcgtgctcgtttgtttgtgtgatggtgcggcaaaatgcgctaagccaacaacttaaatcgtgaacataacgattctctgacagaaaggctgcttccaaaaagtgcgtagtaattataattataataagggatttagtcacgtattttgctgtaaaagtgcaaattgtgttgcatgtaaagtaaattttaatccgtgtatgtatctgctgttttcggcaaagtgtcccacaatttgcagacatagaattggtctcactcttaaaatgaaaccccttatagtccttatgaataaatcgatgttttttgtgtacattcgtcatagatttgtagtgttgtatgggcggcgatcttgttgtattttccggccagtgttggtaaacccacaataatttacagttcagttagcaatcctggttcttgaggttaacgtttccacattgcattaaaattctttatttcggtttcctcacagcatgacttacgaactgcctccaatcatactaaaaggcaaagaactgataaaataccgtcacatcaagcgaaaatatcctgtgtccaaggactttctgcatagcaactggtggaatgtcgagaggttcatagtgtacgctctcagtccccgttgcgtcatcagaaactatgcctggcgccggcggcgcactcgcagcgtctgcatcatacggcgagtccgcatactgctttttgatccacgtctcaagcggatgatcaaacgccgcctgcagaacgtgcgccattggtccaagggtctagtaaattactacaagaagatgggcagaatcgaagagcacgaagagacggaggtgtaccgcgtagcagaacctctggcagccgaggagctgtccaagcagatgaagcagcaactggagctgcttaaaacgggcaagagaagtctgtcgcttattgaagaaacgactgccattgcggaggtgccgcctaagaagcctaagcagtttcctgatatcaccgaggaagccagggtcattaatgatagcgatgatcgcctggatgcagcaccctccaagcaggctgcagaacggacacccaccaagtcgcctgcacaagtcgccgcctcagaggatgttccaaccccggccacgcccagcaaggagcaaagtggccagaccagcacttgctccagtgccgagaagacggacaaagtggaaaaggtaggcggcggcagtaagttcctggacatgctcatcagtaaggtgcgcgttaagaacttcgcgcgggagaacaacatgcccgctgaacctagtgcggtcacattttgcacatccgaggacgaaggcagcgcagacttcgtgggctttgacgagagcgttcatcagccgggcatgctgctcacgccgctggtgcctaacaattgcaagaccacggagggaaactccgccttcgtcagcgagtcactggatgcatacatgcgggagcaccatatcaatgactcggattcgcaggacgataaggacaagttgcttgagcccatgggacacgatggccaggttacttcgcacagcatgccgccgccgatggacatgccagcagttccagaggcactgcagcggttgagaacggtagcggagaggcgtcagtacttgcagcgttgcaagaaccacaagatgggcatcatcaacaacgaagccaatgtatacagagagctgcagcggaagcagcgccagcgaaaagtcaaaataggcgccatgcaagcgcttcaggcatccgactcccaaatgccttttacccgccagggctggcaggcagccagttatgtggccaccgagcactccaaatactactatcaggtgggtttttgaaagacacttttcgttggactttcgttaacctacttcatgttttccaggtaatacaagtggatggggagatggttcgcctgccgggcgcccagggcaataatttgaagcgcgagaaatctccttacctaagtagactcagtcgcaaggagcaggaggaactgaagtgcagcgagcagtgcttggatgcccgtattcagcaggaactaaaagtaattcccacaagagtgagccctccaaggaaccccaagattctcaaccagtatccgctgcccgccatcttccgcccctgcccgttgtccaagaaaccgctgcagaggccgttggacgatgacacggccgcgttgctcctcgcaggtggcagcatggccgtggtaagcatgccaaatgtagagcttgatgtaatgccgcagctgggtcgcccactggacgaaatagccaagcggtacctgcagcacatactgccccatcatgacataacgcgggagtgggccgagtttagtgtatctacgctacaggcgccgcccgccacaatgaaggatgcagaggagcaggcttcccaaacaccagctggtcgtcggaagagcttcaccttcgttattccctatctcaacgaccggaatcacattctcgtacgccgcgtagtggatcggtccgagcacctagacagaagttttaaagaggagcccaataagctgcaagagttcactttccgagaaatgcttccacctcagccggatgccgagattgtggcctgcgcggaaatgatcagcgatatgatcaacactgtagccatcagctgcagcgagaacagtttcataagcgaagacccggatgcgttggatgctagttcggtacccaagtcctccgatctgtgtcccgcaaaggaagagactggcaaggacacggataagtcaggcgccaagccaaagaacctgcccaacaagcaaaagcgtctggccaacgaactgaggcgattaaatgccaccatcatagacgctgctgctagaaaggcagatggtaagttgtcttgttactacctgatataagatattaaatatagattatttccttctctagctaacaaaccttgcagtaaagattactgtcatctgggctgcatatgcgccagcttggcaggtacggagctacctgtgcgggatcactgcggcagggcagagtgtgttctggattgccgttgcctgagtgcagaggagagtcgcgtcatgcgcttggaagctgcagatgtaatactctctttacaccagattttatgtgactataaagtaatcccccgtatttttacacagggacgcggaatttccaacgaagatgccttcaacttgcgtcgtaaggccacggcacgactggccaagatggagaaggactttacctccacactggtgctcaccgacaacgagacgctgctgatcaatgagtcgcagggcgacaagaagcgacgctgcacaaaggcgccgaagcgctatgaagatttcgatgactctatttacgatgaggaggaaaaggatgtggtatcgcctacaactagaaagcaaaagaagcacgccgctgctgctgcggccgccgcagcagccgctgctgcagccgctgcagctagtgcaaagatatcggctcctgctctaagcgaaccgtgctttgtaaaggacacggacctggccaagctgaagcattgctttgtaggactacgacggctgtcgaatgtagagaatttggccacgttctgcatgacccaccagctatataagtgcttctgtggcggtgactctccagatggcaagcctgtggttatcgagaaggatcagtggaacgcaccagtgacgcactttaatccagatctggccgtcagggcgcactacagcttcgagcgtccgccggaggagacttcaacaaagaagaaaggaaaggaaaagaagcccaaacataagctggagtcaaaatcgagcaatgacgttgctgatcaaaaaccacagactcaagcagtggagacccttccgctcaagactgaatccaaacaagaaccgccaccagctaattccctgttcaaagatgagtcccctctcaaaaggtccaatgagttgaataagatattcaactacttccgttcgcgtccagatgtctgccggcgagctatttccattcccaagaactcttaccagcgcctaaaccaaagacgggcagatcgagtgcgtcaccaaatagctcgcgaggagagtttaaaaacgaatgagatgcttaagatgcgcattcagggtgcggtagtctactatcgcaaggaaatcgatcggcaacgaaagcgagagctgagcaaaaagcctgtgatagaagtgcggaatgaatccgatgcaagtgatgctagcgtgcgtcaaaagaagattgaaacacccgccgaggggccgactcctggcaagcgcattaaactgaaagcggatgagcccccagcccaagagaagaaggcccatatgctggacattcaggtgcctcgcatcgccgcgtgttattcccttaataccgcttcggtggatgttcttgcacctgatatggcaaaggaagcaactacatctgctgctgccacgggatcgacacatggttccaccgatacgaattccgccaatgtctgcaccttctacaacgatgtggtcaagaacatgaacaccctggttagcaaaaagatgcaggatattgatctggcgcttcagcgtgagagcaaaataatcccgtcgcccaacgaagagattctttgcatcatcaagtggacgaattttcttgctgcctttgaatctggtttcgtatttatttgggacgttcaaatgaaaactcacaactttctggcggctaccacgaccaatttgatgccctctgtgtgcggcgcaattgcagttgtaaacaccaagttcgccccggatccccaggcactgcccttgatggctcgaatgctaatgaattccatgcggaatgaaaagaccaaccgtcttgccgttgtgatgcagggcaggcagagtttctggctagtcaagggctttctgcgacatatgcaaggcaatgcctgcacaaagcccacgcccatgactcatccgctgctcaccaagaagatcaatgtgctgtgctcgctgctggtgaagcagcgcgtgcgggaaaacgagaagaagacgctgggtgacggcagcggtgcaccctatgaagtcttggcaggagatgtttcgcctcaaacctcgctactaatgaagaaccgctcacgggatctcaaacgaaagtctcaggccgatgaaaggctgctacccagtgggccttcaatgacaaagtcttccaaaccatcggctggaggttatcctatagctgcgtcagtggcaacgtctacaacgtcagcttttgcttcaagctccggaaaatctactcctgtttgcactgccaagaccaactccgcctctactaaaaacaaaagcagcgccaccggaatccgtagcaatatcgagttcagaaaggttaaccacaatgatgtcgatgaattgcaaatacccgagctgcatcagaccgaccaccgctgggtggtgctcgacatctttgatgacttttctcacatcttcgtgccctcctttagtgatatgatctcgctgaccaggattcacagcgtaatgcaggtggccgaggagaggcagaaggtggtgaagcttcagttctttcccaatgcgccgtacgatgccttcgtgacgccgtcgtccaagaagaagatctactttggaccgctgagtctggacatgccgccgccggtcctggtgctactacaaagtgtcgataggaagatgatgttgcgcgaggtctaccagcgcgagcactccattcctgtacaacgccatcgccgaagcatggctttctgggtgctgcagattaacggacaagtgcactttgagatcgataccgagtcgacggctaagctggcagcgcaacagaaaaatgccattggaactcctcccggtctaaatgtgttgaaaattccgtcgcagctgtccgtggaaatagaaaagaatcaagatgaggtgccaccggtggtggtaatcgatagtgatgaggaagatgatgacggagagaggcaattggtaatcgacgagcaggatgatgagcaggcagagacggacgttaagcaggaagtggagcgcacaggcttcaccattcaaactttgccttccagtggcgccctgcaaataacgatctcagattcagcagagacatcctcacatcctgccaaagatgttaacacctgccacttcagtggtggcttcatgccgttcattgcaaacgtgcccgcaaagtttggggaaacggctcccaccacccaattcctgacaccccaggtccaggtaaccacatctcaaagtggtccggaaacactcacgtccagttcctcttcgcacttgccagcatccaaaagtgcataccccaaaatcaacgagtcattgcaggagttattcagcagtggagtccctcctggaggcatcacgatcaccaaagttgacagccaagagaaaacattgccaaacgaaaccgtccaggttgtcaagaacaagaagagcatcgctattaccgggatacataaacaagtaaccaaggcggcgtcatcaacggccacagttacggcagcccgagcgccggtagtcaaaccacaatcgacttcggtttcgaaagtagcacctcctataagacccggtgcaacaacacaaccgaaaactttggttaggctttatccaaaaccagcactcgctgccggacggaaatcactgcctgcaaacgccaagaccccagtagcgacgccacgacaatcccagccagtggcctgtgataagccgccattagtatctggctccacattgcccgcgttggttgagccatccgctcgaaagtctctgccctcgaagcctctagctgctggggagcacctgcgcccacgacaatctctaccagcaaaggtgaccgctaatcctcctgcagctgctcgtccggatgcggcttcaacttcggcccaaaatctcaccaacgtatctaaagctcagttggcaaaagaggagatctgctacggcatcatggtcgccaaggacttgccacgtttccgcgccaaggtggagggctctgacttcatgatcaagatacctgagcatggcgtgtttcgcttcaaaacattcggattagccgctagttttctcagtcggtgagtgtgcgcagcgtccttctaagaaacggaagcttattaatgaatccgtcgatttacttgcaggcatgtggcgaaggatcctaaattgaagcagtttttgcctgccgagtggaagttccatcccttggagcagttcaataaacaggtgccatctaggagtcagcagtcccctgctgccatcgtaatcgaagattgagctgatttttcatctcatttcttggatacggttacatattaaatatgtaatctgtttagttatatctagaaatagacttgtctgttattatgattttcagccatgcgaaatggcattctattaagttgtgtatcataaaaaattactatctttaatgatgtatagcattatttcattatcacgccgcatgagtttaagtcttcgtaagctttagctaaaaactattacatttaaatacatgaaagcaacatacatttacggttattattacattttggtgggagaaaaaatgaagaaagcgcatttcaaatttgccgctcttgccagctgattgcccgtttcatttcccaaccgtttcgcatgcgaacagctgcttggcatgttacacgggcagtgaggaaaaagtcgtttaaactaaatccattgttgtttacacagcgctttaactaaattttggacacagtctatatcaataaaagcttgtcacggcggagcttcgatagccagctgataactgcgagtgctgcaacaagaccaacaaagttggcaaaatactcctccaaggtcagccttagatatagagccaacagcacaggtgatcggcataaatcgcttgcctaaacaatttgcaaatatcgttggtatcgatcgcggtgatctattcgcacagagtgcagacactctgtcactgtgatcaggggaagacctctcagctgctggacgagaagactgctcaaaatgggctttgacgagaagcgtgagcccaccggcggcagactgcgactgcaggacattccggccctcacccaggaccactgccgcatgcgggatccggcggaggtggagcgcatcatcaacgagttcgtcatcggcggaccagagcgcatgcaaatcgtctccgacttcgactacaccatcaccaagcagcgcacggaggatggaggagcagtgccctccagtttcgggatcttcaacgcctgccagtcgctgccggaaaact

SEQ ID NO: 6308 - DNA, 6529 bp, DROSOPHILA
catgacttacgaactgcctccaatcatactaaaaggcaaagaactgataaaataccgtcacatcaagcgaaaatatcctgtgtccaaggactttctgcatagcaactggtggaatgtcgagaggttcatagtgtacgctctcagtccccgttgcgtcatcagaaactatgcctggcgccggcggcgcactcgcagcgtctgcatcatacggcgagtccgcatactgctttttgatccacgtctcaagcggatgatcaaacgccgcctgcagaacgtgcgccattggtccaagggtctagtaaattactacaagaagatgggcagaatcgaagagcacgaagagacggaggtgtaccgcgtagcagaacctctggcagccgaggagctgtccaagcagatgaagcagcaactggagctgcttaaaacgggcaagagaagtctgtcgcttattgaagaaacgactgccattgcggaggtgccgcctaagaagcctaagcagtttcctgatatcaccgaggaagccagggtcattaatgatagcgatgatcgcctggatgcagcaccctccaagcaggctgcagaacggacacccaccaagtcgcctgcacaagtcgccgcctcagaggatgttccaaccccggccacgcccagcaaggagcaaagtggccagaccagcacttgctccagtgccgagaagacggacaaagtggaaaaggtaggcggcggcagtaagttcctggacatgctcatcagtaaggtgcgcgttaagaacttcgcgcgggagaacaacatgcccgctgaacctagtgcggtcacattttgcacatccgaggacgaaggcagcgcagacttcgtgggctttgacgagagcgttcatcagccgggcatgctgctcacgccgctggtgcctaacaattgcaagaccacggagggaaactccgccttcgtcagcgagtcactggatgcatacatgcgggagcaccatatcaatgactcggattcgcaggacgataaggacaagttgcttgagcccatgggacacgatggccaggttacttcgcacagcatgccgccgccgatggacatgccagcagttccagaggcactgcagcggttgagaacggtagcggagaggcgtcagtacttgcagcgttgcaagaaccacaagatgggcatcatcaacaacgaagccaatgtatacagagagctgcagcggaagcagcgccagcgaaaagtcaaaataggcgccatgcaagcgcttcaggcatccgactcccaaatgccttttacccgccagggctggcaggcagccagttatgtggccaccgagcactccaaatactactatcaggtaatacaagtggatggggagatggttcgcctgccgggcgcccagggcaataatttgaagcgcgagaaatctccttacctaagtagactcagtcgcaaggagcaggaggaactgaagtgcagcgagcagtgcttggatgcccgtattcagcaggaactaaaagtaattcccacaagagtgagccctccaaggaaccccaagattctcaaccagtatccgctgcccgccatcttccgcccctgcccgttgtccaagaaaccgctgcagaggccgttggacgatgacacggccgcgttgctcctcgcaggtggcagcatggccgtggtaagcatgccaaatgtagagcttgatgtaatgccgcagctgggtcgcccactggacgaaatagccaagcggtacctgcagcacatactgccccatcatgacataacgcgggagtgggccgagtttagtgtatctacgctacaggcgccgcccgccacaatgaaggatgcagaggagcaggcttcccaaacaccagctggtcgtcggaagagcttcaccttcgttattccctatctcaacgaccggaatcacattctcgtacgccgcgtagtggatcggtccgagcacctagacagaagttttaaagaggagcccaataagctgcaagagttcactttccgagaaatgcttccacctcagccggatgccgagattgtggcctgcgcggaaatgatcagcgatatgatcaacactgtagccatcagctgcagcgagaacagtttcataagcgaagacccggatgcgttggatgctagttcggtacccaagtcctccgatctgtgtcccgcaaaggaagagactggcaaggacacggataagtcaggcgccaagccaaagaacctgcccaacaagcaaaagcgtctggccaacgaactgaggcgattaaatgccaccatcatagacgctgctgctagaaaggcagatgctaacaaaccttgcagtaaagattactgtcatctgggctgcatatgcgccagcttggcaggtacggagctacctgtgcgggatcactgcggcagggcagagtgtgttctggattgccgttgcctgagtgcagaggagagtcgcgtcatgcgcttggaagctgcagatggacgcggaatttccaacgaagatgccttcaacttgcgtcgtaaggccacggcacgactggccaagatggagaaggactttacctccacactggtgctcaccgacaacgagacgctgctgatcaatgagtcgcagggcgacaagaagcgacgctgcacaaaggcgccgaagcgctatgaagatttcgatgactctatttacgatgaggaggaaaaggatgtggtatcgcctacaactagaaagcaaaagaagcacgccgctgctgctgcggccgccgcagcagccgctgctgcagccgctgcagctagtgcaaagatatcggctcctgctctaagcgaaccgtgctttgtaaaggacacggacctggccaagctgaagcattgctttgtaggactacgacggctgtcgaatgtagagaatttggccacgttctgcatgacccaccagctatataagtgcttctgtggcggtgactctccagatggcaagcctgtggttatcgagaaggatcagtggaacgcaccagtgacgcactttaatccagatctggccgtcagggcgcactacagcttcgagcgtccgccggaggagacttcaacaaagaagaaaggaaaggaaaagaagcccaaacataagctggagtcaaaatcgagcaatgacgttgctgatcaaaaaccacagactcaagcagtggagacccttccgctcaagactgaatccaaacaagaaccgccaccagctaattccctgttcaaagatgagtcccctctcaaaaggtccaatgagttgaataagatattcaactacttccgttcgcgtccagatgtctgccggcgagctatttccattcccaagaactcttaccagcgcctaaaccaaagacgggcagatcgagtgcgtcaccaaatagctcgcgaggagagtttaaaaacgaatgagatgcttaagatgcgcattcagggtgcggtagtctactatcgcaaggaaatcgatcggcaacgaaagcgagagctgagcaaaaagcctgtgatagaagtgcggaatgaatccgatgcaagtgatgctagcgtgcgtcaaaagaagattgaaacacccgccgaggggccgactcctggcaagcgcattaaactgaaagcggatgagcccccagcccaagagaagaaggcccatatgctggacattcaggtgcctcgcatcgccgcgtgttattcccttaataccgcttcggtggatgttcttgcacctgatatggcaaaggaagcaactacatctgctgctgccacgggatcgacacatggttccaccgatacgaattccgccaatgtctgcaccttctacaacgatgtggtcaagaacatgaacaccctggttagcaaaaagatgcaggatattgatctggcgcttcagcgtgagagcaaaataatcccgtcgcccaacgaagagattctttgcatcatcaagtggacgaattttcttgctgcctttgaatctggtttcgtatttatttgggacgttcaaatgaaaactcacaactttctggcggctaccacgaccaatttgatgccctctgtgtgcggcgcaattgcagttgtaaacaccaagttcgccccggatccccaggcactgcccttgatggctcgaatgctaatgaattccatgcggaatgaaaagaccaaccgtcttgccgttgtgatgcagggcaggcagagtttctggctagtcaagggctttctgcgacatatgcaaggcaatgcctgcacaaagcccacgcccatgactcatccgctgctcaccaagaagatcaatgtgctgtgctcgctgctggtgaagcagcgcgtgcgggaaaacgagaagaagacgctgggtgacggcagcggtgcaccctatgaagtcttggcaggagatgtttcgcctcaaacctcgctactaatgaagaaccgctcacgggatctcaaacgaaagtctcaggccgatgaaaggctgctacccagtgggccttcaatgacaaagtcttccaaaccatcggctggaggttatcctatagctgcgtcagtggcaacgtctacaacgtcagcttttgcttcaagctccggaaaatctactcctgtttgcactgccaagaccaactccgcctctactaaaaacaaaagcagcgccaccggaatccgtagcaatatcgagttcagaaaggttaaccacaatgatgtcgatgaattgcaaatacccgagctgcatcagaccgaccaccgctgggtggtgctcgacatctttgatgacttttctcacatcttcgtgccctcctttagtgatatgatctcgctgaccaggattcacagcgtaatgcaggtggccgaggagaggcagaaggtggtgaagcttcagttctttcccaatgcgccgtacgatgccttcgtgacgccgtcgtccaagaagaagatctactttggaccgctgagtctggacatgccgccgccggtcctggtgctactacaaagtgtcgataggaagatgatgttgcgcgaggtctaccagcgcgagcactccattcctgtacaacgccatcgccgaagcatggctttctgggtgctgcagattaacggacaagtgcactttgagatcgataccgagtcgacggctaagctggcagcgcaacagaaaaatgccattggaactcctcccggtctaaatgtgttgaaaattccgtcgcagctgtccgtggaaatagaaaagaatcaagatgaggtgccaccggtggtggtaatcgatagtgatgaggaagatgatgacggagagaggcaattggtaatcgacgagcaggatgatgagcaggcagagacggacgttaagcaggaagtggagcgcacaggcttcaccattcaaactttgccttccagtggcgccctgcaaataacgatctcagattcagcagagacatcctcacatcctgccaaagatgttaacacctgccacttcagtggtggcttcatgccgttcattgcaaacgtgcccgcaaagtttggggaaacggctcccaccacccaattcctgacaccccaggtccaggtaaccacatctcaaagtggtccggaaacactcacgtccagttcctcttcgcacttgccagcatccaaaagtgcataccccaaaatcaacgagtcattgcaggagttattcagcagtggagtccctcctggaggcatcacgatcaccaaagttgacagccaagagaaaacattgccaaacgaaaccgtccaggttgtcaagaacaagaagagcatcgctattaccgggatacataaacaagtaaccaaggcggcgtcatcaacggccacagttacggcagcccgagcgccggtagtcaaaccacaatcgacttcggtttcgaaagtagcacctcctataagacccggtgcaacaacacaaccgaaaactttggttaggctttatccaaaaccagcactcgctgccggacggaaatcactgcctgcaaacgccaagaccccagtagcgacgccacgacaatcccagccagtggcctgtgataagccgccattagtatctggctccacattgcccgcgttggttgagccatccgctcgaaagtctctgccctcgaagcctctagctgctggggagcacctgcgcccacgacaatctctaccagcaaaggtgaccgctaatcctcctgcagctgctcgtccggatgcggcttcaacttcggcccaaaatctcaccaacgtatctaaagctcagttggcaaaagaggagatctgctacggcatcatggtcgccaaggacttgccacgtttccgcgccaaggtggagggctctgacttcatgatcaagatacctgagcatggcgtgtttcgcttcaaaacattcggattagccgctagttttctcagtcggcatgtggcgaaggatcctaaattgaagcagtttttgcctgccgagtggaagttccatcccttggagcagttcaataaacaggtgccatctaggagtcagcagtcccctgctgccatcgtaatcgaagattga

SEQ ID NO: 6309 - protein, 2175 aa, DROSOPHILA
MTYELPPIILKGKELIKYRHIKRKYPVSKDFLHSNWWNVERFIVYALSPRCVIRNYAWRRRRTRSVCIIRRVRILLFDPRLKRMIKRRLQNVRHWSKGLVNYYKKMGRIEEHEETEVYRVAEPLAAEELSKQMKQQLELLKTGKRSLSLIEETTAIAEVPPKKPKQFPDITEEARVINDSDDRLDAAPSKQAAERTPTKSPAQVAASEDVPTPATPSKEQSGQTSTCSSAEKTDKVEKVGGGSKFLDMLISKVRVKNFARENNMPAEPSAVTFCTSEDEGSADFVGFDESVHQPGMLLTPLVPNNCKTTEGNSAFVSESLDAYMREHHINDSDSQDDKDKLLEPMGHDGQVTSHSMPPPMDMPAVPEALQRLRTVAERRQYLQRCKNHKMGIINNEANVYRELQRKQRQRKVKIGAMQALQASDSQMPFTRQGWQAASYVATEHSKYYYQVIQVDGEMVRLPGAQGNNLKREKSPYLSRLSRKEQEELKCSEQCLDARIQQELKVIPTRVSPPRNPKILNQYPLPAIFRPCPLSKKPLQRPLDDDTAALLLAGGSMAVVSMPNVELDVMPQLGRPLDEIAKRYLQHILPHHDITREWAEFSVSTLQAPPATMKDAEEQASQTPAGRRKSFTFVIPYLNDRNHILVRRVVDRSEHLDRSFKEEPNKLQEFTFREMLPPQPDAEIVACAEMISDMINTVAISCSENSFISEDPDALDASSVPKSSDLCPAKEETGKDTDKSGAKPKNLPNKQKRLANELRRLNATIIDAAARKADANKPCSKDYCHLGCICASLAGTELPVRDHCGRAECVLDCRCLSAEESRVMRLEAADGRGISNEDAFNLRRKATARLAKMEKDFTSTLVLTDNETLLINESQGDKKRRCTKAPKRYEDFDDSIYDEEEKDVVSPTTRKQKKHAAAAAAAAAAAAAAAAASAKISAPALSEPCFVKDTDLAKLKHCFVGLRRLSNVENLATFCMTHQLYKCFCGGDSPDGKPVVIEKDQWNAPVTHFNPDLAVRAHYSFERPPEETSTKKKGKEKKPKHKLESKSSNDVADQKPQTQAVETLPLKTESKQEPPPANSLFKDESPLKRSNELNKIFNYFRSRPDVCRRAISIPKNSYQRLNQRRADRVRHQIAREESLKTNEMLKMRIQGAVVYYRKEIDRQRKRELSKKPVIEVRNESDASDASVRQKKIETPAEGPTPGKRIKLKADEPPAQEKKAHMLDIQVPRIAACYSLNTASVDVLAPDMAKEATTSAAATGSTHGSTDTNSANVCTFYNDVVKNMNTLVSKKMQDIDLALQRESKIIPSPNEEILCIIKWTNFLAAFESGFVFIWDVQMKTHNFLAATTTNLMPSVCGAIAVVNTKFAPDPQALPLMARMLMNSMRNEKTNRLAVVMQGRQSFWLVKGFLRHMQGNACTKPTPMTHPLLTKKINVLCSLLVKQRVRENEKKTLGDGSGAPYEVLAGDVSPQTSLLMKNRSRDLKRKSQADERLLPSGPSMTKSSKPSAGGYPIAASVATSTTSAFASSSGKSTPVCTAKTNSASTKNKSSATGIRSNIEFRKVNHNDVDELQIPELHQTDHRWVVLDIFDDFSHIFVPSFSDMISLTRIHSVMQVAEERQKVVKLQFFPNAPYDAFVTPSSKKKIYFGPLSLDMPPPVLVLLQSVDRKMMLREVYQREHSIPVQRHRRSMAFWVLQINGQVHFEIDTESTAKLAAQQKNAIGTPPGLNVLKIPSQLSVEIEKNQDEVPPVVVIDSDEEDDDGERQLVIDEQDDEQAETDVKQEVERTGFTIQTLPSSGALQITISDSAETSSHPAKDVNTCHFSGGFMPFIANVPAKFGETAPTTQFLTPQVQVTTSQSGPETLTSSSSSHLPASKSAYPKINESLQELFSSGVPPGGITITKVDSQEKTLPNETVQVVKNKKSIAITGIHKQVTKAASSTATVTAARAPVVKPQSTSVSKVAPPIRPGATTQPKTLVRLYPKPALAAGRKSLPANAKTPVATPRQSQPVACDKPPLVSGSTLPALVEPSARKSLPSKPLAAGEHLRPRQSLPAKVTANPPAAARPDAASTSAQNLTNVSKAQLAKEEICYGIMVAKDLPRFRAKVEGSDFMIKIPEHGVFRFKTFGLAASFLSRHVAKDPKLKQFLPAEWKFHPLEQFNKQVPSRSQQSPAAIVIED

SEQ ID NO: 6310 - DNA, 4315 bp, DROSOPHILA
catgtcgactatttagccattagtctcaatacggctgtctttaaattcaaattccaattgaaagcaactatttaatcaatcgcgttcacttgtttgaaaagtaaaatcctgccacagacttcaccagacacgcgtatcttagccccacgcctttttccatttaaccaaggccattggtttggcgagggcggcttgcagacaaaataaaatgcaagttaaatgcgtttcatagaccgtctgttgcggtcttagaaaccttttgcattctttttttatttgcccgttcattcaaggtttttctatggatatttcaacagtttgtttgtggcggcgatggaaatagtgctcacaatatatttacgatattcggaatcagcttgccagctcacccacctcaagcctatgattttcgtcccaaagcataacttcaaatcaagcgcatattaaataaacaatcataatggagtaccgactgagcccactcggaattttataaatcccaaatccttcaggaagggatactaaaccgaattctgttcggttttctggaggcggagctaaagaaattacagtcatgctatggagtctctctcgtttctggttcgacggcactgctctcgctcacactttcaggctgagcagctgatccgctctaaccaccggtaccgatcgcagcctctcgctcttgcatcgcctggctgccggcctgcaattccaccctcgcgcccgcactgcttcttcactgaacaaaactagtttcttggctctgagaatctcacggattcgttttagtcttgcggctgaccgtttcaaaatcagtttcgagctgtcaagcaaccgagcagcatcatcattcactgcgcactcgcaacagcagatacacactccaaaaataatttagaattcctaacagtcgggcctcgcgaagattaatttgaaacgtataagtaaaagtgttaacaaaactccgaagaactctcaaaaggattaccgcaaggaaatggctgtttcggctctcaacatgacaccctactttggcggatatccctttcaaggtaagcaccgacagatagatacaagatcacaacgaccattaccaattaccacaattactggtacaaaacgccagattcagacgcagaaaagtgctggctcatcatttggggcagcgctttcgcccgctgttttcaaacgagggatcattacccgttcggcagcatgatcagctttctgacttattgattgtaatcggcaactagcccggacaggcaatggccatacccagacccagtgaaaagccaacctcttcgaaccccagcttaaggtgcggactttgcagactttttggcgcgaccgtcttgccagctcatgtctcgactcatgccacggcggcgtcgtgtcgctgggctttgatcttgaatcgactcagtgtctgtgttggagctcggggtcttgtgtatcacgtagctcagtaacgtcagcgccccaaacatcagaccctgcacagggaccgggctttcatttctctttacggctgttttggggccgccttttcatatacacacacttgtattagccggcgcagctgggcatctgctgctcttatggattattagtttgatttgattgcaaaagccggcccgggatgcagctatgttcgcagccgcgtcccctgtcgagattggtatttttccccaccaccgcataccattcgtctgcaagaggcttactattttctcaaaaaggcccacgcaaatgaccaatttgcgttttgttatgtctacaaatggctatggtatcgtttgtgccaatcttcaacaaaagatcgtgcgtattgatcctgcggcttatcctgattagtgcagttcagttagtaagcaattgaagtggtcaatgccgtctaactagattactttctttcgctcaatggagcaaggaaaaaagttaatttaaatatcgttccgaaaacaagaccacacaactaacgtacttaagatattgtaatgggatcagacttccatggacgtacttacgaacaaatgctgacttgcaagtgtattcatgcctgtttctctaattcttccaggacaaggtcgtgtcaaccagttgggtggcgtcttcatcaacggccgtccgttgcccaatcacatccgtcgccaaatcgtggagatggcagcagctggagtccgtccctgtgtcatctcccgccagctgcgcgtctctcatggctgcgtctcaaagattctaaaccgcttccaggagactggctccattcggcccggagtaatcggtggcagcaagccccgtgtagccacgccagacattgagtccagaatcgaggaacttaaacagtcgcagcccggtatttttagttgggaaatccgcgccaagctaatcgaagcgggagtctgcgacaagcaaaatgctccgtcggtgagctctatttcgcgtcttctgcgaggatcctccggatcagggacctcccacagcatcgacggcatcctcggcggaggcgctggttctgtgggaagcgaggatgagagcgaggacgatgccgagcccagtgtgcagttaaaaaggaaacaaaggcgttcccggacgacattctccaacgaccagatcgacgccctagagcgcatcttcgcccgtacacagtaccccgatgtctacacccgggaggagttggcccagagcacgggattgaccgaggcccgtgtccaagtttggttctctaatcgccgtgctcgtctgcgcaagcaactgaacacccagcaggtgcctagctttgctcccacatctacttcttttggcgcaactcccactaccagtgccgcccctgctccaaacatgggaatgagcctttacagttcacagagctggccatcatccggagcctatgaaaatcatgctgcctatggtggatcggttgcatccatgtcccccgccagcagcacctcgggtaccagctctgccgcccacagtcccgtacagacgcaagcgcagcagccaggaactggaagcgagtttatgacctccacttacggcgtgggatcgagcaatgctacttacccatcggctgcctattcaatgccgcagactcctgctacatccgcggagcagctgagatcccagtttgcatctgccgccgcttcgggctctcaccacccctccacgtgggacagctacaactttgcgggttcctttttccctcccgcttctgccgcaggcaaccatattagcggctaccatcatcaggttgatcagaagagctcaatgatgaccactgcaccaacctatccatactttggattttgagacgatccctgcttgttcctaatcttgtgggtcgtttgaaaactttaacagtactttaatgttgctactcgtatagacctacatttaacacccctaagactgtttaaattagtactttaatacaaatgttagttttaggttaaggagcaattatcaaaacaataaaagaaaacatttaaataaaacccaacggttagttttatttctgagaactaaaatatacctatatataatttaaaaatcaagaaatatgggatcattgcgtttctgtatacccagaaaaaataaagtacgaaaagctttattagctcgttaaacataatgatatctctttaatcccgcaattctttaccttttcaatgtttccaaattcgtattttataaatttcaaacggtgatttttgatttaaatgtaagtgtacggtgaattcaattaattctgaatggaagttatatccaaccatataaattttcacaatatactcaagccgcttacacttcattaaactaataacaattctagaccacacacatcaacagtttttgtcaagttcctgtggcaacctaacaggttaacaagcccatccgagtaatccctcaaaatagtctagaaacgtttctttaaattgtcaaagtgatgttaatcatcgatcgtcttcaaatctgtgcagattggaagaaggccgtgatctggatgagggcgctctttaggcatattcaaacaaaaactggctcatgatctgaccattaaacaattagagacaaaaacggacaacacgtactgcggatttgataatacaaaaataattagggattggtgaatggtttgggaaaaccacacacatcgcagcaaaatagagtaattgacaaggtagatgggcaaagtatgagcagtggaatcgggcgaccaccaacgtcactgaatcgtgacttttaagatgccgccaaatgtgggcctttccgaagatgataggacccgaaaaggcagccaagtgcacac

SEQ ID NO: 6311 - DNA, 1284 bp, DROSOPHILA
atggctgtttcggctctcaacatgacaccctactttggcggatatccctttcaaggacaaggtcgtgtcaaccagttgggtggcgtcttcatcaacggccgtccgttgcccaatcacatccgtcgccaaatcgtggagatggcagcagctggagtccgtccctgtgtcatctcccgccagctgcgcgtctctcatggctgcgtctcaaagattctaaaccgcttccaggagactggctccattcggcccggagtaatcggtggcagcaagccccgtgtagccacgccagacattgagtccagaatcgaggaacttaaacagtcgcagcccggtatttttagttgggaaatccgcgccaagctaatcgaagcgggagtctgcgacaagcaaaatgctccgtcggtgagctctatttcgcgtcttctgcgaggatcctccggatcagggacctcccacagcatcgacggcatcctcggcggaggcgctggttctgtgggaagcgaggatgagagcgaggacgatgccgagcccagtgtgcagttaaaaaggaaacaaaggcgttcccggacgacattctccaacgaccagatcgacgccctagagcgcatcttcgcccgtacacagtaccccgatgtctacacccgggaggagttggcccagagcacgggattgaccgaggcccgtgtccaagtttggttctctaatcgccgtgctcgtctgcgcaagcaactgaacacccagcaggtgcctagctttgctcccacatctacttcttttggcgcaactcccactaccagtgccgcccctgctccaaacatgggaatgagcctttacagttcacagagctggccatcatccggagcctatgaaaatcatgctgcctatggtggatcggttgcatccatgtcccccgccagcagcacctcgggtaccagctctgccgcccacagtcccgtacagacgcaagcgcagcagccaggaactggaagcgagtttatgacctccacttacggcgtgggatcgagcaatgctacttacccatcggctgcctattcaatgccgcagactcctgctacatccgcggagcagctgagatcccagtttgcatctgccgccgcttcgggctctcaccacccctccacgtgggacagctacaactttgcgggttcctttttccctcccgcttctgccgcaggcaaccatattagcggctaccatcatcaggttgatcagaagagctcaatgatgaccactgcaccaacctatccatactttggattttga

SEQ ID NO: 6312 - protein, 427 aa, DROSOPHILA
MAVSALNMTPYFGGYPFQGQGRVNQLGGVFINGRPLPNHIRRQIVEMAAAGVRPCVISRQLRVSHGCVSKILNRFQETGSIRPGVIGGSKPRVATPDIESRIEELKQSQPGIFSWEIRAKLIEAGVCDKQNAPSVSSISRLLRGSSGSGTSHSIDGILGGGAGSVGSEDESEDDAEPSVQLKRKQRRSRTTFSNDQIDALERIFARTQYPDVYTREELAQSTGLTEARVQVWFSNRRARLRKQLNTQQVPSFAPTSTSFGATPTTSAAPAPNMGMSLYSSQSWPSSGAYENHAAYGGSVASMSPASSTSGTSSAAHSPVQTQAQQPGTGSEFMTSTYGVGSSNATYPSAAYSMPQTPATSAEQLRSQFASAAASGSHHPSTWDSYNFAGSFFPPASAAGNHISGYHHQVDQKSSMMTTAPTYPYFGF

SEQ ID NO: 6313 - DNA, 3487 bp, DROSOPHILA
cagtactaccccatttattgttaaaaaaaaaacaatgttactatattttctagaaaagatttcgattttacttggcacagtttaaataacatttggcattgctggaaataaaaccatcagcattttgcaaatagaaaaaaaaatgccttccggaaatttatacatatttgccctgcgaaacagcaaataaaactaattgaaattttccgaccagaaacggcgaaacaaaaaacgacaaaaaaaaaaaaatgaactgagagagcaggagcaactaactaacaaatcgcttaaataaactttgtcctttggtatttatacaatttgtcattttcatttgcattttgtttgctctacttgcccgccccctaatgccacgcccacgcactatttattattcatagtgtgtgtgcgtgttcatgtgtatgtgtgtgtggttgagtgtatttattaattcctggatccgtgttccacggtattaaccgtaaaacgccctcacgcagcattcaattatttatgcatttatcatttagaattttaattttaattcactctctctcgttctgtcgcaaaaatgcgactcaactttagttagttgcctcctttgtggtttttgtatgctatatttacacacataacattaaatatttgctctatgttttatttatacttatgtatatgctgaaaaaacacaatgaacttcaagttgagagcagtggccctcaaaagtaggcaatgttttttgttccactcccttttgcctaggaaaagttggtttcatacgcgtttgtgtgtgtgtgcatttacttacagtgtgttgttgttgttgtgtgtgtgtgtgtgtgtgtgcgtatgtgtgagtgagtgagaatgttcctttgattttctagacacgtatcacttcacctggcgccggtccagcttttggacacagtgcatcatcgatgctgtcacgcaatcgcattgctgcatccacctgggccgcctcgttctgcgctcctggtcacatgaatatatcgcccacggctggcgattttcgcggagtcgtcggcacaccgtgtggacaatgcggtggcgttccggagccaccagctactccgccaactgctccaccgcccaccgcctgctttgactcatcctcaaaggtcaccatcttctcgctgcgcggctttagggtgacaatctgcagttgtgccggcggcggaggcggctgctgttgctgctgcacagtgggcgcggccgagcagagcagcgtctgtggtggacccaactggaggccatgtggcagacccatgcccatgcccatgttcatgcccatgccacccatattcatgcccatgccgcccattccaccaccaccaccaaccatattgggtgagtatcgacgtggtggcggcagggcgagatcgcccactcccgacagattgaactcactgatgctacgcggcacaaagtactccagatgatgctccggtatgcccgtcgatctgcggatgggcgtattccgctggaaggccgatcctccgccggaattgttggccgcctgcaggtgactcctgcgcggcagcgaactgtactgcgtcagcgtgtgggcgggtccaaagaacatggtctggtgctggccgagattgttctgcggctgccccagagcgccgccggccagacccactcccaatccgacgcccagactgggatccgcactaggtctctgtcaggagggtttcggcgtaactgccacggtgactagagccagttcctcggccttgggcatcacgtgatcctgaacgctgaaccggcgcagccacagtacgatctccgtctggatgaggctgaagcacatggccaccacggccatgccaaccagaatgtacgcggaggccgtgtagagagccactgcaccattgggcgccatctcaccgaatccaatggttcccagcgaggtgaagcaaaagtagagcgattccaggacactccagttctgcaatttgtgaaacagaatcgcaccactgctcacatagcagagcagcacacacacgcagatggagatgggaacactgggtgagccacggcgattgcccgaggatttcttgccctgctgcacctgctgttgctgcgcctgctgcgcttgctgcgcctgctgttgctgcgcctgttgcgcttgctgcgcctgctgctgctggtacaccgacggaggcaggccgtactgatgcagcttctggtggccatagtgcccctggcccttattcttgtccgtctttcggccgccaccgcttccaccagcgcccgagcccactccaccggaggcgccaccaccgggaccgccaccaggtccgcccttcacacgctggcgccgaaacaggcagcgcattcccgccgagagcgcttcgcccatggcggataggtagagcagcacgatgggaatcccgaacagggcgtacaccaaggccgccactcggccccactgcgttcgcggtgagatgccgccatagcctggaaaaaaatcaaataaacaatgaatttgcagttgcaacactttacaactaaggattattatatatttagtcaagaatgtagctcgatttgatttaatcattgggattttttcttatgtgtctcttgtgtttgccttaaatgtttagcacagaagataaggcgataaataagtttcttgtttgggcgcacagtgaaatctcgctaagtggatccgagttaactgagtttaactttaggtcagttcattatcctttatctaattagcaagtcagaccataccatagatagttgagatacagatacatatacagattagcagtggcagatagagtcgtttgctcaaactgaaaaactgaaccgaaaaaagattggcatgtgtggcatgtgcatgtggcacaacaacctttttcggccagactcctttttgcccattttccatattcaaccaacaaccggccccaccgaacaaagatacccctggctggcctcaaaaagagccaaataatagaaaaaaacgtaactttttctgtcggagacactttggctttgatgttgtttgcccagacccggtgattttggtgcgcaacggagggcatcggtggtgggaatatttggtgatggggaatgggaacgagactgggtgccagtctaggagctagaccaggacccaaataaggacctgtggtatgtccctcctaggccttccttcctgtgggcacgacctaacccaataactctgtgcttttctacctcggactttcgtttcgcccagactttcggctctgcaatgaacttttaatgtggaaacttttataattgagtaaaattgtgcgtgtgtgagtgtagcccgagcgagtgtgtgtgtgtgtgtgtgtgttagtctctgtatgtattacattttattactgaaaaaaataaaaaatccaaacgacaatggcacaaaaaaaagcacgacaaaaatcggagttgaaaaacacagaaaatgcttttccagccg

SEQ ID NO: 6314 - DNA, 1271 bp, DROSOPHILA
gctatggcggcatctcaccgcgaacgcagtggggccgagtggcggccttggtgtacgccctgttcgggattcccatcgtgctgctctacctatccgccatgggcgaagcgctctcggcgggaatgcgctgcctgtttcggcgccagcgtgtgaagggcggacctggtggcggtcccggtggtggcgcctccggtggagtgggctcgggcgctggtggaagcggtggcggccgaaagacggacaagaataagggccaggggcactatggccaccagaagctgcatcatgttcccatctccatctgcgtgtgtgtgctgctctgctatgtgagcagtggtgcgattctgtttcacaaattgcagaactggagtgtcctggaatcgctctacttttgcttcacctcgctgggaaccattggattcggtgagatggcgcccaatggtgcagtggctctctacacggcctccgcgtacattctggttggcatggccgtggtggccatgtgcttcagcctcatccagacggagatcgtactgtggctgcgccggttcagcgttcaggatcacagacctagtgcggatcccagtctgggcgtcggattgggagtgggtctggccggcggcgctctggggcagccgcagaacaatctcggccagcaccagaccatgttctttggacccgcccacacgctgacgcagtacagttcgctgccgcgcaggagtcacctgcaggcggccaacaattccggcggaggatcggccttccagcggaatacgcccatccgcagatcgacgggcataccggagcatcatctggagtactttgtgccgcgtagcatcagtgagttcaatctgtcgggagtgggcgatctcgccctgccgccaccacgtcgatactcacccaatatggttggtggtggtggtggaatgggcggcatgggcatgaatatgggtggcatgggcatgaacatgggcatgggcatgggtctgccacatggcctccagttgggtccaccacagacgctgctctgctcggccgcgcccactgtgcagcagcaacagcagccgcctccgccgccggcacaactgcagattgtcaccctaaagccgcgcagcgagaagatggtgacctttgaggatgagtcaaagcaggcggtgggcggtggagcagttggcggagtagctggtggctccggaacgccaccgcattgtccacacggtgtgccgacgactccgcgaaaatcgccagccgtgggcgatatattcatgtga

SEQ ID NO: 6315 - protein, 390 aa, DROSOPHILA
MGEALSAGMRCLFRRQRVKGGPGGGPGGGASGGVGSGAGGSGGGRKTDKNKGQGHYGHQKLHHVPISICVCVLLCYVSSGAILFHKLQNWSVLESLYFCFTSLGTIGFGEMAPNGAVALYTASAYILVGMAVVAMCFSLIQTEIVLWLRRFSVQDHRPSADPSLGVGLGVGLAGGALGQPQNNLGQHQTMFFGPAHTLTQYSSLPRRSHLQAANNSGGGSAFQRNTPIRRSTGIPEHHLEYFVPRSISEFNLSGVGDLALPPPRRYSPNMVGGGGGMGGMGMNMGGMGMNMGMGMGLPHGLQLGPPQTLLCSAAPTVQQQQQPPPPPAQLQIVTLKPRSEKMVTFEDESKQAVGGGAVGGVAGGSGTPPHCPHGVPTTPRKSPAVGDIFM

SEQ ID NO: 6316 - DNA, 4655 bp, DROSOPHILA
ttgttgattacagttggccagagttgccacttctagcgtctagtgttggtaaacacctcacatactcccactgattgttgtagttgctctggatctggatgctcatatatgtataaacttatttccaccacctgacgaccggcgttatgctctcctcaagcgacaatcacaaactgaattgatgtagagccgaaacgggcgggtgtgtgtgcatgtgtctcgattgagtgattgattagccgactgacccgatgggcatgtgcatgtgtgcgtgtggaaatgcacaataaatcatttgattcccacatactgcttgaaaacaaaaacgtagctgaatccgattttcttattgtattagttttaattatatggattaaacaatgacttacagctcccccgcaatttaggtgcacgtgtgtgcgggagaggaaagcagcaaatattcagactttaactaagggcagacctgcgcacttacccatcttagccccaatcaagattgtcggcataaggaaatcatcagcaaagtatgaatttattttaactcgctctccaaaatttcacactgatcagggaaaattttaaaatacactctgaatcagggaaattctctctttaacaagatagaattcaatgattgacctctttgttccgttattttcatttacatgcgctttgtctctttctctcttctggctcgcctgtgtgtgtgtgtgtgggtgacctcccgcccggcaaaaaaagaagaagaagcccaactaagggcagacatgcgcacttcgaaaaaaaaacaattagcgcgtatatttagccgactttttgttctggcgagaatgtgtggaaggaaatgtagctgttataacatacaacacaggtcaaaataatagggttacagtcgggagcatagtataaaatagttccaacagaccaattgacaattgacattagctcattcatcacaatattttataaccacatcaaatttactcactagaaacttggtttgattgcgtttatttggttcgaatacaaattatgttcaccttagatctaatgattgattgcatccgaccgatgtgcatcttctagatgcatcagtttgcaaagattacactctttggctgcagctattcctcctcctcttcgttctccttcatgtggcgctcactgtttggagcattctacggcacattgtcatccatttcgcgcatcacttcatcggctcgtgtgatcagctcaatcagccggtagttctccttgtacagagcaaactcctcgagtagctttaggtacttgcgtgcatcggcgcagctgatgacactggacccactttcttggccggatcccccattgttgttatcgtcttgggcggactcatagcgacgtttggtgccctggcgaggattcagcgagttttcaactgccgcaggcgaactcacctttcgctgccgcatctgctcgatgtactccatctcgtcctccacattggccgccagaacctcggccagcgaggtgacactggagcgaccattgttcgcgtcttcatcgagatccgctgggtcttggtccagttccgattccagctcagcctctggctccacttttatgtgcactgtaggcggaatttcaagatccttttccctttgtgctcggtcatcgttctcctggagctccgcctcgggctgcttcgccaggagctcttccgggtccttgggctccactttgatttccttttcctgcttgatctctagtttgggcggcggtaccaccggtcctttgtcctgctgctgtggggcaggaatcttggtgatgctctgagcgagcgtggctagtggtatgatggtcatggtcatgggctgtccgcccgcttgcgtcggaacaatgggtgtggccaggagaactttttgagtggtgcctggcggtgtgttagcttggaggggcagtctaactagaggcggcaagggcttcagagccctggcaaaatttagttcgcttagtgagggcttgacatcaggctcctcctccagatcatcctcgccgctaataccgccaccgtcgacatccacctcgtcatcctcgtcttctacatagctgcggggatggctgctcaccgggctgcccaagctgacctcttcgtcatcctcctcgccgttccgtggcccactttccggcatgctttccgacatgacgtccttgacgatgtccttgatctgcaccgagtagccctgcgtgtagcctatcttcaacagtctggtgtcgctgtgttggatgctgtaggtgcgtctgaacttgtcgcaccactcctggtgcggaaagaaatgtgccaggttcatggagctcttgaactgcagcgccatcttctggatgagtccgtcggagatgctgaagtccttgtagtacatcatgcggcgtatccaatcgtacacggccttgcccaacatcgagaccctgacggtcttcgtctccatggtcttggcgtcctggctcctgcgggttcgctgatcccacgcgttcagaatctcagcgcgctgctgcacgatccgcttgatctgatctgggctgcagttgaacagccggccaacgtgcttataaaccggcagccgatcgtattcccgcagagcagcaaccttttcgttgagggccaggacattcttgcgcttgatgcgattgtcgaaggccaccttctcggcggccggcaggctgggggtgtgcgtgctagtgggtgtgggtgatgcagtcgaagtgggtgctgctggtggagcaggcgcaggcgcaggagctggtgtgagaacctccgtgtcagtggcctaacgacgaagggaaaaaaagtgctgttattaccgggttttatggtaacagttgaaatcgtgcaaagtaatgccaccatgaatgtagagatacagtgctccctctgaacatgaataatgtagacaaaacaacagaaggtctttgcatatttagttatgttaacaaaagcaacagttaagaaagacgaagtttcaaggaatacatggggcttttatactcatactcattcaagcttatatacaaataaacgcctagatcaagtcatttacactcgtgttctttgagaagtgaaatggggtggaaacactttgcgaggcttgactgtggccacttaccttcgccttgttgttgttgtcctgcgtcttggaggcctccttgtgctcctttttctccctctccacgcgcttctccaccctcagctccctctgcaacttgcgtttttcgcgtatccgcattgtttgtgctttccgtgcaatttacacggcaattgccgtttgttttcgtcttgtttgtttttgttgctgctgctgcgcccactcaatttcgcccaccccttgcaccctttctgctctctcactcacacacccgcccgcctgtgtgtgtgtgtccgtgcggctgtgtgtgtgcgatggctacgattatgcgcgttgactgtcaagcgaattcaaatcatttcgtcactgcttttctcgcttttctttggcctttcaatgcgctttggctctattcgctttcgttttctcttcctaggcactcgatttgtcttctgattgtgattttccaactggccgtgcgctgcaccttgcgtattttccgatgtccgtgcgaactagacgacgacccatacaaaaatagctgccgcgttatctcgcgcagttttcattctctgctcgctccctctctcgctctcgcatgcgcaacgtgggcaactagaacggaagggaagtcggcgtgtgcgagagtgtgtgtgcgtgtgaccagctgagagggtgcaactgcgcatgcgacaactttactgttactttcgccatgtggcaactctgcaggcgatcgctttttaagtagagtaagattaatgagaacatacatatgtatgtatgtattttgttttcagtttaagaatgaattgatttcacaagatctgcaactaactgcactgtaaaatataactataaagtctttgcgaattgtaatcaatatttaatttaaattaatcgaaccaccaccaattggaaacccacgagtccatacatttcgaaaataatctttattttaacgcttttctccggctaatttgtttaaccgaatttggtgaagtgtcgcaggatgtgcgacatggccgcgggattatcggcaggaaccatgtgaccagcccggttgacccaaaacatgctgaagttgccataggtcttctcgtaaccctcgagaactcgatctacggtgattcccacgcgcggagagacctggtaagatggcttggcggaccattccattgcttcgatccagttgacggctcccggagtggcgcaaatcaggtccagtcctccggagaacacgcccacttttacggtggtgttgttcagcagttcacccactaaaagtgtcataaggctataatttgaggtagcacccagacggttgaaacataccaacatccacagctggcttcatgaaatcgcccatcagcttggtgaaggtggtgccgctctgggcgccccatttcactccggtgttgattccgagggcctcggtcacgggtccaagcattagatcctccagcaatttgtcgcggtcctcatccacatcgaatttcacgagggtgcgatacatgacctctggataagtgg

SEQ ID NO: 6317 - DNA, 2319 bp, DROSOPHILA
gtatgggtcgtcgtctagttcgcacggacatcggaaaatacgcaaggtgcagcgcacggccagttggaaaatcacaatcagaagacaaatcgagtgcctaggaagagaaaacgaaagcgaatagagccaaagcgcattgaaaggccaaagaaaagcgagaaaagcagtgacgaaatgatttgaattcgcttgacagtcaacgcgcataatcgtagccatcgcacacacacagccgcacggacacacacacacaggcgggcgggtgtgtgagtgagagagcagaaagggtgcaaggggtgggcgaaattgagtgggcgcagcagcagcaacaaaaacaaacaagacgaaaacaaacggcaattgccgtgtaaattgcacggaaagcacaaacaatgcggatacgcgaaaaacgcaagttgcagagggagctgagggtggagaagcgcgtggagagggagaaaaaggagcacaaggaggcctccaagacgcaggacaacaacaacaaggcgaaggccactgacacggaggttctcacaccagctcctgcgcctgcgcctgctccaccagcagcacccacttcgactgcatcacccacacccactagcacgcacacccccagcctgccggccgccgagaaggtggccttcgacaatcgcatcaagcgcaagaatgtcctggccctcaacgaaaaggttgctgctctgcgggaatacgatcggctgccggtttataagcacgttggccggctgttcaactgcagcccagatcagatcaagcggatcgtgcagcagcgcgctgagattctgaacgcgtgggatcagcgaacccgcaggagccaggacgccaagaccatggagacgaagaccgtcagggtctcgatgttgggcaaggccgtgtacgattggatacgccgcatgatgtactacaaggacttcagcatctccgacggactcatccagaagatggcgctgcagttcaagagctccatgaacctggcacatttctttccgcaccaggagtggtgcgacaagttcagacgcacctacagcatccaacacagcgacaccagactgttgaagataggctacacgcagggctactcggtgcagatcaaggacatcgtcaaggacgtcatgtcggaaagcatgccggaaagtgggccacggaacggcgaggaggatgacgaagaggtcagcttgggcagcccggtgagcagccatccccgcagctatgtagaagacgaggatgacgaggtggatgtcgacggtggcggtattagcggcgaggatgatctggaggaggagcctgatgtcaagccctcactaagcgaactaaattttgccagggctctgaagcccttgccgcctctagttagactgcccctccaagctaacacaccgccaggcaccactcaaaaagttctcctggccacacccattgttccgacgcaagcgggcggacagcccatgaccatgaccatcataccactagccacgctcgctcagagcatcaccaagattcctgccccacagcagcaggacaaaggaccggtggtaccgccgcccaaactagagatcaagcaggaaaaggaaatcaaagtggagcccaaggacccggaagagctcctggcgaagcagcccgaggcggagctccaggagaacgatgaccgagcacaaagggaaaaggatcttgaaattccgcctacagtgcacataaaagtggagccagaggctgagctggaatcggaactggaccaagacccagcggatctcgatgaagacgcgaacaatggtcgctccagtgtcacctcgctggccgaggttctggcggccaatgtggaggacgagatggagtacatcgagcagatgcggcagcgaaaggtgagttcgcctgcggcagttgaaaactcgctgaatcctcgccagggcaccaaacgtcgctatgagtccgcccaagacgataacaacaatgggggatccggccaagaaagtgggtccagtgtcatcagctgcgccgatgcacgcaagtacctaaagctactcgaggagtttgctctgtacaaggagaactaccggctgattgagctgatcacacgagccgatgaagtgatgcgcgaaatggatgacaatgtgccgtagaatgctccaaacagtgagcgccacatgaaggagaacgaagaggaggaggaatagctgcagccaaagagtgtaatctttgcaaactgatgcatctagaagatgcacatcggtcggatgcaatcaatcattagatctaaggtgaacataatttgtattcgaaccaaataaacgcaatcaaacc

SEQ ID NO: 6318 - protein, 581 aa, DROSOPHILA
MRIREKRKLQRELRVEKRVEREKKEHKEASKTQDNNNKAKATDTEVLTPAPAPAPAPPAAPTSTASPTPTSTHTPSLPAAEKVAFDNRIKRKNVLALNEKVAALREYDRLPVYKHVGRLFNCSPDQIKRIVQQRAEILNAWDQRTRRSQDAKTMETKTVRVSMLGKAVYDWIRRMMYYKDFSISDGLIQKMALQFKSSMNLAHFFPHQEWCDKFRRTYSIQHSDTRLLKIGYTQGYSVQIKDIVKDVMSESMPESGPRNGEEDDEEVSLGSPVSSHPRSYVEDEDDEVDVDGGGISGEDDLEEEPDVKPSLSELNFARALKPLPPLVRLPLQANTPPGTTQKVLLATPIVPTQAGGQPMTMTIIPLATLAQSITKIPAPQQQDKGPVVPPPKLEIKQEKEIKVEPKDPEELLAKQPEAELQENDDRAQREKDLEIPPTVHIKVEPEAELESELDQDPADLDEDANNGRSSVTSLAEVLAANVEDEMEYIEQMRQRKVSSPAAVENSLNPRQGTKRRYESAQDDNNNGGSGQESGSSVISCADARKYLKLLEEFALYKENYRLIELITRADEVMREMDDNVP

SEQ ID NO: 6319 - DNA, 5681 bp, DROSOPHILA
atctgccgtgtgctccgctctgggggtaattatgcagccaggggacccaactcgccccaactctttgcgggagtagggttttcgtttcggtttcgacatgggtatcgggatcgggaatggggatgggggtccgcctgtcatttattttaaacgattcctttacacatgtcggaggctttcgccgccaacgtcgccagtcccctgctcccttagctcccagctcccagcttccagcttcagtttcagctatatagtagtacagctcggctatagcttctgccgacggaggcatgccaatcattttgcgttgatgaagtgcgagtgtgaggcaaaaatgttgttccaataagttcaggcatcggtgctggatgccagaatgccaggaagcgaggatgccaggaggccaggaggccaggaggcgggaggcagtccgtcagcatttcagtgcctcagtttggcagtcgcaaatcgctgatcgattgtcgggggcagcgtgttgactctatcgttgcacaaacggagcagctgaagtattgtgtcaacagcgaatacactcaatttgattcacgcggcatttactggcgtgtcagcaatttaaagaaaatcaatcaaaagtgtgtaggatatttggccaaacatagtgggaaaaaaagggggagtgagcagaaggctaaaaggatttcaattcgtgaaagtacacacagttcaattaaaagtggagaactgagtaaacatttgcagtagtcggaatattattatcacgcaagatttatagatttttattgctatatttattgctataaccaaatattatatactccccgaaatttaaacccaattaagggcacatttccgaccgaaaggccctaagttgctgccaaattaacgttcgatcgccgttcgaacaagggcccattctgctcgcagcagctaagtgacttgttccacctcttcgccaataattaatttgttgaaaatgcaacgccgactctgggccaccatgggcgtcgtggagatggggatggcatggggatcggagctggcggagacaggggcagggaatccggacagaggcgcactgacaggcgggcagcggcctgcattatgcatgagattggacctggagccaggtggacggcggatggatgatggaggctggatgctggaggttggtggttggagaaggggcgccttcaaggttggcggttgtcaactcgcaatgctgtgccccctttccttcggagtctctgtcgctgccccaactcctccacactgattaagtcactaaaacaggcggctgcttttctaactaatttgctgttaatttgttgctacgctacggccagacgcaactcatttccttcctgtcacagggcaaaaatgctgttttacttgcctttttccctcgccttcagccgtcagaattccgggaaaagcccctcttacacactcacactcaggtgaagccagccaaatcgctggcgcgtcggcgggggagtggcgaggggcgatggggaaagggcggagcacagcaaaaactaatttgtttatatcagcaaaatgcataataatgccagcgaaaatttcataacaatttcgagctgacatttacgaggcttctggttcgctacctcttaaattacaaaacaagaggagcggagtattcaaaattgggtgggcttaaaaacaagtgaacttctaaatgttggtacttaatccaaatgtttggcttgaacttataacacatgtgtccccttctttgattccgctgcaattaatggcttaatccccgaaatggactccactcagccgcagccttggctggtaaccgatactgctgccccggtgtggccctaatcactcggggacacatgtaatgcccggacccagctgcacatgcactcgaatcggcaaacactcgcctgtcaaagcgtttccaaagcatcgcctcgtcgcatgttgcatccacagcagcaaccccaagcaatccccagccaaagctgcactccactgcactccgacgcctccgtgccgctgccactgccactgccactcggatctaatgtttatcttccgtgtttcggccagctccgatttcttgcggggcactttgcatgcggctggctggcggggatcccccccccccttccgagacgcggccgagtggcgctcaggctttccatcgaaagtcacgtgcggcacataaaaatcaacgcacatcagtctgctccgccgattctgggctcttgttcttgttctggttttcattgaaaacgaaatccgaaaatcaaaatgttggcgcgacataaaacaacacaagccatcaatggggcaggccgaaagcgagggcattaattaggggagagccaaagtgtatgtattgtttttcttatgcttattcttattcgtattctttttcccatacccgttaatcgctgggtaaaaggggtatgccccgtttggggtggagttcgtaacatcgggtgaaatttttgaaaacaataaactaataagaatcagttaagtagccataattatgcagcatagatcctactttcaatcgtgtgaaattaaagttaatcaacattcatgacgcacaccttactttgtgaacagcgcttgtaagtatgcagcatctttggcgccaagaccgcgtaacgggtatccagaagtcggtgcccaagtgtaccgttccgtcttgccgtttttcggcctttgtaagcgtgtgtgtgtgcgtgggggcgacttcgggccgtcttcgggacttcgttggggccttcttcgttccttgggagctgccgctgcctctgccgctgctggcgtcaccgccgcctcagtcgctgcctcggtcggcgctggcgtcgcagtcgcttcctgctctcgacgctcgggctttttggctttctttgcgcacgactctcgggcattttgcgtttgcacgtcaaggcaagcggacgacgaggacgagcggcgagatactgcggaaacaagtggcagcaagtggcaagagctgaacttccgcacccgggaaacggtcgcgtgtgctccgagtggaaatacggaaatacggaaaattcggaaaatttgaacgcgtgttcgccgagtcgggggaagcgccggcaagtgcccgctgaagaatcgcaactatgcgtgcgaccacaaatcaaaatacgaatttatgaaaagtgctcgctcgccaggcaaaagtaagagtgctcgtgcgtgggccatcggctaattgctcgtgactcggcagccacaggtggtgctcctgccccgccacgcccccagccaagccgcccaccggccaattgttgcggcacacgcagattcgcagaagcgtaattaaagagggaccccgggcgaaaggtcagcggcagccgcaattagcaaatctaacagttccgagaatcgactcgctgcagccccattaattgggacccgaatctccaaagagcagaaccgacgcacagcgaaactccccgtcccccaaaaaaaaaaagtcgcaaggaaattcatttttattctctggccgaaggagaaaagtgggtggctgctgggggattcttgggggatttttgggggacagcaggcgacgtgtgtcaaaggtttgacaggccttaattgagcggaggacagagaatcaggagacgagtcgggcgggggtggatgcgactggggggttgggggcgactccgggcgagggcctcgcatctcgggattttcggatttacggacttacggattagaagcgaaacgcaatttatttcccttcgggggagacggagaattaaaagtcgagcagaaacacaatattttgtatctcagcgcatttgcgatgctttcattgaaaggaaaattgcgagggaaaatcaaactacagactttaaacttttcaacgtaattaggagtggtagagatgttgggagtattattcgtatagttctacaaagcaagtggattaacattagcaaagtttaaaactgcgaaacttactaagaataaggaatgtttgcttttttaaacaggaactcgagttgataaattatcaagcagaaaaagcagaattgcgtgaaaagttttcgattcaatttaatcatattaagtcaactattctgtacattttggccaccaattaaaatttgcctctagttcaattaataaaaatgcgacaacaagaaattaatccaatttgccgaccattgaaaacatagttatagagtgttccaatcaaaaagcaattaatttaacaaaatttgcaaatcaatttagccgcagaacacgcactcagaggttgtttcacctagtcaaaacccaaacttcaataaaagaaccaaacaagtgaaaaataaatatacaaagtgaactaatgcaaaggagcaccatgttgccaggagtggagctgctgctgctgttcctgctgagcacgtcgctgcacgcggagatctcccacttgccgatggccagcaaccgcatcattctggactccacggagctgctccagaacccgctgatccaggacgccggtgtgccagcggccagggcgacgccacttccaccgcaaaagtgtccttcgctgcagcggtaccgcaagatgctaaaggacttcgacgacctggaggacctctacgtggacgtgcccgtgcatatagctctggcggagcggcagaggaagcggtgagtgcggtatttggcttgtgctttctgggtttccgatgatgggtagcaatacggctaagtgcgctggcgacgccgcctgccacacaaatcaaattacggccaaacaaatgcgaaagatggccagaggagccaaactcaggggcgcctctccaagacgaagcaaagccagcaaaggctggagcaggagcaaaaaataatttataaccacgacgtgtggctggccaaacaaaaaacatccacagccagattttctacgctcctgcttaagtgtgtgtgcatgtgtgtgtgttctcctcttatttgtctagtgtgcgagttttgttgtccttccagctgccgccacaaatcgcactgtggggtcaggcggggattctagtgaaacctcttgattaagtgtgccactttaatcaatgatgggatcctatcatctataactccatcttaataatattatttaagcgagaggctacttctaagaacatccggatttccagtaaaagttcccttagttcgttaaattgctttcaaaaatttataaattcgattatccggtgtttctgtggcactccatgtatagattttcgccagccactttaaagtttctgccaacacaccaaagttcgcacacttccctctgccccactgttcgcactgcgttacacgtggcgtatgagtaacgttcttttttgcgattttcattggtttccgatgggccgcagcttgggcctgggtcaaaagaggcccgtcacgttttcgcttaggctctggctggactccgggatttcagttttcatcttctccagtgaacgtgcacccagtgcgcttggctttttcccgtttttgcgaagcggggaaactggaagccctcggctcgtataacactcgatcatttgccacagaatgccagcaaacattcaaattaatgtcgtggcttgtcgtcaacttcttttcggttcgcttctagagtttttttctccgcatttcccccctcatgtatggag

SEQ ID NO: 6320 - DNA, 834 bp, DROSOPHILA
atgggcgtcgtggagatggggatggcatggggatcggagctggcggagacaggggcagggaatccggacagaggcgcactgacaggcgggcagcggcctgcattatgcatgagattggacctggagccaggtggacggcggatggatgatggaggctggatgctggagggcaaaaatgctgttttacttgcctttttccctcgccttcagccgtcagaattccgggaaaagcccctcttacacactcacactcaggcaagcggacgacgaggacgagcggcgagatactgcggaaacaagtggcagcaagtggcaagagctgaacttccgcacccgggaaacggtcgcgtgtgctccgagtggaaatacggaaatacggaaaattcggaaaatttgaacgcgtgttcgccgagtcgggggaagcgccggcaagtgcccgctgaagaatcgcaactatgcgtgcgaccacaaatcaaaatacgaatttatgaaaagtgctcgctcgccaggcaaaatgaactaatgcaaaggagcaccatgttgccaggagtggagctgctgctgctgttcctgctgagcacgtcgctgcacgcggagatctcccacttgccgatggccagcaaccgcatcattctggactccacggagctgctccagaacccgctgatccaggacgccggtgtgccagcggccagggcgacgccacttccaccgcaaaagtgtccttcgctgcagcggtaccgcaagatgctaaaggacttcgacgacctggaggacctctacgtggacgtgcccgtgcatatagctctggcggagcggcagaggaagcggtga

SEQ ID NO: 6321 - protein, 241 aa, DROSOPHILA
MRLDLEPGGRRMDDGGWMLEGKNAVLLAFFPRLQPSEFREKPLLHTHTQASGRRGRAARYCGNKWQQVARAELPHPGNGRVCSEWKYGNTENSENLNACSPSRGKRRQVPAEESQLCVRPQIKIRIYEKCSLARQNELMQRSTMLPGVELLLLFLLSTSLHAEISHLPMASNRIILDSTELLQNPLIQDAGVPAARATPLPPQKCPSLQRYRKMLKDFDDLEDLYVDVPVHIALAERQRKR

SEQ ID NO: 6322 - DNA, 13222 bp, DROSOPHILA
gccgactgattgtggccatgttgtctgccctccgtctctgtgtgtgtgtgtttttgtgaaggtatagatttatcagtgttagtgtgggtgttcatgcaacgcgagtggcaagccagctgggaaaaatactatgcagagcgtacgcaacgggagcgcagcgagagatttttgcggcccattgagtgtgaattaagagatgccggcttagtgcgaatccttgcttatacatttatggtattcttttttgttcctcagctacactgcatatatggatccatgtatgccctcgagtggcggatgctggaggcagcccgacgaggatggatgctgggtactgagtactcctatgaggtttccgcatttcgcttttcagcatttttgtggcatgcttttgggggaggaacaaaattaaatctccctggtattggtgcagtaaatatcatttttaatctgaatattaaatattgtgatgtgtaatgcaaagaatgccattttgaactcttgaaaaaatgtgcttgtgctgtccttcaactacggtccttgcacatttgcaacaatcaaaaaggtcaagggatgattggtgcaataatttttgtttaagcagtgctccaaaaacttccattacaatttccgactgtcataagctgaattaatgctattcctaattttttttgcagctagcattaatccctaagcggccattagattgtcagcagaaaaaagatctacaagcatttgtgttatttaactcgttccacttttccatttcgcttttctatttgggcgaaagcgcgaaaaactcattccagtcagcataaatgaaagcttgcgtttgtttccgaaaaaagggaaatttacgttggcagttgcaatcccgttttgcgtgttgcaagggattccgcacgatttcctgttcgccacggacactttgcctcccacaagtcctgccacaccaaacatcacgtccttcgcacgtgcaaatgaaaataggtttgactttgcttatatataaaaaaatttattgcgtttaactttgcgggttgaggagtcgagaatgaacgagtttttcatgcttagcggcatgccaaaggtgggtatcttagcgctaaatggggtgggtattcctagagttgaatgaatcgcgttgatatgtcagctgcttggtttgttggtatcgacttaggatctatacttaaaggctagcgatatgttgatttggttgcttgcaatcgtttcacaaatgtacaattagtcgctgaaaccgaagactacagagataatacaagtaatccgaagtgatcttgagacctctgatgttctaactgtccaatttccgtttcaaaaacttcaaaggcccaaggcactctttcgaatatcttaaacatataattagaataccgataactagttcatactcattttatcctttcatttagtatgcaatggatgagcttacagactaagcaaatattaaggatttcgatttcgatcaaaattcaaatctcgcatgtaaatcgaacgaataccaatatatgaaaatctttcgaatctttcgattacaatatgtgtcgttgggatggcctagcagttcatgtagtttggcgtttcctcctctgccttggagtccttttccggagcaacgtcacccacattctggtagacctcggcctggacctcgatgctgcccacctggggacatggtactgggatctgcttgggtttgaaggagctgcatccgctggcggagctgctcttggttagcttgccgtagatgatgttcgatcgctcgttcagcttaatgggctgcagggtgactccgttctggttttggtagtgctgtgtctccgcctgctccttggcctccatgatggtgttcaggtagttgctgctctgggatccaaccagtggctggctgccgtacacgggtatgttcgaggggaacatttggtagtgctcggatcccgtgggactggtgggtgtgttcaagcgctggcaactggacatgggcgaggggaatacaatctgatgacgctcatcaccgggcgttgagctgggcgtaaagacgggtctcggtgtcggtggcaccatgtagttgtccatcatccggcagtgcgggaagcgacgatcctcgtgatccgagtgggtacccgaatctcccagcgaggcaccactgcaattgctgccggtgcttagtctgccggaggaggaactcgagctggacacactctgtaggctcagcgaactgatgggacgtccagctcctgcgctggagctcacgccccccgcggacttgaagctacagcttgtggctatcgatgacttggtctcgtccagcaggctgtcgtttcccccaggtgtcttggatcgcaagaagaacttcttgatccgctcgaaaggcgtttcgcgcttcagatgagacttcacctgctcctggatgcgctcgtactcgcgtcgcagctggtcgatctgatcctgtttctcccggaagctctgctgtacatcgttgcggtgcttccagcgttccaccagcacttccacgtcccgaatggagagcacgttgttcttaaaatcgtgcataatctcggccagctcatcgtcggcattggatcttgtgtgactggcggcggatgcgtcgctggcactgcgcttcagtgttccatatccgggctgtctgttggtgcaccgatttaaccggaggggctcctccacgggtctattcgatggctggaacaaatagttgccatcatcctgggccaccggcacattggagggctgcagtacgtagtcattgcccagttggttttccaaaagttgcgagcactcttggctgaatttgtcggtctgatagagtggcgccgcatccacttcgtccagggatttgctctggttcttgagttcctttggctgctggttctgctctttggactgatagtagggtggctcgttgatcctcaattcgttggtggtcttttccgggccaggttgattgccagcctcgggcagtttcttttcagattccaccttcttttcggccacggaagcctgcaggttttcgtcctcggtttccacacttatgtagttgagattcgagatagcaagggtttccgtcttggtcctcacttcaggtgtgttctcccgctccgatccactggacatctccatatactccgccgtgggcagttccttcggtggcttgttggtctttccggccttaacgggatgtgcttcaatcaccacattggcactgggcttgggacagctctcgcctggcggagtcactcccttgaagtagtggtacatggtggtcagttcgtgaaactctgcgaaactgacgatgttctgggccaacttgtgatgcccctcctgttcggccaactcggccggagtgcgtccggcgcagtttcttactccgcatgcggtgtcgccacctgggcactccatcagctggatgcacaggcgattcaggccccatctggcggcgaagtgcagcaatgtggggtactcctctggactggattccagacgggtgaagaagtgtggctgacgctcgctgggaccactcagcaggtggaagttgggtggcatgttgcgttggaagcactgcagcaagtgctgatcgagggcatcccgctccacgggtccaattcccagggcatggcacatgaactcaattggcgagtcctcaatacgcagcagctgctccagttcccgcagacgactctcgcacttgatgggcctggcacccagactcttgttgttcttctcgatgcgaatctcgatcatggtggagatctccatgcaggcctctgggatattgaactgcagggtgtagggattgcggcacttgaagttgcgcagctcgattagctcaccggacttctccacctgcagcttcagggtgtcgttcttctccagcggttctgccagcagagcaaccaccttgttttggcccagcttgaccttcttgggcagcacggtgaatccctcggtgcagctagagaagctgcgcgagagaccaccacctcctccgccagagctatcctggcacggtggtcgctggcacaacgcgcgtcccaggatatcggtggcaatgcccaggatattgctgatctgcacctggtcattgtcgcgcaccacacaacgacgccacttgtagtaactgggcagtgccgacttgtgcatctccttcaccttctcctcgctgacatccaacaaaatggccagtaccttttccacgcgaataatggccgatagctgggtcatcagaaagctgtgaggaagggccaaaagtgcgggacagaggatcacaatctgcaaagctgtgttctgatacttgtgggcaatctcctcgctgaagggaccatcgtcaattttgatgtgcagaaaactggaaaggataaatggatgccaaatatgtaagtcaaagtaaaaaaaaactatttttttttttaattattagagaattattaactcacttgaatggtttccgtccgcgctgtttggtgatcttgtcgaagtggttcttcaggaaagtggccctcaaataggcgcgctcgctgtgcttggcggtgatgatcaggatgtcgtccatgttgtagccgggagagcccaggaatccggatgcactcgatccactcgtgttgttcacgttgccgcagttgtctgcaaaatgagcaaaaagatcgtgggacggtcagtgaaaatgactcgaaaactcgattgactccgccttagaggagttgctgctgataagaaagcaatggcccacggcgacccctgaataatctccattcccatatatacgaaaacacatacatatatatatatttatatagaatgtctgtgtctgtgataaataatgtgtttacttaggatttgaccaacttgatttgtgacctcttcaaacagaccctactcccggaacacttttatttaacttcgcttcggggaatttgactttttggatcgctcaagcgccgctattcttcaatgtgcgataatcaaggactcaatgggaaagtgattgcataccaaagtgaggcactgtgtcacgtggatcggaaatgtttcttatctcagcacagcaggttttcaaaaattgagattttgattgagaaaatacactatcaacacatcagtttctcaacacattcctaatgtattatctttggattaatattttataatcattcacaaatcttgctcaacactttaagcatttcaaacaaaaatgccaggaatcttttgcactttccacacaccgacattccgcagtgacaatctctcggcgactggttggatttggatttagtggaaggaaaacaagagatctccagatgaaactaaataaaacaagataaattacggaggggcgcatatttttctatactcccgttttagccatataaattaggccggactaatcagttgttgtaccagcgatattctccctccttgagtttcaggttgccccataaattcagtcacgtttagcgcatttaaataaatctcctcggagcgaaacttacaagaactcaagcgttgatgttgcacacacgcacatggatggaggaggacaaggcgatgctatctcctggccaaaccgaaatccactgttgcatttgccagaatctgaacttcttgacacccacaaatggcggcgacgtcagcagaagtatctctatctgtattttgctctttcttcctgtcgcccaatacactttgcttctcggtttctctgtttttcctgcccgactttgccagatacgtacatacatatagtatgtgttccctgccctgcagctggtgctcattatgaggcaaaggaactggaaccggagctccattctatactaaacatgacgtggaaaaacaaaaatacgaggggcccactgatgtattttgcttcgtttcatttcagtcttcgttttcatatgcaaaatattgtcaaattttatttgatgccccctaaaaacgacccctgtgacaacataattaagtggaactgtgggtagtttgcaaaagctttgctttggcccttttcaatgattaattactgtgaccgaataaaagtttatcctgtccgcaggcagagaaaaaaaatgttgagtaaatatacatatttaaaatatttttaaaatcttttaaagtcttcagagaattaggaaaacaccattcaaattctccgctgcttatattaaaattcaaaatttgttttgacaaaccacaagttgattttaggtatatttggctaacattagttttgagttgttgatcctgatccgacctcgctcctccgccgactttggccttaatggcttttgtttcatttcagttggaaaactttgattttgtgactaaagtggaggaggcaggaggagcaggaggctgtcgctgcattgaaatttatttctcaattacatggcagacgacagttttgcgacagcaacgcggctgttgaaaattgcagggacggaatggaaaaagcgcagtctgacattgagttgctccgtggactatatattccgaattaactgagagtgggggaacatctggtaattgttaaatcgcatctccattttggttaagacaaaatgctccctttgttcatcatctttgtgcagctctgttgagtttcgttgcgtatttgcaatttgcaaatactccggcatttcggctgtgatcgatcacaatttaatggacctcccatcgcccagctgcatcccgacagaggcacaagatacgagatacgagatgcttatggaactcactcatctccatgtccacataatcctcctcctcctccttcgacggccttcgctgccccgaaacgcagctaaagaggcgacaactgcccttcgttggcattgtcacagttccacttccacttcgattttgatttcgattcgttcgtttcgaatttagcttaagacttcatcaaaaaacacaacgtttttgattgtcaagcgcgacgaaccgacttgtacatagcgctaattgtcgtcgaatggaactgctcgaaccacaattgtggcgctgtggtttgaccgcaaattgagcggctgcctaggattacgactttaattaatggattaaaactaacgcttctctgactgacagtgggcagttagggaatctggttccaaacggttggattgagtaatcttgcacatacatcaaattgattcttttatgcttatactcggtagcggcacaattagcattcttatctgattcttttctagcaaagaatactttattagtgtgacactatggtaacatttttaaacataaaaccaagaaaaaattacgaataaaatgaagaaaaaattacgaataaaatgttatcaaatgaaactgatttgttttagcgacaacattttatataatatagcaaaaagcaaacaacaaccgtttttcgctgaaataccattaagtccatttccaagtggctgcctcaaagaggagcccccatatattcccaaataattcatcaaaaatgttcttatagtgaacttaggccaagatctcttgatttttatgatgatgtgtggagagtggtaaactgcagagggtatagcaacaatttttgggggacgacaatttgaataaatgccaaccacggatggtgacattttgtgtgtgttttcttttttttttttttgtattttagcaagagacataaatcaacgaaaggcgaacacagaaatataaatgcgggattaaatggactgcagccacgaacgcgatgggttaaaggaggggcatattttttttgggggccaggggacaccggacgacacacaaattaaccctccccctcgagagtcaaacaaacagcaaataactcaaaaagcgctcatgcgtgtgtggtggatacataccataccatacagcccataacaattatcatttaattatgtcaactgtaacttaattatgcgcatatatcttttaatttgaggccagtttaccacttggatttggttaattgtcgacttccttgtgagattgcagcacttggcttcgtttcgtacgcatagtacttgcccattcattccctcggatctgaccaagccaagataaatcctttctcacaaaagttcagactcccttcttcgcctccccgcgtaatctaaattccgaattccccaagaggagaactctgacgttctcgcagagatttgtattaatttagatttggttcgcactaggcataaatcataagtgatttaaattgttttagttctagtttcggtaccatgtccagccatattccgccataccccgaacctccagatcgttaaatggaaattgctgttctcattgtctctcagtttagtttccctggcgcaaagtgtgagaatttctgacagctggacaccgggggggaaaattccaaaatggatgggggtgggttggagtggagtggtctaaatggaatgggaatgggcatggggatggtcagtcccaacgattataaatgacattgcatttgatttggcactcggtgtctgaatgtgcctgcatttgcctctcaattctggaggcaatctgtgtttttgtttcgggttcgagagaggtcagtggatggagcgatgttcggattaatgacagccttgtgcttctgtggtccacgaatgctccaattaagtgaaagatgcggtcaggaatttattggtgatggctgagataatgatactctactgatagttatggaaaccgtaagttttgatagatcttccgccagatacgcatatttcgaataaaacgccattaaatgaactacattctggcaacactcaatggagccctcgatgacctagtaaatgaagaaatttattttctcattgaaacgtctaataatgaaaacatttaggaacacatcataaaatagtgcatcgaacagggcttttccacagctccatttcacgcaactgcagctagtgaaaccatcgaggaatttcccgctaaaagcaaacataaacaacatttcgaaatttcactttcagccctaaatagcgaaacggcaaaaactatagctacaagaaaaatgaggcatcgaaccgttttccaagccataaacataaggaaaacaaatactaaagaaggctgaatggcgggggaaaattccgcggatggggtgcagcattttcacgctgcgtgccgcgtcatggaaaatgaagcacaggcatttcccatccccccacctcaaaaaaagggcacatatagagatttcccggtagggaggagttataaactctagatatggaaatgcgaaataggagacggcaatcaaaaagggaagttcataaatggcaaatcaagtaccaggcataaaatgcatttacttggatcgctactagggccttgacttaagccaagttcagaaaggcattaggcattttaatgcagtttttactgaattgtaaacaactgggaggtccgtggtaaaagtttctcatatctgatgttatttttgacgtttctgacattaatgttttgttattccgcgctgtcgctgtcataaaagggcttgtgctggctaccccgacttggatggggaatgtcagacatatagaatgcatatacatatacatatgccgacgactcgactcccacacacatgtttgcctccataattccgttaaaataacaataggcggcaactcttttttttttttttttgtaagtccattctattaatatagatctagattcgagggattcgtggtattagggcattgagtaattgtgcagcaggtgtcaagtgtcttgcctcattcgtcaagatgaactcgaagcggagaaaattgtaatttttcaacgaaaatattaaaattctcataagcagtgcggctccgattcgtgttaaactcaacatttgtggtcttataaaggggaaaattccacacatcatgccgaagtgccccgactaaagttgattaatgcccggcccagttggaaaagcgacaactttgtcaaacactccatcaaaaacacgattcaaatgctttgctcttgaggtgtttgtgttattttttacgtttcttatttattcgatgcacttcggagggggggaaatggggtggtatttatgtcactgcgccagcgattccactgatctatgaattctggctgccaataaatgtctccataaatttcagaagctacatttcaggcatcagaaggaggctcctaatacagtcataaatattttgttggccaatttaaaacaatgcacacacatcatttcatgtgaatttgatgggataactcgttgctgtgggggaagaatttcctgggaaatgtttagggaaatgttttccctactgaatggtttttctagaattggtaaatacttgccaaatgcatgttactctgttacaaaagataaaaaagacataaaaaagcattcagcaaataggaattacgaaaaacttgaaggctaatagacgtgagtaaaaagatccaataaattaaaccactaaaagtaatagctatagcccgcattttgctgctcagtgtaaacaagaaggctattttttttatggcaagcgtacaaaatcaagcgggaaaaaactgaaaaaaccaaacagccacgatgataacttgacaataatcaagtcaaatttttcgtttccgtttaataaacaagagcgagggagtgagcgaaagagagagagagagagagagagagggaacgagagagcgagcaggagcatctacatatgtgtttttgttgtttcctgcatgcaatttatgctgcaagcttcggctgtcgcagtcgcacgcacacttaaacagccttctatgagggatttccggtgcgtgtcgcagtcgctgccatgttacacactgagagaaactacttgtaacattcaaaaatattcgaagcaaaaagggtaatcaaaaattagctgtgataaatgacattttgagaaatatatatttaatatttgtaaattaaaaccaactacagttttaaaatatatcatcaaaatagcaatatttacatagtagcattaaccactcattgttagtcttgttcttctgggaaatttataacattttgaggatcattttgataattttgctcagtaagtttgttttgcgccgtctgcgcctgcgctttgttgttttttgcgccaactgctagttgtacgttactttctgcacaggcagtgctgttgttattgttttctgttgggggcatgtgcctgtgtttgtattggttatttttgtttttgcatttatgctgctgtggtgcggcacctgctgcccttctaccgcccctccgaacccaccccttttggcccagcgacctatccgcgactgttgctcagcattaacatcacgcacagccctttcaattgagtttataattgctgtttgcttatttgctatttttaaacgagcctggggaaaggaggcactgtgtggcacattcagaaatatgagcattattttgaagcctagtcgtcgaagggcacgcgctattccccagcacatctgcgttttttttttttttttttttgggatagcagctgcccggggttttccccctaatatcccggtttttatgtctggctttccattttcctgcccgttgtttttttttttttgtgatattaattagaatataggggagcagcagcgaagaaaaaaacgtctgaagtctagactgttttaagcggaaactcaatctgtgctctatttttgaagccgtgtccctcatctttcttttcgtgcacgtgccccccagtcgagtttggattaccaaaaataatggtgaggaaaaaaaaggggagaaggaaattgcttattccgaaaggtccttcaattaccatacagaagttttctccacttttataaatcgctttttctaaaagatccttcaatttacatgcagcagtgggaaccctttctcctattttaaatcactcgttgttatggagttcactgcctgaattttaagtgctggcactttgaagaacccgctctcgagagtttttcaactttggttgcgtaattgagtttcggtgtctatgaagataaacggctactcaccgcaacagaacgtctccatttcgatattttccactttcagcaacatgttgttattaattccaaaacctcagcacgacacggcacaaaacttagatcattatcaagaggtttttggctataatatatcaactcttcactgcagtttcttgggattgttctggttgttattttggattttttctactgcgcatgcgcaacgcttggagcgtcaagttgccacagtccttcaacttcgactggcaaaagctcggctttcgacttggctttgggccttctaccgcttttgttgaatgccaagaatatcaattagctctctctttctctcgcttcgatctgagatccctcgctctctttcccacccgttgtagggccaatgcattgggagattataaaataataaaagtcaacgcgccgtcgtcgtcgtcgtcgttgttgtttttgtacgtgcccgtgacgtttaatcaacgcattgtccattttaaataagcctttgatcccccccttcataccctcaccatgcaaacagagctataaacggagttatggcattttaagcgatcaacagatctccaattgtttttcgccaactcccgtagaggggaagccctttatggaagacccaccacaacagttaggaatccaactgcacaaaacttgtaaacatataaaaatattaaatttttatttactgccatttaaatggcggcaacagaaactccagacaagggcagccataacagcaataaaataagaaatcataataaaacttaatgtgccgagaaatatattttcgtaaatggctaagcaaagatggcaagctgagattgatttctggcaggttaagtgggcataaatcttaaaggggagatggaaaccttaacttgaaagtactgggagagtaataaaaaagtaaatattttgaaacttggaaaaattaataaagaatttacccacatataaattaacgatgtgttatcttagcattttgatcctccttattatcgccttttataaaatagttgcaacaaagacaggaaaaaagggaaacctccgaatggaaacgtgagcaaaatattgttaatatgttacttatacttgaatttatttttggtggagtaggtattattatcctaccaaaaattatgttaattac

SEQ ID NO: 6323 - DNA, 3727 bp, DROSOPHILA
atcccaagaaactgcagtgaagagttgatatattatagccaaaaacctcttgataatgatctaagttttgtgccgtgtcgtgctgaggttttggaattaataacaacatgttgctgaaagtggaaaatatcgaaatggagacgttctgttgcgacaactgcggcaacgtgaacaacacgagtggatcgagtgcatccggattcctgggctctcccggctacaacatggacgacatcctgatcatcaccgccaagcacagcgagcgcgcctatttgagggccactttcctgaagaaccacttcgacaagatcaccaaacagcgcggacggaaaccattcaattttctgcacatcaaaattgacgatggtcccttcagcgaggagattgcccacaagtatcagaacacagctttgcagattgtgatcctctgtcccgcacttttggcccttcctcacagctttctgatgacccagctatcggccattattcgcgtggaaaaggtactggccattttgttggatgtcagcgaggagaaggtgaaggagatgcacaagtcggcactgcccagttactacaagtggcgtcgttgtgtggtgcgcgacaatgaccaggtgcagatcagcaatatcctgggcattgccaccgatatcctgggacgcgcgttgtgccagcgaccaccgtgccaggatagctctggcggaggaggtggtggtctctcgcgcagcttctctagctgcaccgagggattcaccgtgctgcccaagaaggtcaagctgggccaaaacaaggtggttgctctgctggcagaaccgctggagaagaacgacaccctgaagctgcaggtggagaagtccggtgagctaatcgagctgcgcaacttcaagtgccgcaatccctacaccctgcagttcaatatcccagaggcctgcatggagatctccaccatgatcgagattcgcatcgagaagaacaacaagagtctgggtgccaggcccatcaagtgcgagagtcgtctgcgggaactggagcagctgctgcgtattgaggactcgccaattgagttcatgtgccatgccctgggaattggacccgtggagcgggatgccctcgatcagcacttgctgcagtgcttccaacgcaacatgccacccaacttccacctgctgagtggtcccagcgagcgtcagccacacttcttcacccgtctggaatccagtccagaggagtaccccacattgctgcacttcgccgccagatggggcctgaatcgcctgtgcatccagctgatggagtgcccaggtggcgacaccgcatgcggagtaagaaactgcgccggacgcactccggccgagttggccgaacaggaggggcatcacaagttggcccagaacatcgtcagtttcgcagagtttcacgaactgaccaccatgtaccactacttcaagggagtgactccgccaggcgagagctgtcccaagcccagtgccaatgtggtgattgaagcacatcccgttaaggccggaaagaccaacaagccaccgaaggaactgcccacggcggagtatatggagatgtccagtggatcggagcgggagaacacacctgaagtgaggaccaagacggaaacccttgctatctcgaatctcaactacataagtgtggaaaccgaggacgaaaacctgcaggcttccgtggccgaaaagaaggtggaatctgaaaagaaactgcccgaggctggcaatcaacctggcccggaaaagaccaccaacgaattgaggatcaacgagccaccctactatcagtccaaagagcagaaccagcagccaaaggaactcaagaaccagagcaaatccctggacgaagtggatgcggcgccactctatcagaccgacaaattcagccaagagtgctcgcaacttttggaaaaccaactgggcaatgactacgtactgcagccctccaatgtgccggtggcccaggatgatggcaactatttgttccagccatcgaatagacccgtggaggagcccctccggttaaatcggtgcaccaacagacagcccggatatggaacactgaagcgcagtgccagcgacgcatccgccgccagtcacacaagatccaatgccgacgatgagctggccgagattatgcacgattttaagaacaacgtgctctccattcgggacgtggaagtgctggtggaacgctggaagcaccgcaacgatgtacagcagagcttccgggagaaacaggatcagatcgaccagctgcgacgcgagtacgagcgcatccaggagcaggtgaagtctcatctgaagcgcgaaacgcctttcgagcggatcaagaagttcttcttgcgatccaagacacctgggggaaacgacagcctgctggacgagaccaagtcatcgatagccacaagctgtagcttcaagtccgcggggggcgtgagctccagcgcaggagctggacgtcccatcagttcgctgagcctacagagtgtgtccagctcgagttcctcctccggcagactaagcaccggcagcaattgcagtggtgcctcgctgggagattcgggtacccactcggatcacgaggatcgtcgcttcccgcactgccggatgatggacaactacatggtgccaccgacaccgagacccgtctttacgcccagctcaacgcccggtgatgagcgtcatcagattgtattcccctcgcccatgtccagttgccagcgcttgaacacacccaccagtcccacgggatccgagcactaccaaatgttcccctcgaacatacccgtgtacggcagccagccactggttggatcccagagcagcaactacctgaacaccatcatggaggccaaggagcaggcggagacacagcactaccaaaaccagaacggagtcaccctgcagcccattaagctgaacgagcgatcgaacatcatctacggcaagctaaccaagagcagctccgccagcggatgcagctccttcaaacccaagcagatcccagtaccatgtccccaggtgggcagcatcgaggtccaggccgaggtctaccagaatgtgggtgacgttgctccggaaaaggactccaaggcagaggaggaaacgccaaactacatgaactgctaggccatcccaacgacacatattgtaatcgaaagattcgaaagattttcatatattggtattcgttcgatttacatgcgagatttgaattttgatcgaaatcgaaatccttaatatttgcttagtctgtaagctcatccattgcatactaaatgaaaggataaaatgagtatgaactagttatcggtattctaattatatgtttaagatattcgaaagagtgccttgggcctttgaagtttttgaaacggaaattggacagttagaacatcagaggtctcaagatcacttcggattacttgtattatctctgtagtcttcggtttcagcgactaattgtacatttgtgaaacgattgcaagcaaccaaatcaacatatcgctagcctttaagtatagatcctaagtcgataccaacaaaccaagcagctgacatatcaacgcgattcattcaactctaggaatacccaccccatttagcgctaagatacccacctttggcatgccgctaagcatgaaaaactcgttcattctcgactcctcaacccgcaaagttaaacgcaataaatttttttatatataagc

SEQ ID NO: 6324 - protein, 1012 aa, DROSOPHILA
MLLKVENIEMETFCCDNCGNVNNTSGSSASGFLGSPGYNMDDILIITAKHSERAYLRATFLKNHFDKITKQRGRKPFNFLHIKIDDGPFSEEIAHKYQNTALQIVILCPALLALPHSFLMTQLSAIIRVEKVLAILLDVSEEKVKEMHKSALPSYYKWRRCVVRDNDQVQISNILGIATDILGRALCQRPPCQDSSGGGGGGLSRSFSSCTEGFTVLPKKVKLGQNKVVALLAEPLEKNDTLKLQVEKSGELIELRNFKCRNPYTLQFNIPEACMEISTMIEIRIEKNNKSLGARPIKCESRLRELEQLLRIEDSPIEFMCHALGIGPVERDALDQHLLQCFQRNMPPNFHLLSGPSERQPHFFTRLESSPEEYPTLLHFAARWGLNRLCIQLMECPGGDTACGVRNCAGRTPAELAEQEGHHKLAQNIVSFAEFHELTTMYHYFKGVTPPGESCPKPSANVVIEAHPVKAGKTNKPPKELPTAEYMEMSSGSERENTPEVRTKTETLAISNLNYISVETEDENLQASVAEKKVESEKKLPEAGNQPGPEKTTNELRINEPPYYQSKEQNQQPKELKNQSKSLDEVDAAPLYQTDKFSQECSQLLENQLGNDYVLQPSNVPVAQDDGNYLFQPSNRPVEEPLRLNRCTNRQPGYGTLKRSASDASAASHTRSNADDELAEIMHDFKNNVLSIRDVEVLVERWKHRNDVQQSFREKQDQIDQLRREYERIQEQVKSHLKRETPFERIKKFFLRSKTPGGNDSLLDETKSSIATSCSFKSAGGVSSSAGAGRPISSLSLQSVSSSSSSSGRLSTGSNCSGASLGDSGTHSDHEDRRFPHCRMMDNYMVPPTPRPVFTPSSTPGDERHQIVFPSPMSSCQRLNTPTSPTGSEHYQMFPSNIPVYGSQPLVGSQSSNYLNTIMEAKEQAETQHYQNQNGVTLQPIKLNERSNIIYGKLTKSSSASGCSSFKPKQIPVPCPQVGSIEVQAEVYQNVGDVAPEKDSKAEEETPNYMNC

SEQ ID NO: 6325 - DNA, 4016 bp, DROSOPHILA
tgaggcaccggcaatgctcctgtagaagccaaaagactaaaaacggcaagacccagtatgaatgacagcttcattttgtttactttactaaattttcaagcctcttcaaaaagatttgtattccgatctgacataaagtttaatggtaacgcgatgaatcaataatataagtaactatcgtagtagtcgtattccgaatcatcatagtagtacgatccttcctctgattcctcacttgattcggagctctcatcttcggaggaatcttcagatgactcatcttcggtggaatcttcagatgactcatcttcggtggaatcttcagatgtcacgtcactttccgtggtggtggttgtttcggtgaatgccttagaagtctcagatgcttcactagtttccgccgacgaagatgaaggtactgtggtcacctcaaataccttttcgctggagctttcagtcaatggtgatagttgctggctggaactttcaggtgcttcactagtttcctcagatgatgatgatgatggtgaagttagtgtgggcacgtcagaagtcacagtggatggttcactggttgcctctgtggacattgatgacttggaagcaacactttctttggtcaaaacattggacaatcgaaatccaacttgattttgggaaatttgcgagtttattttaggtctggcagctgcgaaggccaggaaagctataaagtaaaagcaaacacgttgagcgcggaacattttcggttgaatattgtggaaagagtggataagccttccgtgcctcgtgaggtttatatacctatcttgaagtttaggttactaatagttattcccagctgacttacacactcgctagatggtttttctttgtgaatagttcgccataaaacttaattggctcacgttgttgcgagataagaagtaacttaaaaaaatgtttctagaaataggtgtactatttataataaattctctataaaagaaaaataaccaattataaataccaaacttctatttcatcaacaaatgtacacatattaactaatatcctactcttccgtggagttctcaatatcatcttcccgtggaggcggttccgtttgccacctgtggcccatggcatagggtggctttgagtaggttttcacatagaaagttccgttcttggggattgagggctccccgcccatccggaactctccatcgctcattaggagcagccaggtgccatcatcgtgacgctcgcagcgcggtccccaaaatcccgccggactcgtcagcgactctatgaagtagtcatgggatctcttatgagaacagccatagacatagcatttcttctgattcttcccatagttgggatagaaggtggcgtgtcccacgggctgctcgaagccaaagctaacgctggtttgaatggactccacataggaggcgtcactagcatcgattcggtactcgtcgctcttctcccggaactgtggacccgccggatccagagcgtatatggtgttgaatcgatatggcattatctgcttgccagcactgccggcgatctgcgctcccagagagtgtccaatgacgtatacgtcgtcgtagtgcatgttcgcctcctggttcagatagcgcaccagttccgccagcagggctcccatgtcctccaccgtcttggccacctcgtagtagtttacgttcgtggaagtcttgctccagtcacatacgatcacattgaagtcctcgtagggggcgggctctccgttgggtcccggatcggtcaggctgaggtatgcgttcttaaccttccttatatgcgaacctttgctctgactcatccagccatgaatgactatcctaaaaataagcagtcaggaaagtcaatataatatatcaatgtatactaaactaatagcaattccctttaaaataaacatatttcaattcatttatgtatatatgatatcaacttcgcctgatatcttatcttttaatgcaaaattggtgtattgcttggcgtatttggtgtaaatttgtgcaattactatctgttagctattataatgaattaacttgtaattagcaataaatcaattgtcaggccaatggcaatgactcaatggcgataattcaaacgaaagctcaaccaaaaaatgtaaatatataaagcagagaaacctgttttcgtgttagtcgcgaaatataaaaaataaattatttggtgagagaatctagcaaatatttgttttggttctattcattagattggtgctttgctctcacattaatttctggggcttagtggtagtatgaatactaaatacactgtcaattgttgcgagctgaaaggtttgtacagcttttagccattatctcaccgttcagtgtaatgaattgattgtggcacactcacttcgctgcaaagttccccattcgatcggggctttaatcttcccggaaatcccccttaccttgtttgatgacgtgcatcgaagcccgagttcctcaggttttccacatcgcccacgaacagttcccttccgcagtccgcgaagtcccgcttgaagagtatgaactgcattttgcccctcgaactcgtgaagggtatgaggtgcttgaagaacttcttccagaacgagggatccacccccaaggtcttcttcttcaccagcgtgtagttgcaggtggcattgggatcgagttcggttttctccgagctgctggctagttaaagacgatatagcaagcaaaccaaaaatatatcaatcaaatgaatttctacacagatctgtgataagaccttgaaatgtgtgaatattacccaccaaatacgatggccgcaaatgccaaaagcaccgcactcatgatgctaatccgtcccagctgcgagatcatggctgttccaagatatctccctcggggcttctgaccgatcgagtgtagtgcgtccgatgaccgatctccaccgttataaatttcgaacgccggcggaataagccgcagatctgaccggtcgactggtgcgtgcgcaaccaactgacacagctctccgccaatctctcgatggtcgagcgttgcgagctccactttccgaatcggagcggagagcgcggcgaccccaagtctacgctcagtgggttactcactccagtgataactgatcatcgcagctcgctcactctctctctctctctctctctctcctcatagatcattatacttccttatagagagtatcgattaggttagcaggctgatgatcttgaaaattagaggtataaagaaatataaagtgctgttatctgtttaaaacaacaaaaactcatgaaaattataagtgtattatgcagttttaagtaaatatccttaaaaaaccgacaaattgttatgattatacaaaaccataagcccttctggcgctaattggcacgcataaaaggttaaccgatccatcctttcttaacccagataagttaattaccccattaagttgacctgctgtaaaatacagaaaaaggcagcgtaatgagtatggttttccgaatcctggggccacgtttttatggctgtcagtcagcgcgaatgcttatcgcagatcccgaaaatgctcagacctatcggctaattgcgtggtcctaatcacattcgaaacccgcttaattaagcatccccgagtgcataattcattaatccaaactcaaatgaggcgacaaattttcagtcacttagcgagtcagtttttcggctggcaaagaaaatggaaaattggggcgggtgggttttcttgtggcctttcttgccttccacctgcgccacatgaaaacgttttaattatgcaaatttgggctgctgccttgttgattagaaaatccgcgaggggcaaagcgagttacttgagccctcgacaaggtatgcagttcacctcagattggcacaaggacctccaggcatcaatcaatacgcaaacagatcctgggggggcagggcaaacagcccatccaccacgagaccaataaa

SEQ ID NO: 6326 - DNA, 1301 bp, DROSOPHILA
tcgaccggtcagatctgcggcttattccgccggcgttcgaaatttataacggtggagatcggtcatcggacgcactacactcgatcggtcagaagccccgagggagatatcttggaacagccatgatctcgcagctgggacggattagcatcatgagtgcggtgcttttggcatttgcggccatcgtatttgccagcagctcggagaaaaccgaactcgatcccaatgccacctgcaactacacgctggtgaagaagaagaccttgggggtggatccctcgttctggaagaagttcttcaagcacctcatacccttcacgagttcgaggggcaaaatgcagttcatactcttcaagcgggacttcgcggactgcggaagggaactgttcgtgggcgatgtggaaaacctgaggaactcgggcttcgatgcacgtcatcaaacaaggatagtcattcatggctggatgagtcagagcaaaggttcgcatataaggaaggttaagaacgcatacctcagcctgaccgatccgggacccaacggagagcccgccccctacgaggacttcaatgtgatcgtatgtgactggagcaagacttccacgaacgtaaactactacgaggtggccaagacggtggaggacatgggagccctgctggcggaactggtgcgctatctgaaccaggaggcgaacatgcactacgacgacgtatacgtcattggacactctctgggagcgcagatcgccggcagtgctggcaagcagataatgccatatcgattcaacaccatatacgctctggatccggcgggtccacagttccgggagaagagcgacgagtaccgaatcgatgctagtgacgcctcctatgtggagtccattcaaaccagcgttagctttggcttcgagcagcccgtgggacacgccaccttctatcccaactatgggaagaatcagaagaaatgctatgtctatggctgttctcataagagatcccatgactacttcatagagtcgctgacgagtccggcgggattttggggaccgcgctgcgagcgtcacgatgatggcacctggctgctcctaatgagcgatggagagttccggatgggcggggagccctcaatccccaagaacggaactttctatgtgaaaacctactcaaagccaccctatgccatgggccacaggtggcaaacggaaccgcctccacgggaagatgatattgagaactccacggaagagtaggatattagttaatatgtgtacatttgttgatgaaatagaagtttggtatttata

SEQ ID NO: 6327 - protein, 374 aa, DROSOPHILA
MISQLGRISIMSAVLLAFAAIVFASSSEKTELDPNATCNYTLVKKKTLGVDPSFWKKFFKHLIPFTSSRGKMQFILFKRDFADCGRELFVGDVENLRNSGFDARHQTRIVIHGWMSQSKGSHIRKVKNAYLSLTDPGPNGEPAPYEDFNVIVCDWSKTSTNVNYYEVAKTVEDMGALLAELVRYLNQEANMHYDDVYVIGHSLGAQIAGSAGKQIMPYRFNTIYALDPAGPQFREKSDEYRIDASDASYVESIQTSVSFGFEQPVGHATFYPNYGKNQKKCYVYGCSHKRSHDYFIESLTSPAGFWGPRCERHDDGTWLLLMSDGEFRMGGEPSIPKNGTFYVKTYSKPPYAMGHRWQTEPPPREDDIENSTEE

SEQ ID NO: 6328 - DNA, 3181 bp, DROSOPHILA
tgtatagaaggtgaacatataatagtgactgctactcacgctaaattcttgcccagttcactgcacccttgcagttttgatagttttggcagattaggagagacggcaaatgtgcaatctaatatctattgacaattgctgcatcacacatattgaaaatattatcgataagccttattagtttttgcagttttgcaagcaatacagtgcggatcctgagaggtctcactgtgtcttcaaggttcgcctttagaagtcaaatggctcgaagaagtctaagcggaatgtagaatgtagccaaatatagaacacctaccacagatcgcattagtttctttctttcctacgatatttactccttcaaaatcgatgcgcaaatggtttttaaggaccagcgcctgcgcagcacttgaccaaattcaggtaacggcgaatcttattttatccacttcaaccacatacgatagaaaatattaggggagagatgtgtgcgtgacaattagatagtggattgtacatccgatagctcaggtaaacaacaaccaaacatacctaaaacttaaacaactctttaatttaacgtaaaaataatcgatgacattttatgagcgagttccgagaaaacgtttaataaattattaccccattgggtgttcgtgttcgcacaacataagactctcatctctacattttatgagtgaaacattcgtttgagtgaaagtcgatttccaaccctgttatgatttggcgggaaacttaaatacttggatgaaattttttgtataaagagacatttcatattttgtatttgtagtacttaaattctagttttctagtttgcaatgcctcgttcatcgttattatggcctgagtgatttcgaactttctttagagccgtatgcttagttctgtttttttgaagacttcaatgagatgttcattaaatcgtagagtgacaaatgcaggaatatcaaatgacgtaatagtagaagtcaagggtttagaaatgatttgccacggtgctctgttgttcgccgcggtttactcgcaggttgcccatgcatccctcaaacaggatgtctgcgatggcctttcgtgccagaatccgttgcgtgggggacatttcctcgtactggatagcccaggatctggccagaacttcggaggactcgctgagttgcatgggtgcagttcctcgttcgttctcgggatctgtttgaatcgaggatgtgggttctttcgtttccaatgaatttcccaaactattttcctctttgacttcacactgcccttcttccggctctatgatctccaattttggactgagcagggaaccctcttcggattgcggggcggtcggttcggactggtagttgaaagcgttatcatccttgatcggccaatcacaaacgctttccgtgttgagatctggatttttcaaggggtatttgtcctatgaggtacacaatttatttatttttaagtatcattcaatcattgagaatgtaatcttacatccttttccctgcgaaaatcttgcttctgtctgccgccccgaccttttctggtcctgtgctggaaggtctcctgggtgaggagaaatcccatgtagtcgtagaaccagagcgtcggcttacagagatcggagtgcagccccagctccttctgcttgaggattcgcatctgctcccgcctgtaattggtgcgaaatatgttgatgcgcctgccgacttctgtgcgcgtagcgttcggctgtatctcccgtagtttcctctccagcaactcatacgcccggtttcgcagctccttgttccggtaattgaggtggtggacgtcccacagctccggcattccctgataaagggccagaaactcgcgccagaactgccgtttgcccgcactaaaccgatctggcagtgcagctgccatctgccagcacagcattcagaaagatacatttaattaccatatccattggcatataaacataaatatttactttttctgttgttcaagccaatcagctgttgttgattacagttggccagagttgccacttctagcgtctagtgttggtaaacacctcacatactcccactgattgttgtagttgctctggatctggatgctcatatatgtataaacttatttccaccacctgacgaccggcgttatgctctcctcaagcgacaatcacaaactgaattgatgtagagccgaaacgggcgggtgtgtgtgcatgtgtctcgattgagtgattgattagccgactgacccgatgggcatgtgcatgtgtgcgtgtggaaatgcacaataaatcatttgattcccacatactgcttgaaaacaaaaacgtagctgaatccgattttcttattgtattagttttaattatatggattaaacaatgacttacagctcccccgcaatttaggtgcacgtgtgtgcgggagaggaaagcagcaaatattcagactttaactaagggcagacctgcgcacttacccatcttagccccaatcaagattgtcggcataaggaaatcatcagcaaagtatgaatttattttaactcgctctccaaaatttcacactgatcagggaaaattttaaaatacactctgaatcagggaaattctctctttaacaagatagaattcaatgattgacctctttgttccgttattttcatttacatgcgctttgtctctttctctcttctggctcgcctgtgtgtgtgtgtgtgggtgacctcccgcccggcaaaaaaagaagaagaagcccaactaagggcagacatgcgcacttcgaaaaaaaaacaattagcgcgtatatttagccgactttttgttctggcgagaatgtgtggaaggaaatgtagctgttataacatacaacacaggtcaaaataatagggttacagtcgggagcatagtataaaatagttccaacagaccaattgacaattgacattagctcattcatcacaatattttataaccacatcaaatttactcactagaaacttggtttgattgcgtttatttggttcgaatacaaattatgttcaccttagatctaatgattgattgcatccgaccgatgtgcatcttctagatgcatcagtttgcaaagattacactctttggctgcagctattcctcctcctcttcgttctcctt

SEQ ID NO: 6329 - DNA, 1049 bp, DROSOPHILA
gagagcataacgccggtcgtcaggtggtggaaataagtttatacatatatgagcatccagatccagagcaactacaacaatcagtgggagtatgtgaggtgtttaccaacactagacgctagaagtggcaactctggccaactgtaatcaacaacagctgattggcttgaacaacagaaaaaatggcagctgcactgccagatcggtttagtgcgggcaaacggcagttctggcgcgagtttctggccctttatcagggaatgccggagctgtgggacgtccaccacctcaattaccggaacaaggagctgcgaaaccgggcgtatgagttgctggagaggaaactacgggagatacagccgaacgctacgcgcacagaagtcggcaggcgcatcaacatatttcgcaccaattacaggcgggagcagatgcgaatcctcaagcagaaggagctggggctgcactccgatctctgtaagccgacgctctggttctacgactacatgggatttctcctcacccaggagaccttccagcacaggaccagaaaaggtcggggcggcagacagaagcaagattttcgcagggaaaaggatgacaaataccccttgaaaaatccagatctcaacacggaaagcgtttgtgattggccgatcaaggatgataacgctttcaactaccagtccgaaccgaccgccccgcaatccgaagagggttccctgctcagtccaaaattggagatcatagagccggaagaagggcagtgtgaagtcaaagaggaaaatagtttgggaaattcattggaaacgaaagaacccacatcctcgattcaaacagatcccgagaacgaacgaggaactgcacccatgcaactcagcgagtcctccgaagttctggccagatcctgggctatccagtacgaggaaatgtcccccacgcaacggattctggcacgaaaggccatcgcagacatcctgtttgagggatgcatgggcaacctgcgagtaaaccgcggcgaacaacagagcaccgtggcaaatcatttctaa

SEQ ID NO: 6330 - protein, 288 aa, DROSOPHILA
MAAALPDRFSAGKRQFWREFLALYQGMPELWDVHHLNYRNKELRNRAYELLERKLREIQPNATRTEVGRRINIFRTNYRREQMRILKQKELGLHSDLCKPTLWFYDYMGFLLTQETFQHRTRKGRGGRQKQDFRREKDDKYPLKNPDLNTESVCDWPIKDDNAFNYQSEPTAPQSEEGSLLSPKLEIIEPEEGQCEVKEENSLGNSLETKEPTSSIQTDPENERGTAPMQLSESSEVLARSWAIQYEEMSPTQRILARKAIADILFEGCMGNLRVNRGEQQSTVANHF

SEQ ID NO: 6331 - DNA, 9183 bp, DROSOPHILA
gatccgccctccgaccaggtgcaaccggatccgagtagcctacggcggttcctcagctacaagcaggaggtgttcaccatttacaagcagtgcggtgactcgtcgagtgcgtcaatcgagtcctccgcctgataggcggtggtcataaatcacccgggtgcatttgtcggatacgggggccaacggttagcagaaccccagaacttgattgatggatggatccagcccccattcactctgtacaggcgcaaaaacggtttgtcacggtgggtatatcacccacgaatacactagcacgcatataagatataagctcacatattatgtacctcatcaaatgtgtaaatatgaggaataaacgaatgggtgttggcagctaactaaccattaacacatggcgcaatcgaaatcgggaaggtctcagctattattgtgacgaaaacctaagacctttcaagtaccacttaaaactatatttagagaacttaagcaaattgtgagattaaaatgcaatgcaactcctaaaggtgcgaatatacctattcttaaatatttttactctagaaatactgacatctttatgtgcttagttttcgttcagacagactatctttgttatttctaagaacgtagtaattagttaatggaattaattagtaaccgaaacttaaaattgagtcatgccaaaaaaagagaattggcctgacaagacacacattatagagtcagcagatcgtggacgagacaatgagcccgcaatgcaatggaactagattgtatcatatactagatacttccgcttggaacaatggttaacagatctcgtgagagatggggctgaaagcagttgttaattgtcaaatgttgagcacgccagttaaatttagctatgcagcgaaagctctctcccatactctcttcccatgaacttttttaagccgcagagcccgaagctcgactcaaagctgaattctgcgttttctggcattcagtgtcggcggtttgcggcgagcggttggattcggattctttggtcggtaaaacgcgaaatcttctgtgcggcgggtgaaatcttcggcagaagaaacaacaaagcgacaagtgtggagtgtggagtgcataccgtaccacgcagagataataattcggactgtgaagagtcgtgagccaaacaaatgaatcgcaaataaatgagggcaatcaccggagcagagatgcgagttatggcacaatattgcctataaatagtgtaactgaaggaaagaaaaagtggcagccgtcgaagaaaacacaagaaacgaaaagggaaagagccgagccacaaataaagctaaagaaaacagaaatcgaaagaacaaaggcgggtttgttgtgggtcaagaacgaaagttcggcccaaaagtgcccgttccgtatcgattgtgcatttttgagcggttttgaagaggtaaatatgcgaagtctgcggcttgatctgtgttttggtttggattcgattcgattcgattcgaaaccagttgctcgattttctacactgctacatatttcgtcagaagcaacgcgtcaggaaaaacacgtttgcgcatttcactttgggtttcttaacttgtcacgcatgcgcagaccgtcttgcgaaatcacttttccctgcccattctaaggatcaccagtccattcattgcgcagacccgtatagtgggattcatccaaatggctacttctggttacgcggctttgcgctttcgtttggcattctgttcttcgtttctatttgcgtgcagtttgctgtaagccagctagctagctattcgaggtacgatgttggctatgtgactgcatgtttaattagcccccgctaaccaaagtgttcgggccacaaaagcaaataaatgggccagtatttggtcatgacgaggctggccaatggccaccatcccgtccactcgaatggcaatcaagacaaacacgcactccccgaagcttgaccatgaatactaagttgctggagaggagatcgaaatgtctttgatattagatcggaatagctcatttttctagcacctacgacgtgccttaaatagcaataaatttctgtacagtcatgagtaagccgggctaaatgggccagttctgggccacattctcccgatcgaagctttcttttgtgaaatcaattaaagactatcaatcacttttgggaaattacacacgaatttccgagggaaagaaaagaaactcactttcgttttcatctggctagtcgctcccatcacccgtgcctttcctaattattataaaaccagaaatgtccattaaaacattacatgcagcgtggccgcgactgcagcattatacaatagactctaacagcaaagccaacaagatgggacgcagtgcgtcaagccctgggagattccgattcagattgagatggtaaatggtaaatgggtagccatgggcgtggaacccactccatttagcacatgcccgattgttttggacacaacaaaggcggacgagcgatgaaattattttatcaaaaataatttctaaagaaagtgaaagtttgtcgggcgggcacacattttttcccgttgcgggcccttttctcggcgcaatcgagcccaaatgaatggatccaatactgtgaatgagaaagctggacaacagaacgctcggctgcagatggtgcgtgtgtgtgccaaaaatccaaatccattcttccgaccacgtgctgcaggtggtagtatacatagatatggtcgatggaaccggttggccaaagagtctggctttcggctttcgaccgcgctcgtcttttgatagttttgtaatgcctttttgatggctgtaacttgacctgcattcagctggaaattagtgttgtcctcggttaaccttgtccgcgaaacgagtttcccgccatctgtccccatcaaatgtgttaataatgcatcgcatctttactacggccaagcccgtaccggcgccctagagaagcactttcgatttttgctcgagccaccgcggcaaataaaaagtgcttgcaccctcggctattacagtacaacgacgatttctctccgcgtccagaggccaatgtaccttcgtgcgacacttgtccatcgtctggctgtctgcctatccgccatgtctgtctggctggcgggctggctggctggctttagctccatctccatctccatctccagctcgagctcacggatcacggataatgtgcaaggaggcatggtcagccgttttggcttggccatgccaattggacggcattgagcggggcgcataatgtgggcctggccccccacaaaacacgaagcacccagaaagccgccaccacaaacaaatcaattggcttcggttgctttgtttactcgcacttgattgttactttgaatgccgtgtcatgtgatacaaagctgtttggatggctgaaccatcaactggatgtctcgagatgaccctgggtcaaagacacgatgaatttaatcattaaatgtcgcatacagctgtagttacaaaagtctgctgttcgaaggaactttaatcataggaaattaaaatagaaattatattcattagaaatcgcggacaagtgtttaatgtatcgcttgcaagtttattccgaacaattgaattcaatatccaaacacttaatctaaactattttgttgtttaattcctgtttacccactacatatttactttgcgtgttcaacgcgttatttagttcacactgataaagccatttcctctgaaaacaactgcatcttgatagcacagtgccaacaaaaaataaaaaatctgagcaaatagtgtacaaactacatctggtcaacagatgctgataaagcggcttgataaggccatctcggaaatcagtaagtgagctgatagcaaccgatataagcttatattgtaaatacagcgcacatgagtcgccggcaactgtggactacaaatgtatctgtcaatccaaataaagcgccgccacaaatccatctaatgtggatgcatcgggaggtgacattccccgatctgccgactttgccgatgatgttgttcttgtttgtggctgttgctgctgttgttgatgcttttgctgctgtgttgtgggcgtccaaacatgtctgccattacagctaacgagattttaagtgctgtcaaatgttgatgaaagcgactaacaccagcacacaaattgaaatttagattcggaatccccagtgacgagccatcggaggggtcaagtgaaaaggggttgggcgggagggtcggttgagagtgggcaacaggatttgtggcccagcaaggtaatgcgacaaaagccaaggggcaatttacggtctgcatggagaagatacctttatggctgaataaatgagcaggatttgcaaacaggtttgggttcattcattctggctcagtcatggcagcagatgtaataactcggtaaaacaggatttgacttttggcctgcaaaggtagagggatttcccctaggaaaagcatagaatacacctaacacattgccccatgtcttctggaaaagtctgaaaactcggcaaatatttccattgagctggcaagtgggtaaccactcaagagagagctattatcgagttatagctgccggtttacttatgagcctgtcccctgcattacataaatgtttatgatagtgcccataaatcaggcagcgaagaaactgcatgctgacgaccaaaacaaaccgaaaacgttgatgagccactgaacatactcgtacctacgaaggcggcgtaatgaaacccgtttcacaaagtaatgactctccaatttgctgtcgcttaatacgagtattgttgttttctttttccgggtaaatcatgttatgtaggtcaagccgcatactccagtccacacctggttgaacctggcgtagcgaagtccacgagtccgcacattatgacacagcaacagccgccgtggccaagtcccatttccagctccagttccaatcccaggggaaaatgctggctcatcctcgtacttatggctgtgctcccactggtggcagatggtgagtagatgatggggttagcaacaagtcagtgtctaactaagactattcctagttggagccctgcccttcctgttcacgcacatcaagccgcagatcaactggacgcagccggagatggagagctgggtaattgaggagcagccgcgcagcatcgagccccacctggagccagtgctccatccgaatcgcacgcaccgcgctctgtcttcggacagcacggatgcggagttcctgcagaggttggtcagcatcaggcacaaccagacggccagttccaggatgctgtggtacgacgtggccggcggagatgggctggtgtacccaccgttcgtggacaaggccctcaagctgctgaacctcaagcaggtggcctttgagatcgaaaacagcgtgatgtccaaggtgacctgcaccgcctgcagagcgggagccgggatgctgcagcatcagatccagtcgggcaagacggatgcggagctcattcgcatgatcacggactactgcaccaatctgaacatccagagtgcccgggtctgccagggcgtagcccaactcttcggcagcgagctgatatacgtgctgaagagggtcaatctgagtcctgatgaactctgcagctttgtgattggcgatggttgtgcggacgtgtacaatccctatcacgagtgggaggtcatattcccaccagtgcccaagccacctcgcctcccagatctgcccattcccatggaggcggctcccttcttcaaggtcctgcacatttccgatacccactacgatccccactacgcggagggatcgaatgcggactgcaatgagccgctttgctgccgactgagcagcggtcgtccggccacgcccaatgcagctgccggaaagtggggcgactaccgcaagtgcgacaccccgaagaggacggtggaccacatgttgtcccacatagcggagacccacaaggacatcgactacattctatggacgggcgatctgcctccgcacgacgtgtggaaccaaaccaaggaggagaacctggccatcattaaggacactgtgaaacagatggtcgaaatgttcccgggagtccccatcttccctgctctgggcaaccacgaaagcgcaccggtgaacagcttcccaccgccgtacgttaaccaggtggacatatctattagttggctatacgacgaactggacatccagtggcgcaggtggctgccccaaagtgtgacccacacggtgcggcgcggtgccttctactcggtgctggttcgacctggattcaggatcatctcgctgaacatgaactactgcaacaacaagaactggtggctactgctcaactccacggatcccgccactgagctacaatggtaaggaaagcttatagatataaaagctacatttcaaatgctctacgtttccaggttcatttacgagctgcaaagtgcggagttctccaacgaaaaggtgcacgtcataggtcacattccaccaggacactcggactgcctgaaggtctggtctcgcaacttctacaagatcatatcgcgctatgagagcacagtgactgctcagttttatggacacacgcactacgatgagtttgaaatgttctacgatccgcacgatctgagtaagaccatatcccttgggccaatatcacaggacccaaatttactccctcttttcagaccatcccaacggcattgcgtacataggtccctctgtatcgccctattacgatctgaaccccggctatcgtatctactacgtggatggcgatcatgatgccacgacgcgcctggtcatcgaccacgagtcctggataatgaacctcaaggaggccaacctgtatggctaccccatttggtacaagctctacacagcccgagcggcatataacatgaaagccctgcgtcccagtgattggaacaacctgctcaacgagctgaccaataatcaggagctattcgagctgtactacaagtaggtgtttgtggtcagattgaactaaatggattctatacagttatgggttttctttcaagatactactggaagaactccccggcgcgacccacctgcgatgcggagtgcaagaagaggctcatctgcgactgtcggagtgggcgttcccacgatcggaagcacttctgtgccgaggtcgagtcgaagatcgacgaggagtcttccaagtcatggaagtcctggttctacaagggattgaccaattcgtaagcactgtttatgtcaagttcgtgtttctatggtgtaggtggctcacacaaactaatgcaactcgagttgtaattgtaatcaatcacatattttaagccattagatatttaaagctatttgatcgtcatttcgcattctcaaaacatactattactgcataataacaaccccattttatttttcccactggtgtggtccatgcaacaactaaaaacctaaaacatatgaccgaacagcgccgaggatcggactgaagagccggcccccaccaccgatggctatgggcctttcgatgtggtgattgttaacgttggtggttgatttactaaggaataaggtccctgtacatatcactggtggccagaatctgtagtgcccatgacaataaatgacctaaatatttacccccaaactctttcttctgcccaaaagctatagccttctgtcctccatcacatacctgcccaaatacctgctcggatatcgctgattccgatctgagatggtcgtttgaggtcatccaactgcaagtcaatgcaatcgcaacgaaggaaaactcctaccccataagcttactatgtgataactagtgcttaaaaccatttcgcttagtgtacgttaacgcaatgatgtcccaaaactgcctgctttgaaaccttacaatcgcccttcggaatctgagtcagtgaagaatagtcatttatctgtaatcgagtcgatgctgttgcccactccgcagcatttgcggtcgtggcatgttgcgcgcttttacgcaatggaaattgtcgagcaaattaccttctaagacacctaattgtaaagctaacctaggtcttaacttaaataaagtgcaattatttttataaaacataagatgtttcatctctttggcgtttgttttccccgaacaaaaacaatattctccattaagatataaattcgaatttaaattcaaatttaccagtgctggaaagcacatgcatgcgctgttttacagcactgtttttaacagcggcttaacagcgggctatagttttacgttatgtagtacttatcgatatcacgcagtgattatctgtaatcggcgtaatgtatcgaagtagagcgggaaaattcaaatacgaattattgataacgtattgaaattaccaaagatatgcaaatggatgatttgtaagaatcttataaagctgttgtttaaaaaaatcgattattgataagacataattattttagagggaatttgatgataaaaaattagtcccttgaacttggtaacctttcgaataagtcattgattagttagagaattaaatagtttagtctctggaaatgtaatgtaatacctattagggcacatcaaacttacattgtttgagttgccaactgaaagcttatcgggtagtgcagattttgctggaatactcacggctacctattcgcaatgcacttcccccttgaaatatcgaattcctgccctgcagtataaacccacgatagtcctttgagcaaactcggctaccaatagcgacgaaggggaattggcgggcacggcgtatcctagtcgttgtcaatacgccccgttggccgttgccttgagcttgtcgagcggtcgtgcgtgttttccttcattggtgataagacacgcagcgcgatgtgtgtgtgcgggggaggggggttatccctgctgccagtcattatccctttgtcacacacacacccgcacgttttcccacactcgcccaccccctcctacagacaaacacacacaccgacgaacacaagcggcgggcagcatcgagcaaaacaattccgtttacatttcccacatctccggcgaagcattcagcaacaccccctcc

SEQ ID NO: 6332 - DNA, 3264 bp, DROSOPHILA
gtttgcggcgagcggttggattcggattctttggtcggtaaaacgcgaaatcttctgtgcggcgggtgaaatcttcggcagaagaaacaacaaagcgacaagtgtggagtgtggagtgcataccgtaccacgcagagataataattcggactgtgaagagtcgtgagccaaacaaatgaatcgcaaataaatgagggcaatcaccggagcagagatgcgagttatggcacaatattgcctataaatagtgtaactgaaggaaagaaaaagtggcagccgtcgaagaaaacacaagaaacgaaaagggaaagagccgagccacaaataaagctaaagaaaacagaaatcgaaagaacaaaggcgggtttgttgtgggtcaagaacgaaagttcggcccaaaagtgcccgttccgtatcgattgtgcatttttgagcggttttgaagaggtcaagccgcatactccagtccacacctggttgaacctggcgtagcgaagtccacgagtccgcacattatgacacagcaacagccgccgtggccaagtcccatttccagctccagttccaatcccaggggaaaatgctggctcatcctcgtacttatggctgtgctcccactggtggcagatgttggagccctgcccttcctgttcacgcacatcaagccgcagatcaactggacgcagccggagatggagagctgggtaattgaggagcagccgcgcagcatcgagccccacctggagccagtgctccatccgaatcgcacgcaccgcgctctgtcttcggacagcacggatgcggagttcctgcagaggttggtcagcatcaggcacaaccagacggccagttccaggatgctgtggtacgacgtggccggcggagatgggctggtgtacccaccgttcgtggacaaggccctcaagctgctgaacctcaagcaggtggcctttgagatcgaaaacagcgtgatgtccaaggtgacctgcaccgcctgcagagcgggagccgggatgctgcagcatcagatccagtcgggcaagacggatgcggagctcattcgcatgatcacggactactgcaccaatctgaacatccagagtgcccgggtctgccagggcgtagcccaactcttcggcagcgagctgatatacgtgctgaagagggtcaatctgagtcctgatgaactctgcagctttgtgattggcgatggttgtgcggacgtgtacaatccctatcacgagtgggaggtcatattcccaccagtgcccaagccacctcgcctcccagatctgcccattcccatggaggcggctcccttcttcaaggtcctgcacatttccgatacccactacgatccccactacgcggagggatcgaatgcggactgcaatgagccgctttgctgccgactgagcagcggtcgtccggccacgcccaatgcagctgccggaaagtggggcgactaccgcaagtgcgacaccccgaagaggacggtggaccacatgttgtcccacatagcggagacccacaaggacatcgactacattctatggacgggcgatctgcctccgcacgacgtgtggaaccaaaccaaggaggagaacctggccatcattaaggacactgtgaaacagatggtcgaaatgttcccgggagtccccatcttccctgctctgggcaaccacgaaagcgcaccggtgaacagcttcccaccgccgtacgttaaccaggtggacatatctattagttggctatacgacgaactggacatccagtggcgcaggtggctgccccaaagtgtgacccacacggtgcggcgcggtgccttctactcggtgctggttcgacctggattcaggatcatctcgctgaacatgaactactgcaacaacaagaactggtggctactgctcaactccacggatcccgccactgagctacaatggttcatttacgagctgcaaagtgcggagttctccaacgaaaaggtgcacgtcataggtcacattccaccaggacactcggactgcctgaaggtctggtctcgcaacttctacaagatcatatcgcgctatgagagcacagtgactgctcagttttatggacacacgcactacgatgagtttgaaatgttctacgatccgcacgatctgaaccatcccaacggcattgcgtacataggtccctctgtatcgccctattacgatctgaaccccggctatcgtatctactacgtggatggcgatcatgatgccacgacgcgcctggtcatcgaccacgagtcctggataatgaacctcaaggaggccaacctgtatggctaccccatttggtacaagctctacacagcccgagcggcatataacatgaaagccctgcgtcccagtgattggaacaacctgctcaacgagctgaccaataatcaggagctattcgagctgtactacaaatactactggaagaactccccggcgcgacccacctgcgatgcggagtgcaagaagaggctcatctgcgactgtcggagtgggcgttcccacgatcggaagcacttctgtgccgaggtcgagtcgaagatcgacgaggagtcttccaagtcatggaagtcctggttctacaagggattgaccaattccgccgaggatcggactgaagagccggcccccaccaccgatggctatgggcctttcgatgtggtgattgttaacgttggtggttgatttactaaggaataaggtccctgtacatatcactggtggccagaatctgtagtgcccatgacaataaatgacctaaatatttacccccaaactctttcttctgcccaaaagctatagccttctgtcctccatcacatacctgcccaaatacctgctcggatatcgctgattccgatctgagatggtcgtttgaggtcatccaactgcaagtcaatgcaatcgcaacgaaggaaaactcctaccccataagcttactatgtgataactagtgcttaaaaccatttcgcttagtgtacgttaacgcaatgatgtcccaaaactgcctgctttgaaaccttacaatcgcccttcggaatctgagtcagtgaagaatagtcatttatctgtaatcgagtcgatgctgttgcccactccgcagcatttgcggtcgtggcatgttgcgcgcttttacgcaatggaaattgtcgagcaaattaccttctaagacacctaattgtaaagctaacctaggtcttaacttaaataaagtgcaattattttt

SEQ ID NO: 6333 - protein, 735 aa, DROSOPHILA
MTQQQPPWPSPISSSSSNPRGKCWLILVLMAVLPLVADVGALPFLFTHIKPQINWTQPEMESWVIEEQPRSIEPHLEPVLHPNRTHRALSSDSTDAEFLQRLVSIRHNQTASSRMLWYDVAGGDGLVYPPFVDKALKLLNLKQVAFEIENSVMSKVTCTACRAGAGMLQHQIQSGKTDAELIRMITDYCTNLNIQSARVCQGVAQLFGSELIYVLKRVNLSPDELCSFVIGDGCADVYNPYHEWEVIFPPVPKPPRLPDLPIPMEAAPFFKVLHISDTHYDPHYAEGSNADCNEPLCCRLSSGRPATPNAAAGKWGDYRKCDTPKRTVDHMLSHIAETHKDIDYILWTGDLPPHDVWNQTKEENLAIIKDTVKQMVEMFPGVPIFPALGNHESAPVNSFPPPYVNQVDISISWLYDELDIQWRRWLPQSVTHTVRRGAFYSVLVRPGFRIISLNMNYCNNKNWWLLLNSTDPATELQWFIYELQSAEFSNEKVHVIGHIPPGHSDCLKVWSRNFYKIISRYESTVTAQFYGHTHYDEFEMFYDPHDLNHPNGIAYIGPSVSPYYDLNPGYRIYYVDGDHDATTRLVIDHESWIMNLKEANLYGYPIWYKLYTARAAYNMKALRPSDWNNLLNELTNNQELFELYYKYYWKNSPARPTCDAECKKRLICDCRSGRSHDRKHFCAEVESKIDEESSKSWKSWFYKGLTNSAEDRTEEPAPTTDGYGPFDVVIVNVGG

SEQ ID NO: 6334 - DNA, 2533 bp, DROSOPHILA
tagatcacttaacacagaaaaggattggtcgcatggtaaaaggtgtttacaatgcgcagctcccaagtgcaaaacatcttccagaagttccattcagtcgaaaaaactgaaaaaagataagaagtctctgttaaaggaatttgaaatatacaaaattcctatcattcgacgcaagcctataaaacaagctgtactaagggaaaccaataagtaccgaaggcttcacaacgccaatcccctgaaaatggatgaaaaactttgttcctatgcacaggagtgggcagatgtatgtagatgtatttaatataaatagatcctttctttttcacctaaacttgatttccacagcatttggctgatctgaacaaactggaaactcgacctaatcctctttacggcgagaatattatgcgtgtccggagatccaaattctccgtggatcaaatactgaaactctggtaccaagaaaaatacaactacgattacttaaagccaggctttaatttgtacactggacattttacccagttggtttggagagagtcagagttcctgggagtgggcgtggcatgcgagtgggttcataattttaagtcatactaaaaataatccgaaactaactacattttacacgcagtgtttcctccatttggattgtgtgcaattaccatccgcctggaaatgtaagcgaacatttcagggaaaatgtcctgcctagaaaattccttctacttaaatcggacttggatgccaaggaaactagaaaatcgaaacatcacaatttaaaatagaaaatggtaaataaaacaaacaaatactggacctagattacgcttttattatgcttaaaattttgatcaaaaaatcccagagttattgctttggcggcacattatccttgaacaaacccacaacattgccgggaggattgtagttgcaaaccacccaagttctatccgctctattggaagacatgtatgaataggattaccatagccatagccataagactcactttcgggccacacccgaacccatttccaccgacgacttccaaatgagctgagtaaagtgtccagcggtgggcacaaactgcgccttgttgaaatcgtagctattgatttcccgataccacatttccaccggcagatcaccggtcacatccattccaccggagaggaaaatgttttcgccgtacttgggattgggtctgtgcgccattgtgttctgatcgcggagatgctggaaatgggtgcaaattaatataaaatactatagaatactctttatccctcatcctacattggcccattcctgagccagcttatttagtgcagcattaatggtcaccgcgggacagccgtgcattgcccgatatttattggtggtattgaagacctccttcaggaagagctcgttgttgcccttggtatcctgacccctgggacctggagggcgctcgtgggttttgggaatgggcgctacgtttctcttcgccatatttctttgggggattggctggcgccgtgatttagttaaccaaatttacgtatgcctaatgactttttaagctagctggctagatcaacatttctcgtttttaagttacaaaattaagtggttattatacatgtatacaaggcagtcaattaaaattttcactgagttctgaatagctcacccatcaatcacaatgttttgtttacagccgaaaaacccttttttcaaaccgcctcataatctggcctaaacatcggtattagcattgtgattgataccgcaaacacaggctgtgggtgacggattcacaggacgtgtgcgtgcccaaatccattgacgggaattagacagactgtatcacacatccttcttctgcatctgccgatgggattaaccaacgtgacgtatgagtgatgcatgtcactgggtttggttattaatgagccggcgattctttcgcaatccagccatatggctggatatgtaggtgcaggcaaatcgggcaattggagtggcattaattgccgactgaatcgagctggataatgcgagttggccgacatggaggccccttatcaatcgcccgcagcgccgcccatggaagtgcaaatttcgatgtcgaaacactcggaatattaaattatttaagtgtgtgagtgtgtgtctgcgctgcgggtggtgcttcaagtgtgaatccctaatgagttgtgcaaatgcaaatcaatggaccggccgatgtcgctgctcccggcagagattaagccgatgctccgatgtacagataggcggatacagccgcaggacaggctgactcgctgaaattatcctgtgcgccgcaaggtggatgcggggtcacagcattgcgtttgatatactcatgtgccaggcactaaattatggcccagctcattgatttatgtgaatttgtgtactaagtacttaagtactcggccataagcttaaagctggataaaatagtttattaagccgcgaatttaaataagtattaatgttaatacagattaaagccaat

SEQ ID NO: 6335 - DNA, 473 bp, DROSOPHILA
aaatcacggcgccagccaatcccccaaagaaatatggcgaagagaaacgtagcgcccattcccaaaacccacgagcgccctccaggtcccaggggtcaggataccaagggcaacaacgagctcttcctgaaggaggtcttcaataccaccaataaatatcgggcaatgcacggctgtcccgcggtgaccattaatgctgcactaaataagctggctcaggaatgggccaatcatctccgcgatcagaacacaatggcgcacagacccaatcccaagtacggcgaaaacattttcctctccggtggaatggatgtgaccggtgatctgccggtggaaatgtggtatcgggaaatcaatagctacgatttcaacaaggcgcagtttgtgcccaccgctggacactttactcagctcatttggaagtcgtcggtggaaatgggttcgggtgtggcccgaaagtgagtcttatggct

SEQ ID NO: 6336 - protein, 142 aa, DROSOPHILA
MAKRNVAPIPKTHERPPGPRGQDTKGNNELFLKEVFNTTNKYRAMHGCPAVTINAALNKLAQEWANHLRDQNTMAHRPNPKYGENIFLSGGMDVTGDLPVEMWYREINSYDFNKAQFVPTAGHFTQLIWKSSVEMGSGVARK

SEQ ID NO: 6337 - DNA, 3803 bp, DROSOPHILA
caatgtaaacaaaacgtatttgaaactcgtgttcgaatggatatacatatgtatgtatggatttattcctaatcacatgcacacgatactccggatcagcagatcgaccagtgatcgtcgagatccgtgaaattggatttgtttctactttccgtccttacgaagtggctgcactgaaatcgaaactgtttgtttatcttagcaattagttagccataaatgtgcgagtaagcgaatagaagggataaagcataaataattaaaactgttcgcattagcagatggcaataaaataactcggtttctggtccattcgatcgaattcaatattgttgtttagtttccgaaaatattggttttgtaattgacttgactttgttcaattcaactcaagttccccgagccccaccatcttgtcttcgccctccagttttcttctcgtttttccattttggttcgccagcccgagttgaacgaacctctttcaatatctttcagaaaaagaacccaactttgctttgctcgaaaatcaatattattgtttaaatattattctacgtatacgacacagcgagcaataaatatttactagatgtgctcatgttgcaaattgtattggttttttggggttgagtatgcaaaatcagcagggaaatggagcagaaattgttttcgagattaggaattgaataggcgtagaaaaaaatgatattctaggaaactaaatcttaaacaaagacgaaaagccttcctgttttgttagattatggttccaactttgtatattatcaagaactggtaaaaaaaacatacacgcgaattctttagtggaattcttccaacaatttaaaaaatgatttatttattggatcgaaagattttatgtttaaaattaagaagctttaggaaatacttcaaatattaattataatgtatacatataattgtaaagctttgaaaatgtagtgatcacataaaaaatgggccatatttaacaacttcaaacggacaaggtcacttgactccaaacagttttgttgagcacttcaaaggcctgaatttgttcattcaattgggccagtttactgaatatcaaatcgaacttggaatcaaagtgctgcaccactgctttcagttcatcgcgcagtttgtccacctcgctgggatcagaactacttgttatgggcgaggactctacgctggcggagatttccgaagaggaggaggagtccacaccctctttttcgggcaagcgatacatgcaggctattccgtgaaagtattcccccggaaaatcgggatcgtagttatccacggtataggcaatgccattggcacgaatgagcacatccattatgtttctcaggctgaagcagttccagttatttccatgaatatagaagtgcgttagttgcgtgagcgtggggaacgcggatggatcgatttccgtcaaattattgccggatatgtcaagtttctgcaaattttgcataccctgcaacgcctccagcggcagttccatctggcccgtattccgcagcaccagcatctccagatgtggcgtccgccaaccgtcgggcaactgacccaggttcggattgtccgccacatccaggtgccggagtctgggcacgcggctcaacgacgccagctgaaccagcgagttgttgcgcagcaccaaatgctccagtgcctcggaggcgggaaagtacagctcgcgcacgcgattgtcgctcagatcgacattcgtcaccgatccgtacaaattgacacggtccagcgagcaattgcgagcggtcaaattggtggcgttaatgttcagcagtagaacgaccagctcggggttattcgatagatccacatactgcatctgatggtgtcgtccgcgggatcgaaaggcatactcgcccacctctcgcagtcgattgttctgcattgcgaccgacaaaaggtccggattgtgggcaaataaatcgctctcaatggtggtcagttgattaccggccagtcccacgtgccgcagactcttcagtccggcaaatacgtccgcggctaaagcctccaggcgattctctgtgagatccaggtactgtaatttcaggagattatcaaacgcacccgcctgcagtttgcctagtttgttgcgattcaggaagataaactccaagtttcctgctcccctgaaggttttcgtgggcagcacttcgatgtgattatcgctgagcagaagaatcaccagcttatccgcaccaatggagaagttctcccagtaaatgaagcggatgccacagccgcgcatgtccagctcactgacctctagtgtgtaaaataagcgcaggggaaaattggtgaaggtgcagttctcgaagatcagggttcgcgagtgctcctcatcgcccacttcgtaggtggtgccatcctcggcaatccgcacctccgttggcagatcaaaggtggccttctcgtcctctcccgcaaactcaaagcccctgcagctggtcaccttgccctccgtctggcaatgaccttccaagctggagaccagcactattcgggatgagccactatccacatcagcatccgcgtcctcatccgtagtagctgtggccgccaatgagatcagcaaatagctgcagaggaacggcagacaattccggacgtacatttggcgtgctccacgattcacgttcgacctgaaactgattccaaacgttgaccgccaaacgcctggccagataagctcctctataatgctcaaataacgatcatcagttctatataattgccatcccattctattcatggtgttctgattttgcgaaaataaatatggttcatctgtggcgggtacagcgcatttcgaaaatgtaaggcagggtttttttcttttttttgaaatcggattgaaatactatttctatttcgaagaattgagatgctttggaaatcactgctgactaattaatagatttaattacaattatttgtctgggaactccttttaaaagaaattaacatcttttgctgtacgagagagatgaaaatcggtttgtttttttttgtacctatcattattttgacacttgtctgtgctgcttttccgtttattattcatgattttttgctgctctatggaagttctcgctctgttggctccattcaaaactcacagactttgaaaaaaaaaacaaaactttgtacaatatctgtggagcaattcccactcatttccagtgtgttctcttatcatgaagtgtttacttagcgatttgctgaacaaaaggtggaaatctcttttggctgctgatagtggacatgaggccagacattcgcccatttttatgtaagagtattttcattggggcccatccatctttggcttttaccatcgaaaatataggcgcgtggaaacgttgcttaaaataccttctatataatttacacaacagccatttagcattttgttggcactgccttgcgttgtgtagttttgctgatgattgcccgaatgactcattatttatcaggcgaacaattcagtggagggcatttgagtttcggtttgataagagcaaacgaacttccgttaactactttgtcgtctgcatttattcctagtcttatttttaaagcaatcaggcaagaatgtaggcacctttacacgaaaaacattcgtaaatatagcgaaaccagaactttcgcctgcgaagcggtgacatgtccagtggaaaaatgtgtaaaatatttagccaattatttagccaacatgccagcggttttgagaacacgttcaacctgctttc

SEQ ID NO: 6338 - DNA, 1803 bp, DROSOPHILA
atgaatagaatgggatggcaattatatagaactgatgatcgttatttgagcattatagaggagcttatctggccaggcgtttggcggtcaacgtttggaatcagtttcaggtcgaacgtgaatcgtggagcacgccaaatgtacgtccggaattgtctgccgttcctctgcagctatttgctgatctcattggcggccacagctactacggatgaggacgcggatgctgatgtggatagtggctcatcccgaatagtgctggtctccagcttggaaggtcattgccagacggagggcaaggtgaccagctgcaggggctttgagtttgcgggagaggacgagaaggccacctttgatctgccaacggaggtgcggattgccgaggatggcaccacctacgaagtgggcgatgaggagcactcgcgaaccctgatcttcgagaactgcaccttcaccaattttcccctgcgcttattttacacactagaggtcagtgagctggacatgcgcggctgtggcatccgcttcatttactgggagaacttctccattggtgcggataagctggtgattcttctgctcagcgataatcacatcgaagtgctgcccacgaaaaccttcaggggagcaggaaacttggagtttatcttcctgaatcgcaacaaactaggcaaactgcaggcgggtgcgtttgataatctcctgaaattacagtacctggatctcacagagaatcgcctggaggctttagccgcggacgtatttgccggactgaagagtctgcggcacgtgggactggccggtaatcaactgaccaccattgagagcgatttatttgcccacaatccggaccttttgtcggtcgcaatgcagaacaatcgactgcgagaggtgggcgagtatgcctttcgatcccgcggacgacaccatcagatgcagtatgtggatctatcgaataaccccgagctggtcgttctactgctgaacattaacgccaccaatttgaccgctcgcaattgctcgctggaccgtgtcaatttgtacggatcggtgacgaatgtcgatctgagcgacaatcgcgtgcgcgagctgtactttcccgcctccgaggcactggagcatttggtgctgcgcaacaactcgctggttcagctggcgtcgttgagccgcgtgcccagactccggcacctggatgtggcggacaatccgaacctgggtcagttgcccgacggttggcggacgccacatctggagatgctggtgctgcggaatacgggccagatggaactgccgctggaggcgttgcagggtatgcaaaatttgcagaaacttgacatatccggcaataatttgacggaaatcgatccatccgcgttccccacgctcacgcaactaacgcacttctatattcatggaaataactggaactgcttcagcctgagaaacataatggatgtgctcattcgtgccaatggcattgcctataccgtggataactacgatcccgattttccgggggaatactttcacggaatagcctgcatgtatcgcttgcccgaaaaagagggtgtggactcctcctcctcttcggaaatctccgccagcgtagagtcctcgcccataacaagtagttctgatcccagcgaggtggacaaactgcgcgatgaactgaaagcagtggtgcagcactttgattccaagttcgatttgatattcagtaaactggcccaattgaatgaacaaattcaggcctttgaagtgctcaacaaaactgtttggagtcaagtgaccttgtccgtttga

SEQ ID NO: 6339 - protein, 600 aa, DROSOPHILA
MNRMGWQLYRTDDRYLSIIEELIWPGVWRSTFGISFRSNVNRGARQMYVRNCLPFLCSYLLISLAATATTDEDADADVDSGSSRIVLVSSLEGHCQTEGKVTSCRGFEFAGEDEKATFDLPTEVRIAEDGTTYEVGDEEHSRTLIFENCTFTNFPLRLFYTLEVSELDMRGCGIRFIYWENFSIGADKLVILLLSDNHIEVLPTKTFRGAGNLEFIFLNRNKLGKLQAGAFDNLLKLQYLDLTENRLEALAADVFAGLKSLRHVGLAGNQLTTIESDLFAHNPDLLSVAMQNNRLREVGEYAFRSRGRHHQMQYVDLSNNPELVVLLLNINATNLTARNCSLDRVNLYGSVTNVDLSDNRVRELYFPASEALEHLVLRNNSLVQLASLSRVPRLRHLDVADNPNLGQLPDGWRTPHLEMLVLRNTGQMELPLEALQGMQNLQKLDISGNNLTEIDPSAFPTLTQLTHFYIHGNNWNCFSLRNIMDVLIRANGIAYTVDNYDPDFPGEYFHGIACMYRLPEKEGVDSSSSSEISASVESSPITSSSDPSEVDKLRDELKAVVQHFDSKFDLIFSKLAQLNEQIQAFEVLNKTVWSQVTLSV

SEQ ID NO: 6340 - DNA, 2729 bp, DROSOPHILA
aaaagacgggcgtgattttcagttgaaagatcgggaacagaagtcaaacagctcgataatgtgcttaaggcttttactatctatactagtatcaattgctggcctggcttgtgctgctcgaattcctgggccagaggaacggattgtcggaggttcatacatccccatcgaatatgttccttggcaagtgtcggtgcaaaataattcgttacattgctgtggtggagtcatctacagtgatcgagctattttgactgccgctcattgcctttctaatgtaactgtgacggatctatcagttcgcgctggatcttcgtattggagcaaaggtggtcaggtgttaaaggtgctaaagacaattgcacatccaaaatacgtgcctaaactttacaatccgtatgatattgctgtgctaattttggaggcacctctcagacttggtggcactgtaaagaaaattcctctagccgaacagactcccgtggctggtacaattgttttgacctccggatggggatatacacgagagaactcttcattcctttggccaatactgcaaggcgtacatgtagccattctgaatagaacggattgtctgaaagcttacaagcacgttaatataactatcgacatgatctgtgccgacggacaaagatgggatacttgtcaaggtgattccggtggtcctttgattgaaacaacgaaaggcggccataggcaactcataggcatggttagctggggagacggttgtggtacaaatcctggcgtctacgaagatattgcattcttccacaactggatcaaatatacagttaaaaaaaatatttacaaaagtattgttaaaatataatatttaccttcacttaaataagtaaaaaaaacttgtaaccttttgtattcctaaaattataggtatgaaaacttatccattttgtttagacatcagaaatgaaataaaaatgcaattctttttccatataactaaaaaattttttttttatttatttttgattagtttctctgcattctcttctatccattccaggtagtggaagacgttcgtgtaaagtgatggcagaacggcaaacccgcagccgtgtccttgcactgcgatgccaaccactttgttggccaggaccaagggacctccataatcgccaggacaaatatcattttcggtgtaaaaggcgcaaagaagttcctcgccaaccggttcaacaagttcttcagcgcacatgctccggggacggattttggtaacgccattttgcagttttctagtcacgacgtaggactcgagtagtttttcgccccatcccgcattgctgggatattcgttttcagagggttctttggtggccagtggaattttggtcactcgtacggaaagcactggcttctctagccataagagggcgatatcgttgtcccaattcttataattttcatgaaccaccagcgctgttaccctgataattctaccacctctatagatatccggcgttcccacacggactgtgattctcttcaccggcttattcttgacgcactgggcggctgttaggacaattcggctgtcgatcacagcaccgccgcactcatgatatccacttacccacacggaggcaagaaaggtccagaagtcaaactttgcctctactccattatagatgccattggagcttcgtgcaaataagatcaacacccaacaggatccaatcaacattgcgatgttgtcttagattatgccagcacctaggcaatcttagcgtatctcgtttaatccggggaaaatcgctttggatttgccttggttacttagtggccatattgttacacttgttacacattgatttccattttttttaaattttattatgaatttgtatatcacagtacaaacaccaagttcgtgctgttcagctctttcaacatccaaataacctcagccagaactgagcacccaggattcaaggcgaatagtttgaccaataacaacgggggcattgttgcgagaatctcctcctgcacggagcatttcaaggacttcacaaaggagctccgctatcctttgactgatgacatttctgggccttcaatatataccaatgggtctaacgagctgtgggacaggtcagtgccactcaatcttctgcggtcaatcgcgggtcaaagagcaggtggtggttgatgggcggtgggggtggccattggctaattggcggccgtagttcattagtgtgccagtcacacgttgattaggcggtttggattcggatgcggttgcagtttggtgtcgcaaccataacaacaataacaatcagttgaaattgatgggctggaagcaggatgcaaatgaatggcacaaaagtgtcctttgacccgttgcaatgcctttcattggggtagaaagataatgctgaggatgatgacgataaaataagggttagcttaaagggcttacttatatttcttattggaaaccataacatcaaaaaagtttctaagttatggaatgaaattttgtacggtcataatgaattgacacgcttgtttaaccatcttatatttcaggtaatattttccccgtgaaatgcaaacaagccgcagacagcgatggacataactgacaacaatggcgcctaatctcggtttaaaacttaccacaaaactcctggtgaaaacgacaccggacaaaccgagtgcgaaacgagcaaagtcagtgg

SEQ ID NO: 6341 - DNA, 729 bp, DROSOPHILA
atgttgattggatcctgttgggtgttgatcttatttgcacgaagctccaatggcatctataatggagtagaggcaaagtttgacttctggacctttcttgcctccgtgtgggtaagtggatatcatgagtgcggcggtgctgtgatcgacagccgaattgtcctaacagccgcccagtgcgtcaagaataagccggtgaagagaatcacagtccgtgtgggaacgccggatatctatagaggtggtagaattatcagggtaacagcgctggtggttcatgaaaattataagaattgggacaacgatatcgccctcttatggctagagaagccagtgctttccgtacgagtgaccaaaattccactggccaccaaagaaccctctgaaaacgaatatcccagcaatgcgggatggggcgaaaaactactcgagtcctacgtcgtgactagaaaactgcaaaatggcgttaccaaaatccgtccccggagcatgtgcgctgaagaacttgttgaaccggttggcgaggaacttctttgcgccttttacaccgaaaatgatatttgtcctggcgattatggaggtcccttggtcctggccaacaaagtggttggcatcgcagtgcaaggacacggctgcgggtttgccgttctgccatcactttacacgaacgtcttccactacctggaatggatagaagagaatgcagagaaactaatcaaaaataaataa

SEQ ID NO: 6342 - protein, 242 aa, DROSOPHILA
MLIGSCWVLILFARSSNGIYNGVEAKFDFWTFLASVWVSGYHECGGAVIDSRIVLTAAQCVKNKPVKRITVRVGTPDIYRGGRIIRVTALVVHENYKNWDNDIALLWLEKPVLSVRVTKIPLATKEPSENEYPSNAGWGEKLLESYVVTRKLQNGVTKIRPRSMCAEELVEPVGEELLCAFYTENDICPGDYGGPLVLANKVVGIAVQGHGCGFAVLPSLYTNVFHYLEWIEENAEKLIKNK

SEQ ID NO: 6343 - DNA, 16463 bp, DROSOPHILA
attcattcaactgcaaagagcagccaaattgcgcatacgccgcgtatggccgtcggtgtgagtgcccgtgttcatcagcggttgcatcaactgataccaagtgtacataactacagctacaattgcaactatttcaccaatcaacggcagcggcaacaacatcagcaacagcaccggcaaacgtttgaaacgtcaccaaagcttcgcatttcccactaataattatgtatacgcaacgtatgtttgacatgtggagcagcgtcacttcgaaactggaagcacacgcaaacaatctcggtcaaagcaacgtccaatcgccggcgggacaaaacaactccagcggttccattaaaggtaaagcatcattaatatttcaatcctttcaaattattctaataaataaaatgctgcaaaccaaaaaagctacgaaaattcaatgaaaatggttttaagaagtagaaagctggttaaaaagaaaaagtaaaaaataagtaaaagaagtacttataagaaattaatagtaaatttaagcggatacttttagatctattagaatatgagaccatacaaatctcaggaaatacatcaaaccacggggagttccctttttcgttcttcaggaagttgtagaccattttgcatatgtttcaagacatcatgttaagtaagcggcaagtgtgaactttcatcccgcaaaaatcaacaggggaattgcacaaagcagtgaaataaagtataaacttaatgaaatccagttaagttgctggttttatgtggcagagcggagtcagtcagtcagtcagtcagccagttggtcccgaaatgagtggctggctgactgctctttttcgttatttttgcgttttcgctggcctggcagtgaaagtcacttgggtttcttggccaacagcaacacaaaatatttaagggaaatccatgaaattcgtaaatgaagaaagacagccgaacgaatattacgaaacccacttgcgtgtgtttgtgtttgtttgtgcgagtggcttgctgactttttttttttttttgcattgacaattcaactaattcaaatcgaaatggcaggcaatcggagaacgggaaagagacggctgcagaccctttcttcgctgctgccacagataaaaagatacaaagatacgaattgtgtatgtaacacatgtgtcataaaaagcgtacagcaggcgatcataataaaataaaatggaaaagaaacttgcgaattaaaattcgcgcgtcagtcgtaaaaacatattgtaataccaacaaagttgcgacaagccatataaatataatactatgtgagcgaagatgtatgaaatacacgtttgcaagtgtgcgtttaatatatatgtataggttaattagcttacttgattgcactttacacttattgaacagatttgtattttttgctctttacaattgactcgcttgtggctatttttagtcggccaaaagggaaatcttggtagtttaaatagtgattgaaatataacacgcttaggaccaaatctgtttccaattaatcaatacctttaagcaagtaacgcaccattaccttagatttatttcaagttcagttacttaaaaaattagtttattcaggatgtatctttatgtgtccaatcttttaaacgatttaaggaactattcccacaagaagtataaaagaaattaattttgcgcctacatttagtatgtttgcttttcagagttaagtgcttaatataatctaaatgtctttagtttaatttaaagaatgtgaaaatggtgcattgaaggagctataccattattaaatccttcgcaggacttaaggcttggcaggcggagctgaattaattcgactttaattggggtgctttgaccccttagcaggtcagctgcgaatgcaattagtgcccaagttgggaacatggaggatattatttctaacataaatcttaatcgcgggcagcaatctatccccgggatttccgagttgcgtgtaagtaattaagggagctgcaggggcggagaatgaagggggtcgctttttttctgacgctggtcactgttacttttggcatgcaatttgcctttacgacttccgcaaaatcaactcttattttattattgaaattttcactttttcgccgctgctactgcgtttcgctggtgtttcttcgcctttccgttggtgaaacagatagaaacgtaggcaaagtgaaagaaagaaatttagcggcgtaaacagaaagcggccaaaaaacgaaatttaaaaagcgaaagagttgacaagatgggcccttggctgcagtgggagcgagacagcgcagtggcaacaataaaaaatattcaaaaaagccagaccgaaaagttttgttaaagtgaaatgctgctgttgctttagctgattgtgtagtccgctcacacacacacacacatgccttcgaaataaaacaaaaagaagaaatgtgtggaaaaaagcgacccatgcaggcccaagcccgaaccggcctggcccgccccgcccctttccccccaccgaccctgcgagatagtgcgaacgcccgtttaacactcgaaacaaacgaaagacccaaaactatggagctacaaaatttctgactgcctgagaaagtgtgcgtgcggacagaggcgtagaaagggattctaggattctgctaagagagcaactgtgaagcttatcaaatttttctttaaatttttagtaatttaaattaaatctaaatcgtttattttcggatgagatataccttgctcattaaaagtccatttttaatatctctgaccccccaaaaccccgctgcacacaccactgtgcatgagtagttcgtttcagtgtgtctgtgcgagaagcgccaaagcacacatatgcgtgccctagctacatccacaatcatcatcgccagcgtcaacatagtaaaagtctaaaatcgaggaaaaaattattttcggcggtcattcaactcgcacgcacgcacacacacgcactttccgatagagcaaatggggaagagcgagcgctggcgggagtgggagagcgggagagagtgcgtgagagtggagcgttcgttgactgttatgcgggagcgtgcgtcgcggtcgacgtcgacagagaagctggctgcgctgctcgcaccacgcacattacaacataaaaagaaaagaaactatatgaaaaaaaaacaacaacaacagcaatcaatgggcaatactttctacggctttttccacttctcccccatttctatttctcttttcaagccaactgaaattattatttatgcagtcaaagttttggagccataaaagcgaatgagtgggagagggagaagccgaaggcgaaagaagaagggaaattctttgtttgacaattattgcgtgaatttccacgattacggcttctatcgctcatgtaaatgccgtattaattgctcatcgtagaaaagtcgccgaacttttgacttccttttctggccgaccgttaccccatattcgattgggaacagggaataaggcctataaataggatttactagacgcatgatcattaaatgcgaggttattatatatacagtatttataagcagcactagggttgtatcaacttaaaactaaaagaagtattgattgatcggcatgttaatgatcccgatagtaatattatatataaggtgctaaatagtatgtaaaagaatctatacaacaactgaaatagttttggaatattggttgaatataagaaacatatcattaatctctcttttgtattatatcaaattatattgtatgcaaataaaaagggaataaacaatgatgttacatgatgttataaaacttaaaagagctattatataggtgaacattagaacttgtcttacaaatgttaaataacaaatattgtttgtccatccaaatagttgtattaaagcaacaattgcatttatgcaatgatactagatttccttacactttcatatggtacaatgaggacaggaactcttgggcatacaaattcctgcgaaaattcccattatttgacagatgtttgtaatgaatatgaccgtacttaagcacacagaattcagcaccatctcgaagaaaaacctaaatttggcatggaattccccatcaattcccacccccatatatatccatatagattccgtatgtggagcatgcaaatattttgaaatattttggtctgtctgctggaagcaaatatagtaatgtgttctttttcctggttgttattatggtttccgaaagttcattcgcctgtgtcctagaaaactatgaaatgcagaaaccacatacacatttgtttattctgataatttatggaaacttacaagactgtggccaaatggccagcaaatagatgagcaattcgacgacaggttcaacgacctccggcaaacataatcgtccagattgcgacaaggaacctatagcccaacccctcgaaatgtctgggaattatcaattgattttgtagcagatatggtatattgattcagcgacacgcttaaagttcggcttcgattcattttatcttttacgattgattgttgggagtttattttcggactatgatccacgacaaagatggaatagccgctatctctttgtctttctgctcaaactattgtagtagttcgcctaacgtacaactaaggcaaaaaataactttttacatatacgcgagataagcttaaccacagaatgtgtgtcataaggccaccgcaacttcaatgctatataccgaagcttatagacaagaaatccaaatagagtactacacttcggcggcgaatgaaaactagaaagttctgtacttaaagccgatgttgttcaatatatagcaaatatagcaacaaaaatatacactatagttctaatttaagcacacgtttcattatcaaatttacacaatatatgtacttttgattttattccaacaaatcgttaaaaagttggcatcaggaatatatatgtatctctgttcccaaacagccccgcttctattttaacgtccagcattattgggttaattgcagtctctcgagtgcgtaaatatgcaccatacatcacgatacatgtatgtatgtatgtacatataatggacatccgttcaataaagtacgctttcgaaaaaaaatgtaataaccgaaatgacaaacgtttccattatgttaggcagcgtcgaaaaaataaattaaatgatattattctagtaattataaagcagacatcaaatgcgatgcatgagtggtcccctcccgcccctgctcgcccctttcccatctaacccaatgcaacagccccccaagcgccccccttccaccccacagtcccaatccccaaccagctgcgtatcttatctatgcaactcttcgcatagtttaacgttttgtgcgtgagtttgtcacgaatatatgcgaggtatatatctaggagtatactacattcgtgattacttgcgcccgcgtgtgtgtgcgtgtgtgtatacgtgtatatataggcagcaaataaaagattgcatgtgccccacaatgcagacacaaacagattcacagacattgcatttgagtcgcgtcgccaaatgaatagacaaatatatacacacgaaacgcacacaatcgcagggcagctccaagcacacacacacacacacatacaagcacagccgaatgcacactcacacttagacagaatgcaacgccaacgtttgtggaggcaaagcgcgccaacaaaatgcgaaaaactgggacaaagttgaacagacgagccaaggacggatattagtgcgacgcggcgcgagcagttgcatgatgtggggaagggggtgaatggcgggggggtgggttctgtggggccagaggggcccaaaaaggccggggtgcgggtgcagcgggcggtgaagttggcagcgaaaagtggaaaaacaaaatgaatgttgttgctggtccaagcgatgtgaacagtgggtgaacattaatgaaacatttaaattgttaatagatatagacatctgcgaaacgctattaactattcataatttattgcacaaatatacatatacatgttatatcttgtatgtcctttaagtagcaactttatcgagaactacagtattatatagctattgttcatgtatttattactacacaaatatatactttaagttagttactaagttagtttagtgagttttttttttttttgaatgggtacagcgcttaaaacaactgtacactttaaattatatattttcgatctcaaggcgagtgctcactgtgcctgcagtatagttttcaactctacagaaaattttgttgtttgttgattacaatttgcatgacgccagcggcagtacagccaacagggcggatagagcacaattgccctctccctccctccctcgctcgtctgtctcgctcgctcgcacgggatttccatctgctttttcagtagcgaatgcaatcgttgttggtttttatatagttgttgttaattttgcagacatttcagccgaaataaaaaaaaaaaataggagggaaaaacaaattttaattaatggtggaaaaacgagtttgcctggtttccatcaaaccaacgaccaccactatgaatggattttcttcaagaacgctttttttccccacaccgattgcatttttcgtgcacattcgtatgggatttttgagtttgtcttggtctggctcaacttgaaaattcttgttttggccaaattgcaagctgcaagcggcaaatgttgacgtcgagttctttttggttgatgctttagtcaaaacacttaaataccataaataattggctacttaagtgcatttgttgcgcaaaactgtaggaaaaacaatcggagaccaaagaagtcagcttaccagcttggtgtgtggcttttgaggttttcaaggtattttccacgagcttgtccatttttcaatttttccagttcagtttcatttatgctgccccatagctggtgcatttgaagcatgcataaatatggccgcaggcctactttttatgctgcggcgcggtttgggtgtttttttttttttcggggtgggtacgccgatgtcaaacgcataaatatgcatttacccatactaactcctggctgaaggcattgttcagggaatttttcgtgtgattttagcgcatattgctgttttccgccgcaatcagtatattttcaaaatttgtttacattctgtgaggcatataagtaataaatatatatagattctaagctttagagtaggacacttcacttctaagatattttaagcttgaaaaagtattagccatatcatagatacttccattctgacaagctgcatttgaataaatatatatatatatttataaatccatattatgtaggtaggtatatatttaaaatatgctttaagctaatggtccatcaaaggcgcacacatttcgctctgtcgaactgagcaaataattggctgtaaatctaattcgacgacttacagcaaattttccaccgagctgtgaatcatttctaagaaaacttgtaaatttcacccactctcacttgaaatatttctgaaaaggttctcgcctggcatcatcatcacgtgaagcaacgtatacgtgatgtttgggaaacaatataattaattgcgcatacgtcatgtgtgcgacgacctgactaactgaggtgtttgcatatattttcgggcattctcgtcgatactttgtgtaaatctcgcatagaaagcgatcggattacgaggagaaattacatcatttggtgaaaatgttaagcgtttcattaaatcgtctaaaaatggcaaattcttgcgctgccgctgtttcagcctcctctttttttttgttccgtgggtcaataaacttgtgggcccagtcaaaaatttgtatatgagaaattcttttgttggcaacaaaagaacgagcgcgtcacgtacgtcggcagtgcaagcgagagggcaacagggaagcaacagagggtgcgagagggagcgaacgagtgcgaaatgtaaacattacaaaaatgccaagccaacgacgtcttcatcatcggcgtgtggccaaaaaaagaaccgaatcatacggcaccgttaatcaagaagcttatagccgcctcgtattatgtataattcgggatgaatgaatacggcaccgttaatcaagaagcttatagccgcctcgtattatgtataattcgggatgaatgaattttggcccttacgaaactctaacggtattctaagaagcctcgcgaatacgcgaggggaaaaagggaaacaatgagctggccgaaaagaaagcgacaaattacgtagccagcatgctaatgctgatgctaatgctctttcttctctaacggcatttcgcacagccggctaaaaggccccactcccccctcccaccacaaacaattttgaacttttttaccttttgtgaaagctgaaaacccgttttccattagcatttgcttggcggcaaaagaatgaagcacgacggccgcagagagaacaaggcagcgaagagagagcccgcgctctcttaggcgctctctttcggccacaaggcactcggctggtgcattgaccccacagctcgctgacccacttacgaagctgctttttgccactgcgaatgcgagttgcgaattgcgaactgccgacgctgcgagctcgtgcctccgtcgacgccgctgccgtcatcgttgtcggtgtttctgtttcgacgaacgagcaacttgtgcaatagtcgcagcagcaacagcaacaagagcagcaacaacaacggctgcagcgacaacagcaagcaatcgcagtcgcagcagaggcgactgcgctgccacatgggcaactcaaaattgactgtgcttcactctttgcctcagcacagtggttgaaaggtaggcgtttaataatgataaataatatatatgcattattgaatgaaatgaagaatagactgcaagggaatttgataaataaataaaacatgttacataaaaatcccatatcagaattcgaaatcacttgttaatttcgtgcctagttcaattcagaactttttcttattcctatccctaactacctgcctttaattttgtttcttacactttgaaatgttttatttttcaccagctatactaatttgagtgaatgaacgtttgccaatagtattgcctacttattggctcgagaccctatactcaaaaagctctaaggtcctttatttaatgaatatctaataacataagttggtgtgtgcatttccgttatgaatttccaaagtttccgctgcatttggtcacactgttcgtgaggtattatgtgtgagttattttttatatcattgccatagtttctggcgctgttattgttattttatttgactttgccgttcgccgcagtgccaaaaactgcaattcatatgcagcggcccctgttcccccctgcgcccagttcccctgcgcccggttttacatacatatttgtatgtatgtatgtatgtgtgtggttttttttcgttagcacatgtcgttgcatattaattttcgtgtgccagtgtgcacacatgcatttgcgaatgcttttcacactttttactcgcttttttgttgctgcttcttggcgaactgcattttttgcgggcatgcattcgcaataaagaagaacatattaattttgacttctggttattgctgcacccagcagaagcagtgcaaaaagaaagcgagtccgcggggcagtgcaaataaattgcatatgcaaaatatttgggcggttttccgcatggcactggccattcagaatttattttcttaaaccgcttttcgacggcaattaattttcctttgggcagcatataggcggtgcaaacttgttggttgatcaacaacgatatgcagttttctttagttgatctgctattacaggttttccagcggccaacgaacggtgcgtgtacgtgatgttgtggaattacctaataattgaatggatgcgttttcattgagcacaggcgttcgtgccactcgtgagcaattgccaaaacagtcgcggttaattaaaaatttatcgaaactcttgggcacttaatattgatgtttacttagactaaattcagctttttattcccgacttttacctctgataagtaaacaatttcacccaatatttgccttcctttcgagaaaagtatgtcataaatattgttttctcgccgtcaaagtacacaaggcaaaaatgccaaataagacaataaaatgtatttcatgacacacttttccgagccgcgtatcaagtaaatatttgcgcctgttatttggtaacccaaatgcggtaaaaaatatgcgtaggctcaaaattaattacccaaaggtgacttgttaccatgtaagattatttctgtaatttagggttctgaaaatgggcaagttttgagtttatcaggtgggaaaataacagttcaagtgtgtagaaaacccgatcttcttgttttatcttcagttacttatttgtttatagtattacagaaacttgtatagtaacatatttattttaatgaaaaaaacttattaaattagcaacgacttctttaaatgccaaaactagaaatgaggaaactttaccaattaaaaactaaacatgttttgtaataatataatagctttagtgggaattcattcttaaaattatttatatacaattctgtttattttattcaaaataaagtttatataaagtgtatgttagtacacatgtagctctgactttaagaaatacaaatgcatgtgctatcgcttgacttatcgatttcctgaactgcatacaaatgagtgggaattgcctgtaatttttgaagcttttacttgtcataacggtaaaagtgcccctctcttcggtttgctcttcagtgcagttaccaccgacttatctgtctgaagacccataaacacgcacattccggcacttcagataaagatttatgtgtacgttttcgggggaaaggcattacaaatactgcattttccgtgcaagtatttcgggtatttcgtaatgctcgagaacgataaaaagtttaaggcggcttagtgagacccgcagccgttaaagtccccttaaaacccccctaaaaccctctttaaaacctttttcaacgatgacgacacacattctagcataattaaatatctgtctgcgcgctcagttgcaacgaaagagagtggctctcccagtgcgcttaagagaattcctttgaagagaagtaaatgcaaagagagcgcgcggcagagaactttcttttcgattttgtttttgttttctttttcttcgcttgttaagaattctgtgtgtgtgtgtgtgtgctggtgtgagatactgccgtgcgggaaaggttcattgacacttgaaaaacattcagtcactcactcacacaacgccagtcgggttactcactcactcatcatctgtcacacatttctccaatccgaaacaacaaaaagaaaaacaaaaaggcaagaaaagcagcagcgcttggcacattttttaagctgcgcttgtgttgtgttttggttgtgctccctgctctctgacaacgtcgacgtcgctgcttctgcggatgctgctgctgctgctgctgcggctgcggcggcggcttttgtgtttgtgtgcgttcggttcagcgcgcatctttcatcctcgtgggtaaatacaaatacaagtacgcaaggcaaagcgcctagattacacaataccgccgccagacgagaccaatctgccccctcgcgctctctccctcgcacatctactctctcgctctctcgtgctggcttttcgctccaacactgcgctgcaaggttcggttactttaactcagtcttgggttctacttctccagtgattggtatcttaaaagatgttatatagcatatggcaaattatttcacatttaattataatggatggagatattaagtgaaaatataaatgatcaattgatcaatgttcaatgtataaacttaagatgggtcccaaatgtgggttgtatgcaggccagtgtaaactgccgcaaatcttaattctccccgtgaaccagttctcagcgacgcgatggtgcactgctgttgatcaggaaattgcatcatcgctgaaaggattgcggactgcaagggaaatccgaacagctgtcgcactgtctccctctccctctgcgaatgcatcacgctcccttccgcacgcggagcattctgcattgtctgggcagacaagtggcttaaggtaccgctcccgcctgcattgtgccacacagataacacacaaccgtattgcgcaatagttctctggggtcgaagtggctttgtctgaactccgacaatggatgggctggcagcgggaaatccattgattgtaattgctgggcgttcactatcggaaattgctcgggcctccaacttaaagggaaaactctggcattacttctttactaagtttgcaagtttccctcaaggggaaaaagattacagtaatacgcactattcagaatttatataaagacgataactattcgtagtattcagtactttataagactcaattaaagattattatattttattatctaaaatattattctaaatcaccttttccctcctttttcttacagctcaaattgagataattccatgcaaagtctgcggcgacaagtcatccggcgtgcattacggagtgatcacctgcgagggctgcaagggattctttcgaagatcgcagagctccgtggtcaactaccagtgtccgcgcaacaagcaatgtgtggtggaccgtgttaatcgcaaccgatgtcaatattgtagactgcaaaagtgcctaaaactgggaatgagccgtgatggtctgtagaaagtgttgcatgtggcaccgagagtaaagcgtttggaaactgaattgatatctaagaacaattttacaattcaagactttttagtaacatagaaacatgaattgatgataaattatttgtgtattattaaaaaaaaaaaagtaggccagattgtgtactgccagtcagtttagtttccgcacttttctctgggtgccagcgatcaatttgcgcactgcattaatgtgttaatcccacccccttgaccacaccccccttgcagctgtaaagttcggcaggatgtccaagaagcagcgcgagaaggtcgaggacgaggtacgcttccatcgggcccagatgcgggcacaaagcgacgcggcaccggatagctccgtatacgacacacagacgccctcgagcagcgaccagctgcatcacaacaattacaacaggtgcagtatgaccgaaccgagaatgaccccccatattgatccgtctgcgatccacccgatccccgacccgctgtacgacctcgctctttatctccctcctctcgtctgctcttctcttccccatctgacatcattgctcccgacccgtaatgcccttcttgtcactcagctacagcggcggctactccaacaacgaggtgggctacggcagtccctacggatactcggcctccgtgacgccacagcagaccatgcagtacgacatctcggcggactacgtggacagcaccacctacgagccgcgcagtacaataatcgatcccgaatttattagtcacggtaagttgggcgaatctccaatttgaaaaataaatgataaatctatcaatacccatatcaatccatatctctccagcggatggcgatatcaacgatgtgctgatcaagacgctggcggaggcgcatgccaacacaaataccaaactggaagctgtgcacgacatgttccgaaagcagccggtgagtgtttatcgcttaagcccgaaagtatacccttgataatggaacatattcttcttgctgtgcaggatgtgtcgcgcattctctactacaagaatctgggccaagaggaactctggctggactgcgccgagaagcttacacaaatgatacagaacataatcgaatttgctaagctcataccgggattcatgcgcctaagtcaggacgatcaggtgagtttcctatgcgattaagtacttaaagatagtcaataaattacctgttttcacctagatattactgctgaagacgggctcctttgagctggcgattgttcgcatgtccagactgcttgatctctcacagaacgcggttctctacggcgacgtgatgctgccccaggaggcgttctacacatccgactcggaagagatgcgtctggtgtcgcgcatcttccaaacggccaagtcgatagccgaactcaaactgactgaaaccgaactggcgctgtatcagagcttagtgctgctctggccaggtgcgattcacttcacatcttaaataggcctatataatatgatttatcttttgccttagaacgcaatggagtgcgtggtaatacggaaatacagaggcttttcaatctgagcatgaatgcgatccggcaggagctggaaacgaatcatgcgccgctcaagggcgatgtcaccgtgctggacacactgctgaacaatatacccaatttccggtacgttgattggagattctattagtttccggagcatactcctaatgttccgatttttccagcgatatttccatcttgcacatggaatcgctgagcaagttcaagctgcagcacccgaatgtcgtttttccggcgctgtacaaggagctgttctcgatagattcgcagcaggacctgacataacaagagcagcagccgttcctggagacgaccgcggacgatgttgccgaggatgcggctgccgccggatgtgtcctgccgccggtggcgccccctgccgggcagcaaccagcgctgctcgaggactgagggccgcaggatgtggcaacaataattatttgagtaaacactgcactgcgcatgcagcagatacaagaactttatcatgatttaagctagcatacaaccaaggatgtgatcctcgccaaggactcacttaaaaagaactctatctatatacatatatatattatatatgacagagcggatgacgcaaagggaagggaaaatatttcaaaaatattgttaactcagttaagacttttgcttcgtagagaaccgaaaccgaaaccgattgcatttcgagcaaggggcatcaaactgattttcgaggttatactatacatatatacacacaaacacacacacacacatatatatatatgtaacttccaaactttcatatcctggcccgagcagatcagatcgtctaagtacttaaaaccaagcgaaattctctacaccgcacaacccaggacccgtagaccccaataattcagttcggttagtgttaaccccagaaagcccgattccgatcccgcctaggttgtctttgccttacgttgtaactaaagtatgtgtattatatatacagcaaatgtatgtataactatgtcgtatcggttatatgcctaacaacattattttttgtaaacaacaaaatcgaatatctcggaaaatgtgttcttataattatattgattaatgcaattacaatatatttacaatttaccgttacgtttttacattatacataagacgcaagagaaggaaacggaagtttaaggattagaaagctgaataagaaaaggcttaaggacgagctgagtagcagttaaagtgagcgagaaatcgaatgaataccagaaaatttcaagcaagcacataaaagtatgcaatattttgtttaaaaacaactttttattagtttcttaaatataacataattacgtacatacacacacgtatatatagggctatatatatctatatatatatatatatacatgatagacaaatcccaatccggttccaaggtttagtaaaaataaagagaaataaaacgaaaaacaaaaacttttgatatgaaatcctacgcataattaacaacttttattgtttctaagacttaaacttaattaaaatggaaaccaaaacagactgacggaccgaccccgacagcatgccacgccctcccccgccccaccctccacagatcctggcagaaatttcaaaggagtttgatacacaaatcgagaaaagaaattttcaaaaaaataatataaagacaagcaaacggcgacttttttggttgatacatttgaaaagaatatacaattaaatatctgactgactatacaaagacgttacacacacgcatacacatacacacacatacacgcatacacacacagcttacgatacataaattagttaaacttagagtaaacaaacaacaacaaacacattggatagtaggtgataattggtgtgtcttaaataaaccttaacccctccccgacccccgcccacttgcttaatac

SEQ ID NO: 6344 - DNA, 2104 bp, DROSOPHILA
atgtatacgcaacgtatgtttgacatgtggagcagcgtcacttcgaaactggaagcacacgcaaacaatctcggtcaaagcaacgtccaatcgccggcgggacaaaacaactccagcggttccattaaagctcaaattgagataattccatgcaaagtctgcggcgacaagtcatccggcgtgcattacggagtgatcacctgcgagggctgcaagggattctttcgaagatcgcagagctccgtggtcaactaccagtgtccgcgcaacaagcaatgtgtggtggaccgtgttaatcgcaaccgatgtcaatattgtagactgcaaaagtgcctaaaactgggaatgagccgtgatgctgtaaagttcggcaggatgtccaagaagcagcgcgagaaggtcgaggacgaggtacgcttccatcgggcccagatgcgggcacaaagcgacgcggcaccggatagctccgtatacgacacacagacgccctcgagcagcgaccagctgcatcacaacaattacaacagctacagcggcggctactccaacaacgaggtgggctacggcagtccctacggatactcggcctccgtgacgccacagcagaccatgcagtacgacatctcggcggactacgtggacagcaccacctacgagccgcgcagtacaataatcgatcccgaatttattagtcacgcggatggcgatatcaacgatgtgctgatcaagacgctggcggaggcgcatgccaacacaaataccaaactggaagctgtgcacgacatgttccgaaagcagccggatgtgtcgcgcattctctactacaagaatctgggccaagaggaactctggctggactgcgccgagaagcttacacaaatgatacagaacataatcgaatttgctaagctcataccgggattcatgcgcctaagtcaggacgatcagatattactgctgaagacgggctcctttgagctggcgattgttcgcatgtccagactgcttgatctctcacagaacgcggttctctacggcgacgtgatgctgccccaggaggcgttctacacatccgactcggaagagatgcgtctggtgtcgcgcatcttccaaacggccaagtcgatagccgaactcaaactgactgaaaccgaactggcgctgtatcagagcttagtgctgctctggccagaacgcaatggagtgcgtggtaatacggaaatacagaggcttttcaatctgagcatgaatgcgatccggcaggagctggaaacgaatcatgcgccgctcaagggcgatgtcaccgtgctggacacactgctgaacaatatacccaatttccgcgatatttccatcttgcacatggaatcgctgagcaagttcaagctgcagcacccgaatgtcgtttttccggcgctgtacaaggagctgttctcgatagattcgcagcaggacctgacataacaagagcagcagccgttcctggagacgaccgcggacgatgttgccgaggatgcggctgccgccggatgtgtcctgccgccggtggcgccccctgccgggcagcaaccagcgctgctcgaggactgagggccgcaggatgtggcaacaataattatttgagtaaacactgcactgcgcatgcagcagatacaagaactttatcatgatttaagctagcatacaaccaaggatgtgatcctcgccaaggactcacttaaaaagaactctatctatatacatatatatattatatatgacagagcggatgacgcaaagggaagggaaaatatttcaaaaatattgttaactcagttaagacttttgcttcgtagagaaccgaaaccgaaaccgattgcatttcgagcaaggggcatcaaactgattttcgaggttatactatacatatatacacacaaacacacacacacacatatatatatatgtaacttccaaactttcatatcctggcccgagcagatcagatcgtctaagtacttaaaaccaagcgaaattctctacaccgcacaacccaggacccgtagaccccaataattcagttcggttagtgttaaccccagaaagcccgattccgatcccgcct

SEQ ID NO: 6345 - protein, 487 aa, DROSOPHILA
MYTQRMFDMWSSVTSKLEAHANNLGQSNVQSPAGQNNSSGSIKAQIEIIPCKVCGDKSSGVHYGVITCEGCKGFFRRSQSSVVNYQCPRNKQCVVDRVNRNRCQYCRLQKCLKLGMSRDAVKFGRMSKKQREKVEDEVRFHRAQMRAQSDAAPDSSVYDTQTPSSSDQLHHNNYNSYSGGYSNNEVGYGSPYGYSASVTPQQTMQYDISADYVDSTTYEPRSTIIDPEFISHADGDINDVLIKTLAEAHANTNTKLEAVHDMFRKQPDVSRILYYKNLGQEELWLDCAEKLTQMIQNIIEFAKLIPGFMRLSQDDQILLLKTGSFELAIVRMSRLLDLSQNAVLYGDVMLPQEAFYTSDSEEMRLVSRIFQTAKSIAELKLTETELALYQSLVLLWPERNGVRGNTEIQRLFNLSMNAIRQELETNHAPLKGDVTVLDTLLNNIPNFRDISILHMESLSKFKLQHPNVVFPALYKELFSIDSQQDLT

SEQ ID NO: 6346 - DNA, 2846 bp, DROSOPHILA
tacgagggcggcgggggcgatacggcctatgtctacaactatgagcatgagcagcagcagcagccagtcaagcggggctacgagcacggctatgtggtgggcgtgggtgacggatcccacaggaggcagaggcaatctcaactggtcgaggctttggtgcaaaaacgtgtcccaggcgccagcgatggacatgtggcgcagttcgttagcaatctggaacgacaagcgaatgctggtaaaacggggaaaaagcgccttaaacctcggcctgaggacgatcttcaggtaccagtcggcgacatgcacatggagtcgtcgtatatgtcccgctccgaagaactctcctcaacggacgttacgctggagaactcagactacgagacggaggcgacggactccacgttacttagtagctcgaaatactcctccatgcatgtctttgtgcggcgcaagcaatcggagtccatgtcactcacagaagaggccggcgacggagatgccggcggtggtggaggctctggcgatttcggcgaccaaaatgtcatatccccggccaatgtctacatgtccctgcagctccagaagcagcgggagcagagcgcctaggggtcgtgactttaggttcctccattcaaaatccccgcagccattcgcagccggagcagcgacaccacagctggctgatacgccgagcagtaacaacaacaacaccactaccaccaccatcacacccacaacaaagcagccaactcgattcgataggatccccactgggagagctaaatttgcagtcatactcccgggcagtagcagtagaaaagggaacctgctcctttttgcacgtcctgccatctgcgaattcaagctgcaccaaaaatgtacaaaaatatactttggtcttactaatttccattaaagatttattatttgtgtgctccctaagcgagtttgttggaccttattttcggatgattaaccgccccaagtcaaaatgcacatatgcatgatattgagttctctatgtgatatcttttgatttatttagtccgtatattgtgaaattataaaatatttgcgttcggttaagtttgcgttgaatactactgattaagattcaattggatcaagtattttgaatgtagttaagttaactccatggttatttattatgtggaggttagagggcgtgcttaaccgccaaatccgtaaagggtgcgtccctggcgcttgagggcatagaccacgtccatggcggtcacggtcttgcgcttggcgtgctcggtgtaggtgacagcgtcacggataacgttctcaaggaatacctgtgaattttccgagaaattaatcagtttttcaccactttcccttcgtttcgccagaacgtacctttagcacaccgcgagtttcctcgtaaatcaagccagagatacgcttaacaccgccgcgacgagccaaacggcgaatagcaggcttggtgataccctggatgttatcacgaagcaccttacgatgacgcttggcgcccccctttcccaatcctttgcctccctttccacgaccagtcatttctcagttgcttcgtaaagttggctgaaaagaagagaagacgcaataaactgtaaagcgacgccatgtttggtgaaaggtaaacgttcatttgacaggtgaaaactgttgttaataagtctgttttcatacaaaataatggtctccaattattttttttatgtttatgcacaaaaaaactttgttgaccgattcttctattatttacttaaatttctcagcaacaaaactcacttcaagaaatctccagaaaattgcttgtgagcgtgaccagatctcgcacacctcaaaatacctttcgcaaaatgcgcgtatctagtatttctattgtctcactaccagccctggtcagttatcgcctatcggccatcgctatcgccgccccgttgcgacaaaaaagatttaatcgaaccgaaagacgtgctcgcactaaaatcgcttgaaaacaggcccgcagacctgcgaaaaacgaaaaagtgcagcgcgcatatactttttcaactgtgcccctctagcttaaaattaagtcgcggcgaaaagtcgagtaaaacccgcggaaatgcgcatgcaaacggcgtgtggccagcaaaatcgctgccaaggcaccgcacacacactcggccacccacacatacacacttagtgctgtactcgaaaagtgcgaagacaacaggaactctgtgccaaaataatattaacagtacccagttattccattccactgcacctgtccccgaaacatcgaaatattcgcgttacgtatacgcaacgagtgctgtaaacaagtttgcacaggcgataacaatgtccaaatacgatctgctttatctaacggcgcagctaacgctgggtatgtattgcactgcgagtgtgtgggtgcatacttattggcgccttaattcccagtcgctttattatgtacatatgtacataatattatattttgtctctgccttacgattttcctctgtaatgcaagccgacttcgatttataaccattcgtgcgtgtgatttttgatgatatggggtgcgtaatgctattactttattaatatcacatggcgcttgaaaagttcatatatagggtgtataggctttgtgatagctttgtcctattaaccaacacatcagaacatcttaaattttcagaaattaggtataacgaatgtaaatgctaggaatcaaatctatttgtgaagtgaataatgtatacactagatactctattaaagcaccaacaattgtactacacaaatgtagtaaaatatcgtaagaattg

SEQ ID NO: 6347 - DNA, 583 bp, DROSOPHILA
cgagatctggtcacgctcacaagcaattttctggagatttcttgaacttcttttcagccaactttacgaagcaactgagaaatgactggtcgtggaaagggaggcaaaggattgggaaaggggggcgccaagcgtcatcgtaaggtgcttcgtgataacatccagggtatcaccaagcctgctattcgccgtttggctcgtcgcggcggtgttaagcgtatctctggcttgatttacgaggaaactcgcggtgtgctaaaggtattccttgagaacgttatccgtgacgctgtcacctacaccgagcacgccaagcgcaagaccgtgaccgccatggacgtggtctatgccctcaagcgccagggacgcaccctttacggatttggcggttaagcacgccctctaacctccacataataaataaccatggagttaacttaactacattcaaaatacttgatccaattgaatcttaatcagtagtattcaacgcaaacttaaccgaacgcaaatattttataatttcacaatatacggactaaataaatcaaaagatatcacatagagaactcaatatcatgca

SEQ ID NO: 6348 - protein, 103 aa, DROSOPHILA
MTGRGKGGKGLGKGGAKRHRKVLRDNIQGITKPAIRRLARRGGVKRISGLIYEETRGVLKVFLENVIRDAVTYTEHAKRKTVTAMDVVYALKRQGRTLYGFGG

SEQ ID NO: 6349 - DNA, 17331 bp, DROSOPHILA
gacagacgggattggggccataaaaataggtctagcgaagtctcaaccttaatctttaagccgaatttaaataatatatattgctagtaagatgatgttcattaaactaatccttaaataatatcctaacaatatcccctgcgcatcttgtagttccctgctcaaatgaacccctataattgtggtgtaatccctggggaatcgaatgcactaacgagcaaatgtgtatctttaccacctctacctctcgaactaattgctcttgaacgctgatctctaaagccctcgatgtgcccatttccaattggagatcccgcatggcatcgaagcgagccgaatcgcttccaatttgccagctccctgagatggggtggaccagagtcggtcggggtgtacctcctgagcatttgacatggtgtgaacactcgcataaggccctttatcgcgtgcgggggaaacccccaaaagggagtgggagtgggtgtgcacaattggttggcaatttatttaaatatcggcacgcagttggaagctgctctgaagaccgaaggcagtgccaactggaatgccaaggcagtgagataaatgcgaaacagcaacagagagaagcaagctgctgccgaaaaggaataggaatttttcagctgcctttcagccagccaagtggcagggggtgcggtggaggggcgtctgagttcggcagcagctgatgttaatagcccagcgggccagcgagtgtctgcctgggctgcctggtctgcctgccctgccagttgttgtgcccctcgagcgtcgagtgcggacggccgggtgcgggtagagcagcggtacagccggaacagccggaacagctgttccatctgcaactgcgcaggcgcctcgaatccgacgcggatgcgtccgaacgccgctcggattgccgagcggagcggtcgaacatgtgctacctgggccgcagcaccagcaccgcaactggcctcacaaacaaacgccacttacgactggtcggacgtgctcagctccgcggctcctcagttgtgcagttcaatcgcatcggatactcgtatattcgcattcgcgtgttcgagcgcgccattcaagatagtcgagccgcagatactttcgcatccattcagataccgattctgattttgattccgattcagtcgcttgccgttgctccgagatgccggttcgcgtttcgcgctgccgccgccgttccgacaatgattcgatggtaaacaataacaaccactcacaagcggtcgccaagtgttaggtccagcgaaagcatctcgcagatagaatactaaatcaagccacaagatacactccacctacgaagcgtcggaacagcagcgatctgccaaaatggtgagtccatgcaaattgtatctcgacatgaacatgagctacggccaacacatgttgattgcggccagctgtcctccgccactcaaagtgtctttggccttatggagagcacatatatctgctggatgtgcgagtagatgtgtcgggtcgcatctgttttttatctgctagcaaactgaagctagctcaagcaaattcgccgcgcgcaattgcagatacgaattcgtttgtcaagtgctcgaataatagtttaagacgccgcacacacacacactctcacacacgttcacgttgcgagatggccttgtgcgccgcgttcccaacagaaacagaacttccaactgcaaataattgcagctggctgccatgtgtcgccgctgtggatctgctgcctccaccgtctgtcgattccatctgctctgcagctatggctatggccatagtcaaagccaaagctatagtcgtatatcagtggtcgcaccccaagctccggtggccaaacagcctccgtcggaattgggaaaccctcgccctcgcccagatgggccttttccagcccagagtttatggtgggtagtaaacttttgagtgctgccagggctaattgattgcgctatcagctgaatcagtcctctatcatacatatagtaattacaagtttcattactttgtttttaaaaatgtaaaatatattcaagagcagatgctgcgtctctgagaggcaataggtatttcaataaataataatcatcccccaatccttaattcaaatacctgaattatcggcaaggatgatctggcgatctcgggatcttaagatctcgcgtctttcctctgccttctgtggtgactcactctggaaatcacctggtcgatctggccttggctcggcagctgttgcgattgcggatcaaacggggcaagaacgagcacgggaatggaggagcaggtggcggtggagggatggagggagcgggatgcggacaagtgtgaggccagctgccttttggcctgcttgtcttttttggccgagtcggcttgtctgctattgttattgtttttggcagtgcggttgctgttccgaattccatacaccatttaccatattccatattccatattccatattccatctcgaccatctccatctccttttcgcttcccagcgccgctgtcattggcatgacacctgcataaacattttaacagcttgtaggctcagaagcagtctgttttgtattgtgttttctcgtttttttctgccgctcattaaacagcgcagtgcctgcgcaaaaaagacgaaaaatggtatcgaaagggcttgccctaattgggggttagactaattgatacccagctgtaggatcaaagtcacataaagacctaattcgataatccgcgaatatggtaattttgctgtacaagggtatttattttatcaatacaagcttcttgaaaatcttgttaaatatcttataatcaataccacaagtttgtgtttcaatgtagctgttatatggagagatgaacaggacaagttgttcttgtttttatcttcaagtaaaacgtacttgggttattgatatattcgatagattaatattggaataaagactattaccaccgctttccatttagagtatgaaattgatttgccctcgaatcactaacatttgaaatgcctacggccaaagtagacggtccaatcgtgtctggcaaatagatccaatatttcaggaggcctgcgctccaattagtgtcagcaatttaattttgttttggccgctgggcagctcagctggccaagccttgtctgatcggcaataggtactgggtactgggtaataggtaataggtaatcggtaatcagcgggcaatcaggcattcaacaaagtcctgctaaataatgcacgtccttgggggagggtccctccactagctggctgcacatggtgattgaatttaaaatggacagcggcgaaaaagggcaaagttattagcgtaatggtcgggggcaaacaaaacactggcgaacctgaggcaggtgaaaatgcacatgacaagtgcagctgttggcatcaaattagcccccctttagccattcgccattcaacattcgccatatccacaccatgtgccagcaaatcccgccgcccagccggcggcaatccgggcaatccatcaagggctcaatcaatcattagcactgcaaacgcaaacgcaaacgcaaacttcggtggggaagcggaaaagcgggaatgcgggcagcgggaaaacccaaaacaaacagaaaaactttggattttcacaccttttgcaattaagatgccgcctagacgacattgactaatgagacgccattttgtttgcggcctggcgcagctgagccaacagacaacatggcgaccggaaataagtcaatttgcttattagacttgtcagtggatccgtgagtggtgcggaatggagcggagcggggtggagcagattggaggaccctgtccgaagcccaaacgcaaacagtgcaaacggaaaacgagaaaagcacggatggtatggattttgcggggaggggcgtaaagcgaaaagaaaagccaaaaaatcgcgcaaatgtcacacacagaacagcaactaacggctgccccggaaaagcggaaaagtggagagcggggctgcatacgcttaatcgaaaaagtcaaaaacaaaattcggcgtcgctctcatccagttttcctgcttttcgccttcctactcctagttcttctgctcgcctggctgcctgcctttttcctcgtttttccactccgctgttgtggcttttccaccgccactgtggaattgttggcgctgcaagtggcagcttattaaaaagacgtgggccacagaatgttttgggggcaagcaaaaatgtcataggaaaagccagcgcaaaaaaacgaatttttccccggcagaaacaatggggaaaatagtatagatagaccgcgttcgccactgcctggtctgagtttagttggggagaaccacattggaggtttatactttcatttgggtgcatgatgtaccctttacccaacgtcttaagctatttccgtaaattggaggaatctaaatgtgtctattgaccttttggttaccggaactcattattaaaatgtcattgcttgtttcacacactaatttccaacagctgccttttaaaacaaaacatgctctagtggtctggtttagagtcagaactgagcatttccattgccttaccattcagtattctattagtttagctaaaatctcttcgctcttcgtggccatatatttcaaagtcttagccattaaccttagcccacccacaaacagcgcccgtccggagtgccagctgaactgcccagcccagagtctcttatgttttaaacattttgccgggtcgggacaaaaaactgtgtccacgagtgccgcatgtccagtacaatcgcagatcgcagtcccagaaacgcagacgccattcgctggcaagctaccaaataccaagtgcccctgccggcatttgaattggatttgccaggcgctacacagcatcgctgctcagccctaaatctccggcccagactgggctgaccttgtcccgcacactcccacattctgaagtgggaggggcgttggataagaacgacaacgaagcagctggcacagctggcgcaatatttcttgccccagatgaaacgcagatgatgcggcaagagcgcaggagtagcaggggacagcggagcaggggagcaggggaggcactccctgcttgtaagttgtcaggacacagttgtttgagctgctgcctcgagtgtctgcaacagatttgtgccaaaaaagagtggaattgctgctgcaggggcatgtgttgctcgttcgagggcaacattcatcgatttgggcatttggctggcagtcccaagtccatgcactacatcctgctggtggccgggggaagaacgagctcctattagacggcccaggtgcatctgtatcctcatctgtttctgtatccgcatccgtatgtgcatttgtatctgcattggtcgggccatcaagcgcacctgctgtcactcgcaatttttaattgaaaacggcagcggtggctgctgtcgtctagagcaggcttttggcccagagacatcagtgtcgacacgtgccagcatgtgttgccagttgctgttgctgttgctgtagctgctggcagacaacttggcaaaaacttgaatagcgtcacgtgctgcaaggctggcagaacgattttccaatcagaggagaacgagcgccgccagcggtggcagctggaaaatcttcacttgcaacaacacaggtcgggaaattgcatcccggcagcagtgcaagcagctcgagcagcaacttcgccagctggcggccatcagctgcctcgctggcataattgggatgcctaaatacgttttgcgggcaacatgtggcagccaaatgttctccattcgccccccccccccctccccctgcgcataaagcagttcgtatcggaaataaaacagaccataaagccgattaagcgcgacactcgtccaactgtttttgccccgtagttgctgttgctgatgttgctgctgctgctgctgctgctgctgatgttgctgatgttgctgcccctgtgacaagccattatcttattacgccccacacaggctgcaaatgaagggtggtgaatcgaggggcggtggcgaaggaaggctgctgctgcccccttccctcttcctgttgcgcgttgtcagtcggcgttgctgtgtgtgtgtgcgatgtgtaatttaaaatgacgccaatgctgcggcacgttgccaacagacacacacacacacacacacatgtggaggcactttggcagactgagaggcgcttagcaaatagttgacgagggctgccgctgaagttccagccactggctggccaattaggtaatcgaattgcacttcaatgagtacgtattgagggttaaagtgattatttttttagttagcaaatcagcagggtgctggatttgaacatgtggtaaaccaataaaaggatgtacgattctaattttaataaaatatcttataggcttactgagatttacatgaagaatacataggaaagtcgacaaatcgatttttaggccataatcacaagcttagtagtcactttgagcctttttctcacatcttcgttaaaccgaatgtctgtaattgtagtcgcttgccgtgcaattaaccccagaacgccggccgcccacttttgagcccctgctgcttgatgctaattacccagaccccttggcgccagaactcctcgcacaacccactgttagcctccgccagcatacatttgtagcttcatgtgtaatgaagcagctgacgcagcaagttgcaaaaagttttaactgtgaaacgatgttgctgctgcacaggtgtcgtcgccagtcgccagtctccattcgccattcgccattcgccagtaatccctcccagaagcgggacgcgggtcgggcgccacttgcgcataatgacgcacaatgcggagtccgcaacacacagtggcccgcagtcctggtgtccaccagtccaatagtccagcagtccgggagtcccaggttcgagtttcgaggtccgaggtccagttgcttgtcattcgcacacacacatatgtggcgggggattgcgagggacgggcgatgtggagggtaaatgggcagcttaccgggaaagcacatgcagctgtgctgtgatttcccacccccccggccatccaactcactctcagctggccttcaacccccggaaaagccacccaccttcaacgccccattttccacatcctttgttgttgttatttcagttggcgcgccttttcgttaaccactcctcgtcctttttatccagctctcctacaatctgtgtgtgtgtgtgtgtgcggctgtttttgttagcaaaagggataaaagtataaaatgctttggtgtccagcgcatggctcgctccccccgcgcgctggaattaaatgaatgtcgtttaaaatttgtcctttgttttttatgatttctgccagcctaattgaaaattatgcagtgaaaatgtattgcgccgtcgcccttcatttgtcaagtcgtcgagcatggactgctaatagttgctaagcagtcctctcgcaagtggagtaattgctataagatgccaccgcttggggcaagtaaagggtggagcagattcaacttgtgtagtatcaaaagtgcagttcaaaggttgaatacctttaatttaaattcatagaggtgtcttgtccaagttcaaaatcatagaatcatcatagcggatcccagtaaattggattccccgatgactggtacatgtgcttataaatcacgccattgacattcccaaaaatgtaagtccgtaattgggcttctatcccactgtgctgcctccgtttaaataattacttttcctcttggcaattttgccggcagccgtcgcagcctcagcctgccagctcctttcccctagctccccttcagtacgggatcctggatcctgaagcctggatcccgctccatcctgccgcttcagattcagcttcagcttcagctggcccaagttttgtgggaaaaacttctgcgggcgacattttccatttttctgcgatggaagcttgtgaggctcccggctctttgaagtgcctgccttacacaggacgatggagcgagggggcatcgtgtgcgaggattgggggaatgggtgggtgaactgggggcgccttctggcgacgacaggcgacagctgcttgagcgacaacgacacgactgctcctgacatttgattcattcgtcatagccagggccaaaggcggcagctgccggctattaagtgagtcagaaccaccaccaccaccacgaccacccaaccgatgccatcccctccaccggcaacccattccacccacttcccaattaagctcacctgccgcctttcacaaacacttgttgtttgcctcggcacctccccactcccaccaccaccaccaccaccaccaccacaaccttctccaccgcttcacgcatgttttgtctcccagttttttgcgaactgtggaaagacctcgctgcaaaacacttgtcaagtgttcctgcgactgagggatggcagaagatccaatcgtctggccgggactttcccagcagagtaggggcatggagaagggggctgggtcgtcattagtcggccctcactttggcaaacggcagctggcggcgtgtcaagtgtttgtttttaatagaatttcatttgcggcatttgagtgtaatttcgctctgatgccaagcagctgctcccactgcccccgttgcaagcccctccccctccgataaggcggggcgggggaaggctgggtgggaggctgaggtatccccacttgattgtaaatattgccggccgcgacgattgactttaaacaattgctctaaacatttcttgcacctcgaacggccgggtagagattgatcgaaaacatgaatgaaactgaacaggtccctgcttttccgccttcctgtggttttcctccgtgttttccctgcttttcccccaccgcctccttacgcaagggcacggcaagctgcacaaactcccacagtccgcaaaggtatttacatattttagtgataaaaatcaacacaaaaatgtttcccctcatgcgagctggacatgaacaactttcaggtggggtgtggaaagatgtctgcttgcgtggagagtgggtgggtggtggtggatggtgggtggccagaactcccggggaaatgggtcgcagtgatgggtaaacaggaagtgcagtgtcgagtcaattagcaaggctgcgctcccgatctcttggtctcccctttgagaaatcgggtaggtttcccaatggattttcatttagtcggccgcttcgagtgaaaagttcttcgactcaattacgaaacaggtgtctacggcgtgcggactgctggcagctgtcggcattctttgactataaattggtttggtctatggcatttggaggcaaggaaaaatctcgaaaacttgtggagcattgatagatataatattagttactgaacgaaggtcagaaaatcaaatggcatccaggaattagagttatgacacgcatcgtcttcaaaagatagctagaagatagatgggatattcaattgaccatgaggcaactcttaaatttaattcatgaggatcagtggcagcttagagtcctttaatgcagctggtttattattgaatggaacgtgcatatttaaaataatcgcacttaagcgcctctaaaatggaagcaatttggccaaattaaagcggcagctgttctttcttctcaaagcgaacaaaagcccaaggtctccgcctttgaaagtgtatttcggtgcgggtgcgcccaatttgcatgtcagacaaccatttaatcaaattgaaatcaaataagttgaaaacataatgtgagaactttgtcacttgatgttttcgtctatcgcccggaacctgggaacttggaaacctgtgccctctgccggcgaaattagctgggcgtgggtaggaggtcctccccatatcttttccacctccctcgtctagctaaccgcttctttcccttcctccttccagatggcgctcgacggcaaggcgataattaaggaggagattaccgacaaggacgcttacgacgcagctgcggcggcggcagcggcggtggcagcgggagccgctctggcggtggcctctgctgcggccgtccaggtgccacccgcgtcatcgtcctcggcgggatcagcgtcatcggcagccgccgcggccaccaacaacacaacatcggcggcagccacagcggcggcaattagtcgtcggcttaaaggtgagtggagcacatttaagtgaactgcactgcgagaaacgggggcggaagttgtggccatatattctatgacgaagcgaagtgaagtaaagtaaaagtgatgggtgaagatatatatcattgtttggaactataataggcattgttaggattattatcttgttgatatttgaatgagaaccaatgcaagttgcttacaattcatactttaaagtctaggatattcacatttatgattgaacacttaaagtgccagtgtacgttcaaaatccccaatatttatagctgtttacttgatggtgtgaacctgagcagctgcacgtgtttcgccatcctttaaaatgggcccagatcccagctccagctccacttcgaactccatctggaactgcacatcagagcatttcggatgcgttactttctaaatggttttccgaaccgaaccgggaccacaggccgcagtcggaaactttccgagtatgcgaatgaaaaaggccaaaagcatttgctagtttgcaccgcaccccaaactcctgctcgaaaaaatgaggaaaaaaccgaaaccgctgctggcattgttcccagcatcagaccagcattttgttgcctgctcttgggcgcccgacactggaaaagagcaggggtggtggtggagagggggatcattgcgactttgattgccggattctccggactacctgcgcctgttcccaggcaaatgatgtgtggcccagcatttaagtcgcatgaatttctttcttttcaccagcaattagcattttccgggaaaacacagctctctgtgcagcaggccaccccttccccgcatcacagccgatgataatcagaagcagtgcatgatgaatatttgccaaaatgattgttttcccaaatgactatgccagcaacagcaatgacagcagcagcaccaccaccaccaccaacaacaaactaaacttgccaacgtttcgttttgtgcgctcgactgcaatctatgggacgcagctgtgcaaattctgttgcccacatagacacacagcacacgcacacacacagcacacttatacacacagtacactcactgagagagagacgcacacacagatgcatggctgggaccacgctgcgtatacgtaaccttaaatcgatggagggagctcatgatgctggcaaatgttgggccagcagttgaaacctcccgagtcctccgctcgaaacattatgttttagaaaatatgtgaattgtcaacacagaattttcgtaaatagtttttcggttttgcgtggggtttttcttggcagcagctgctgctcggccagcaactttgggtcagcagttgaggctttcccacaacaggaccaaaccaaaacaaaccgaaacttttaagcccggtcaagtgcaatattttacaattgtacaccacactagtcgagcttggtgggtgaaagcgatgtggcgatggcgatgccggccaattaagcccggaaaaacggcatgagggggagcatgtgatccatcattgtctatgcttggcgtttgataagagccgccgagtcggttgactgatgcctccgactccgaccaataccacgaccatccgtatccgtatccgtgtgtctgccatctcccattcggatggcagtggatgtggatgtggctgtgggtggtcgtgtggcccttcgattggcaaggcggtggcgtgcctgaatggctgtgaaaacacagccagttgcagctgtatccacaatcattatcacaaaagcaaactgtgcagcagccgcacggcagcaacagcagcaacagcagcaacatcagcagcagcagcagtagcaacagcatcagcggcaacatcaactgactgccattcccatcgtcgttgtcgtcatcatcgtcctcatcatcatggtcatcagcaacattcgccacccacaatgtctgtcagccaccagccccatcgccatctacccactcgccaacaacccaccaatccagcgacccacacccataaacaatttccattagcttgtgcaaacaaagtttgtgtgtgtttggtcgttacaggcgacaaatgtgtcctaagccttttattttataccatttgtgataccacatttcaggaattcaaggaagcgacagaaaagtaaccaacttctatgttgcaacctaaataggacgaatttaaatgcaccacacactcttctaatgggtttgaaagtataaggattgatacagtacactattaaatacattcttatttctttttatggaatataaaccatttaccaaatgataaacccaatttactatgccaccatttcgtcgcctgacaatgagtttcccagcagcttctccgtccagctgcgtcctgcggatttgcgctaagctttcatttttgagctgcagcatcgctctggcaggatgatggttggctgcgatgggacagcacgtaccgcagtgtgctgcacccgcacccgctgcctccatcatcggtggaccacccacatcctcccactcgtcgactcgtccttgcaattagtgcgttatgtggtgcttgatttgcttgcctgactgggcccaaaccacacacacagcacactttgcaagggccaaaaatgtttgctaatttatttcccatgttcaaacaaatttgttaatgccggcagttggtcgggtatgtagtagccagtatccagtattcagtttgcagtatgtagtatgtagtatgtagtatgtagttgcgcagttgaccagatctgtgggacaagtgctgtagcttgttgtggttaggtggcacatatatttccgttcctcggtttctgctaatgcatttgtaatgcgcctgggctgcacatcctgtcctggtctcgaacttggacttggacttgtttcccatgttccaggatgaacacgcaactaactactcgtcctcctctctgcccaccaaattagccagcagcagcggcggggacaagagctccacctcatcctcgagcagcaaggacagcagccacacctccagcagcaggagcgagagggacagggagagggagcgagaacgggagcgggaacgcgaccgcctgtgccgcactccgccggactctccgccggacagctcgcgcagcctggccccccgctcgccccactccccactacagttgcaccagcatccgcagcgcaacgccagcgtttccccggtggtcaatggatcctcctcgggtggaggaggcgtgggatcctccggcacttcgcctacgcccacaccgggcagtcagcatgccgcctccttggccgcagccgccgccgccgctgcagccgcccacgtggagcaggcgcgactggtttccaagatgcgcaagttcctgggcgccctggtccaattctcccaggaactgggacagccggaggtgtgcgaaagggtgcgcgccctggtgctgtccctctgcagcggcagcatctccgtggaggagttccggctggccctgcaggaggccatcaacctgccactccggccctatgtggttccgctcctcaaaaacagcatcgctctggtgcagcgggagattctggcactggccagagccaccaaccaatccgccctgcagtacgtgaccaacaacgagcaggcggtgatggagttcgctccccacggagtggccagtgccgagttcggggacatattcattcagctggaggcacccacatcaaacggcagcagtgcggtcttcaagcgccgctcctcggactccatgatggagcatggcggccacaacggcctgcaggagtggaacgaatacatggccagcggcggagcgggctatcctccaccgcccagcaagcgcctcacactgcatcccgcccactcggtggtggcctacggggaatacggggtatcgtccgcggaaggactgccctcggcggcggccttcatgcagcgcgacgaacgggatctgcggatgagcgaggcgcaggccaggcacgccgctcctccacaaagggcaggaaacccacagcccaatcccaatgcagctgctcctggagctccgggagcgggtggcgaggaggagtggaagaacatccacaccatgctcaactgcatctccgccatggtggacaagacgaagcgggccatcacgatcctccagcagcggggcatcgagccccagcatcccaacagcggccaggaggtaactcccgcggccatggcggagctgcgacgccagacggaggagaaggtcgccgagttcaaacggaatgcggaggatgcagtgacacaggtgaggggctaccaccttttcgcaatcgcaatgattggatcgatatgttattttattgtaatcaaatgtctttgtatttttttttccccccaggtgaaacgccaagctgtcattgaaatccagagggcagtggtggccgctgaaactcgagctgctgagatcatgacgcaggaacgcctgcgcatggagaagttcttcatggagatgagccgccattccagcggagaacgcgatctggacaacaagtcgccgtcaatggccagtgcacagaatgtaagctcattaaatacgttaataagtgctttgtttataagcttttaaccgcttttagggcagcaatctgcagcagcagtgctggaactgcgggcgcaaggcaacggagacctgttccggctgcaacatggcccgatattgcagcgcctcgtgtcagtacagggattgggatagtcaccatcaggtgggttcctcaaaaatatttaacattaatcttaatgagttatcagggcgttccttctatattctactgaataaaacatagttagtgaactatgaactatttgattataatggttttttaccttccaggtttgtggcaacacccgggccagtgagctgagcgccaagcacctgcactcggccagcaacctgagtctgcgcaacgcgatggccacccgctcaccacccactcccaactcagcggcccacctgcaggcggcggcagctgctgcggctgctgcagcaggcgcccgggaagcggtcagtgctccggtcggcggtcctggtgcaggaatagccgtcggtacgggagcgggaagcggaggccaatccggtggcggaggaggaggcgggggtggagggggcggtggagccgcggctgctgctgtggccgccgccactccaggtgctttggtggccaacgggttgggctccaaatgacgcattcgcatgatgaaacccaagaagaagtacttgtgctagtcaaattaaagggggtgaaccacaaaaccatatacaccattaaaaagaaaatatgcagctaatatagagatatccaaaaacaaaaatcgagtgaagaattcacggtcgcatcgtcggtagacgtgaagtgaagtagatgatgcttaacatccagaaacgcataaatagatacagattgacgtgcattttcactaaagtttatacattacaatgtttcaagatgtccatggtattgagcgggttgaattaaatgggttgaaaatccatagaagaaaccaatattaattactctcactcacaaaacattttacggaatttatccagcaattctcaacctgtgacttaatgtatgaaatcgcatttttaccatcagcactttcacactcgaaatacataaataataattaataacaatatgtgcacactaataatgaattacataagcaagctaaatcatttaaatcagaacttgagaagcagtcaaattctgtgagtaagcaacccaaagcgagtaaaaacaaaaactgaacatagtagattttattaatacaatacagtatattactacggatatgattacgattatggctaatttattgagcgagtttaatttattgattagtatttattgtactccctaaactaaacctaaatgtacttttatcataaacaaataccaagtaaatgttaaacccacaaacgcgggctgctgcaaggctccggcaaaagaaacccaagaaataaagtgttttaaaccaaacgaagtctcgattcccatttccaaattcgaattagaaaataacatttcgattggcagcctaaaagaaggccatgaaaagcgcattagtgtgaggcgggtgtgcgcctcagagtgtgctacaaaaccacaaactactgtgatgaaatttcaattatcgtcactcagctgtgtgctccgtgtcggtgtgagtatctgtgtgagcgccatggtgagtatctgcgcctgtgtgtgtgtgcatgtatggcacacctgctgctgtcgcattgcaagcgagcaagcaaaagctcgttagtcccccgctccgcccgcacccggctcatccccttgctcccttccttccttcattccaaggacgcccacaacatttgttgcacacgcacacacacggcgtgcggctagccacccactcacacacatacacaaacagacattcgcagaggggcagcagcttgccttggcttcgcctttgtctggatgctgtgcgcttttttgcaacccttcagccaacaacaatgatgatgacggtggcatttgctacctgagtgatttcctaaagcacagctccactccgctcaccaccctcttcatccagtgccaccaccacttccggttgcgagtgggattcacatgcacattcgaatggctgcacgtccagctggcatgtactaccatttccatctcccggggattgccagtccccgttcgcagccactcgattacccctttgtgccggtgccggtgccggccagccttcgttagcttctatttaacatgcagttatcgtttgttatcgccagcagccacaagccaagctcccacagaagcagcttgtcaactggcagcgaagtgaggagggatgacagtcctccggatgccctgcaaatcccttaattatataatcgagccaggctgagtctgcagagtgagtgactgaatggtagaagatacgagttcgtttctaaatctattgagagtaggattcttcgctttcgaaaaacaag

SEQ ID NO: 6350 - DNA, 3406 bp, DROSOPHILA
actggtcggacgtgctcagctccgcggctcctcagttgtgcagttcaatcgcatcggatactcgtatattcgcattcgcgtgttcgagcgcgccattcaagatagtcgagccgcagatactttcgcatccattcagataccgattctgattttgattccgattcagtcgcttgccgttgctccgagatgccggttcgcgtttcgcgctgccgccgccgttccgacaatgattcgatggtaaacaataacaaccactcacaagcggtcgccaagtgttaggtccagcgaaagcatctcgcagatagaatactaaatcaagccacaagatacactccacctacgaagcgtcggaacagcagcgatctgccaaaatgatggcgctcgacggcaaggcgataattaaggaggagattaccgacaaggacgcttacgacgcagctgcggcggcggcagcggcggtggcagcgggagccgctctggcggtggcctctgctgcggccgtccaggtgccacccgcgtcatcgtcctcggcgggatcagcgtcatcggcagccgccgcggccaccaacaacacaacatcggcggcagccacagcggcggcaattagtcgtcggcttaaagccagcagcagcggcggggacaagagctccacctcatcctcgagcagcaaggacagcagccacacctccagcagcaggagcgagagggacagggagagggagcgagaacgggagcgggaacgcgaccgcctgtgccgcactccgccggactctccgccggacagctcgcgcagcctggccccccgctcgccccactccccactacagttgcaccagcatccgcagcgcaacgccagcgtttccccggtggtcaatggatcctcctcgggtggaggaggcgtgggatcctccggcacttcgcctacgcccacaccgggcagtcagcatgccgcctccttggccgcagccgccgccgccgctgcagccgcccacgtggagcaggcgcgactggtttccaagatgcgcaagttcctgggcgccctggtccaattctcccaggaactgggacagccggaggtgtgcgaaagggtgcgcgccctggtgctgtccctctgcagcggcagcatctccgtggaggagttccggctggccctgcaggaggccatcaacctgccactccggccctatgtggttccgctcctcaaaaacagcatcgctctggtgcagcgggagattctggcactggccagagccaccaaccaatccgccctgcagtacgtgaccaacaacgagcaggcggtgatggagttcgctccccacggagtggccagtgccgagttcggggacatattcattcagctggaggcacccacatcaaacggcagcagtgcggtcttcaagcgccgctcctcggactccatgatggagcatggcggccacaacggcctgcaggagtggaacgaatacatggccagcggcggagcgggctatcctccaccgcccagcaagcgcctcacactgcatcccgcccactcggtggtggcctacggggaatacggggtatcgtccgcggaaggactgccctcggcggcggccttcatgcagcgcgacgaacgggatctgcggatgagcgaggcgcaggccaggcacgccgctcctccacaaagggcaggaaacccacagcccaatcccaatgcagctgctcctggagctccgggagcgggtggcgaggaggagtggaagaacatccacaccatgctcaactgcatctccgccatggtggacaagacgaagcgggccatcacgatcctccagcagcggggcatcgagccccagcatcccaacagcggccaggaggtaactcccgcggccatggcggagctgcgacgccagacggaggagaaggtcgccgagttcaaacggaatgcggaggatgcagtgacacaggtgaaacgccaagctgtcattgaaatccagagggcagtggtggccgctgaaactcgagctgctgagatcatgacgcaggaacgcctgcgcatggagaagttcttcatggagatgagccgccattccagcggagaacgcgatctggacaacaagtcgccgtcaatggccagtgcacagaatggcagcaatctgcagcagcagtgctggaactgcgggcgcaaggcaacggagacctgttccggctgcaacatggcccgatattgcagcgcctcgtgtcagtacagggattgggatagtcaccatcaggtttgtggcaacacccgggccagtgagctgagcgccaagcacctgcactcggccagcaacctgagtctgcgcaacgcgatggccacccgctcaccacccactcccaactcagcggcccacctgcaggcggcggcagctgctgcggctgctgcagcaggcgcccgggaagcggtcagtgctccggtcggcggtcctggtgcaggaatagccgtcggtacgggagcgggaagcggaggccaatccggtggcggaggaggaggcgggggtggagggggcggtggagccgcggctgctgctgtggccgccgccactccaggtgctttggtggccaacgggttgggctccaaatgacgcattcgcatgatgaaacccaagaagaagtacttgtgctagtcaaattaaagggggtgaaccacaaaaccatatacaccattaaaaagaaaatatgcagctaatatagagatatccaaaaacaaaaatcgagtgaagaattcacggtcgcatcgtcggtagacgtgaagtgaagtagatgatgcttaacatccagaaacgcataaatagatacagattgacgtgcattttcactaaagtttatacattacaatgtttcaagatgtccatggtattgagcgggttgaattaaatgggttgaaaatccatagaagaaaccaatattaattactctcactcacaaaacattttacggaatttatccagcaattctcaacctgtgacttaatgtatgaaatcgcatttttaccatcagcactttcacactcgaaatacataaataataattaataacaatatgtgcacactaataatgaattacataagcaagctaaatcatttaaatcagaacttgagaagcagtcaaattctgtgagtaagcaacccaaagcgagtaaaaacaaaaactgaacatagtagattttattaatacaatacagtatattactacggatatgattacgattatggctaatttattgagcgagtttaatttattgattagtatttattgtactccctaaactaaacctaaatgtacttttatcataaacaaataccaagtaaatgttaaacccacaaacgcgggctgctgcaaggctccggcaaaagaaacccaagaaataaagtgttttaaaccaaac

SEQ ID NO: 6351 - protein, 742 aa, DROSOPHILA
MALDGKAIIKEEITDKDAYDAAAAAAAAVAAGAALAVASAAAVQVPPASSSSAGSASSAAAAATNNTTSAAATAAAISRRLKASSSGGDKSSTSSSSSKDSSHTSSSRSERDRERERERERERDRLCRTPPDSPPDSSRSLAPRSPHSPLQLHQHPQRNASVSPVVNGSSSGGGGVGSSGTSPTPTPGSQHAASLAAAAAAAAAAHVEQARLVSKMRKFLGALVQFSQELGQPEVCERVRALVLSLCSGSISVEEFRLALQEAINLPLRPYVVPLLKNSIALVQREILALARATNQSALQYVTNNEQAVMEFAPHGVASAEFGDIFIQLEAPTSNGSSAVFKRRSSDSMMEHGGHNGLQEWNEYMASGGAGYPPPPSKRLTLHPAHSVVAYGEYGVSSAEGLPSAAAFMQRDERDLRMSEAQARHAAPPQRAGNPQPNPNAAAPGAPGAGGEEEWKNIHTMLNCISAMVDKTKRAITILQQRGIEPQHPNSGQEVTPAAMAELRRQTEEKVAEFKRNAEDAVTQVKRQAVIEIQRAVVAAETRAAEIMTQERLRMEKFFMEMSRHSSGERDLDNKSPSMASAQNGSNLQQQCWNCGRKATETCSGCNMARYCSASCQYRDWDSHHQVCGNTRASELSAKHLHSASNLSLRNAMATRSPPTPNSAAHLQAAAAAAAAAAGAREAVSAPVGGPGAGIAVGTGAGSGGQSGGGGGGGGGGGGGAAAAAVAAATPGALVANGLGSK

SEQ ID NO: 6352 - DNA, 8860 bp, DROSOPHILA
ggaatgggaatctcggcaggcggtgaccagattttcatagactcacattcgtttaacaacataattttctcctaggaaacagttagtttgccttgacacatactccgagtaactcccgaaaacaaaatacaaaaaacatcagcagaaccgccgaattaagaaacccgctaatccttcccaggattctttcagtgcgtttcgtcgagttgtggtcgaggattcaaattcaaaggttatattgaaaattattattttctattttgttttccttgctcgaccaccaacccaatcgcatctaatcgcaaggagcattcagtccagtgcaaaagagacaaaaactgaccagatctggtccggattatccccgttttgctaaggtgagtgagtgccatgtggcggcatttcctactctgggttgtccgtatgcagcgattattacatcatatcctagcaggcgtgtcgtttgctgtcggttgtaatgcatacaaatgcctatctgagctgccgtctccccgattagtcactttttttgtacgtttgtaagctgccgccagttttcagagtggcgccacggggatacgtggaatagcgtggtaagtgggcgccacatgctccaccatcgaccccactaaccgactcctcaccaccagttgtgctctacgtatatttttatatcatcattgcggaaccacaaagctctcgactactttctaactgaggaactgaatcaaaggtgagttcaattcagcatattctgtatatttgcgctatgactctttcccgcataaattgatttaaataatatgtagttatcaccgacaattattactttatttgctaatacaatttccttaatttgtacgaatgcgtatgtcgtaggacatagcaggactaaaactgtgttttaagcttcgatatatttacatggtccctacaagctgaacttaagctatccttaatccaagtgccataaataagaggggggggggactgtttggtgctataactccgtggtctccagttttcgggccaggatctgagcattgttggtcattttgtcgatttggttgtatagattaaagtgccgattaagatcattgctgttgttgaatagtttggcagttcccttgagcgtttcgtgcatatcctgtgtggccacggccagaaagttatcatccaaagagtcatggccaccaatactatggagaaataagtgttatatatttaagtaagggacgatttagtgatttcctctattatcgcacctgccactttcttctgatttgaaccactcgttgtcgtaaccctttagccaaataggatttgatccttggacactgtgcttgttggtatttggcactcgagtggccggctcctgagcgtcttgcagggacatcgaggagtgaccacctaaatggaatttgtgtattaaatatattaatttatcttttatcctaatcgttacttacggaatatattgactttagcggctctcagctgcctgcggtatccattccgttgagaggcgcaaagtgctatagtgactaccagtagagtggccagaaagaggttggtgaaaatcagccacacgaataaaggacctcggctgggtcccgcggtcaggagctgagcctctgccgcctgcgtgtccagcacgttgagctctttaaatagcccattcaggctttcgatgtgcgagtcaatcagtttgagcacctcggatacctcgtagattgagttatcctcccgctcgactagatgcatgtacagatccgtctttgtcttgtccaccgaaccatccttgttctcatgaaccttaatctcatcaatgtttacaatcgattctgttatgttgctcagggtgctaaggtatggaaataacattagaaggggggttatactttaaaatcaactcaatatttactctctgaaggagtccactcgagatcgcagttcgtccggctgaagtctaaacacgaatcgcaccttttggtcctctcttaacaagtagataaacacatgggccacatccttcattcctgaggtgtcgttggccaaaacgacgaaatcgaaatagcccttcattcccttttgtgggtcaaagtttagctgcacttctccggtttcctgatcgagaaggaagggagctttgcgtacgttctccaatccctcggaaagagtctgtcggatttcacccacttggtagtatccaatccttccattatctccttcatctgcatccgtagcctccactcgcatgaattttaaaccgaaatcagcattggtcgttataccaccagtaaagattttagaacggaatctcggtggattatcgttgatgtccagcacgcgcacctttacttttattacagtgctatctagttctggatgggttgttgccaatcctccggttggatcctcctgactactgtcataggcttcatacgataacagctctgcatcttctggtccgtattcattactctctgtcgatctcaattgtcgagagtgtttgaaacgatcatatccaaactgttggttatgcacaatgcctcccaatctattgttaatctcgattcccatacgacgacgtttttcgccaccagatatagaatcatttctacaattctcagtggcacgaacatagagcgtaaaattggcaatcacctcgcgatccagttcacggtcaacagtcaatatatgggtttcgggatcgagacgaaagtatcccgcttcgtttccattcactataaagtagcacacctggctgggcgtatcattcggatcgtccagttccaactgatccttatctatggtgtccggtagctttattctttcggatcctggatccgagtgctccgtgaagtttacggatatttcgttaaccataaactgaggctcataatcgttaacattccgaacataaatcgttagatccaagtctgaactcagtgaggttggcaatccctgatcataggcttctatacgtatctgtaatgaaaattatatcatatagtatattcttttgtgtgtttatactttaaaatttgtaggtataaggagatttggcatttacctcgtgaatcttctgcttttcgcggttaagttgttccttcagaaagagctcccctgtgctgccgtctacttcaaacattttgtagctgcccaatggatcgggtttgagtctgtatctcaccaaagcattctgccccatatccccatcactggcatatgcctgtagtatcagcgttcccacagtcgcattctccggaatgcgaacagtggtgttatgaagtggcctcacaaaaaccggagcgtgatcattgaaatccgatacgcaaatatccaaggtgttgtgcacaatattggctggaaggcccatatctcgcgtagttatagtaaggctatagtttccgtatctattgcgcaaacttttgctagcgaagatttgggcattccaagcgtctatctggcgcagctcaaacatacctttaagtgcaaatatatttagtgattgaaagacttattctccttcaaatccttaccatctttgttaccccgagtgatggcaaaatcgagtctaccatttggcgtagtggggtcatctgcatccttgcccactatgcttgccactcgttcatgcaactcgtgatactcagtgattaaaacacaactcatgggcaagtcaacctctggtggattatcgttctcatcgagtatggaaatgctgaaagagctaaatgaaataaatttgtcaaatgcttaaatttttataacttacaaaacctgtttgaaggcattgcgactttctccggccaggaatccgaattgatagttatcccaggcctcgataaccaggttgtaggaatccttagactccctgtccaaacgatcggccaccgttagcaccccagtgtctgcatctatggtaaactttccctgcgaactgatgcgatccatcaggaaggtgatcttgccaaaatctcccgaatccgcatctccagcctggagagtggcaactctggtgcctggagctgcattttcactaatcgtatagttcttgctgccacccacaaagtagggattgttatcattctcatccagcactgttatatacacatccaccagtgaggatcttgctggaattccagaatccgtggccctcacactgaaatttagccactgatgctgctcatggtcaatcttgctggccaccacaatttcccctgtttgcggatccagatgcattagtgatcggtacgtgggatttccttccagggcataggttatggtgcgattcttgtccacatctgaggccagcacattcacaatcattgccccgtttatgctgttctccgtaattgattgacggtaaaagggaagtcgaaactttgggttattatcattttcatccagcacttgaatgctcaggaaaccctcagcgatttgtctgcccttggccgcagccagatcctccacagtaatggctagcttaatatgctcgactctttcgcgatccaacagcttaaccaccttgagggttccctcgatggagtccacctcgaaggcgcccaagaagtcgtattcgctactcttcaccagcgccccctcttcagttcgaccttcgcagtgttctgggttcagtttgtaccgcagaatggccttgtggtccaggtcagttgcctgaatgcgatacaccagtgtgcccacaggcgtgttctctaagatctgcaatgctggcatttcctttagcacaggcggcttattattcacatcctgaatgctaatgttcaccgtacatgtggtcatcaactgggaattgcccaatccaccatccaaagcaatctgtggtaaacaattacgaaagggttttaatattctacaaaaaggaatctcttttgaacgtaccactgacagagtatagagtgatctcttgctctctgtgagatctggatctagattggctccgtgtgccaccgatataactcccgtttccgagttgatgataaacttatcaccggcacccgtctgtatgcgatacaccaccacattgttgggtgctgatccatctcgatctatggccgttacctgcagcaccgagctcccacctggcagatcctcgggaaccgtctttgcatagaagctttgctgaaatatcggcgcattgtcgttaacatcctgcacgtaaataagaacaggaaccacagtggagagcattggaatgcccgagtctcgtgctcgaaccagcagatcgatctctcgaatgctaaaggatccacccgtgtaaggatcacttctgcgactgctcccatctaccagttcctcgaaatcaaaactgtgcaccggacgcagaaggccactctggggatctatagtgaagttggagcggtacagaccctcgacaatctcgtaggtcacctggctgttctccgtgccattgagatccgcatctctggcctccaattgcagaggggtttcgaactcagcctgattctccagcaacttggtctcgtattgccgctgaggaaatgtgggtgcgttatcgttcacatccaggatgtctacgattatttgggccgtattcctgttgccctgaccagcgttgtcgatggcttccacggtgagatagtgtcgtgaaatgatttcacgatcgaaggcagttccacctgcctgtttgatggttatcactcccgtaatggggttgagattgagtcttaaaggggaaaggtatgttagacccgtatcatagttttaattttaaaacttacaaatgagcgattcctcctctgaggttggtgtaacgtatacccatagttccataatccccagaatccacatcaaccgcctggacatgggtgatgattgtatcctgctcgctgttttccaaaacgctcgcattataaatggtttgactaaactctgggaagttgtcgttttggtctcgtataaaaatctgaacatgagcagaactatataagagaagatatattttagacattactctatatgcattttccacactataagcttacctccatcgactgggctcgtcgacctccctggcgaatatcgtaaaattgacctcggtgaattgttcaaaatcgagagactttgagttcttcacccgcagcataaagttggcctcattaacagccaactcgggtacgatctcgaacagatcgttgggcggatccagaaacaagcggaaggtgccattgttgccctcatcgtggtcgaagaccacgttttgcacctcctcgtcgatgaaattaagcggggtattggtttgggcattctcgttgacctcacaacgatagactgtttctccaaatgtgggtatttcgtcatttacatcgcttacaatgaccgtaacttcggtgcgtacagttgtgggcgccatttgggtattcgacttggacaactcggtggccgaaatacgcaggatatgagctccattcacctgatcactctgctcctcgcgatccagtttggttagcgtgtgaactatgcctgtgtgcggattaatgtcgaacagatcgttggcctccagggaataggctatgggattattgatcccacgatctccatctatagctcgaactcgcagaacttttgtgcccactggagcatcttcggcaattcgggccactgcctgtacttctacgaactccggcggctgatcctccagatcctttaccttcaccaatatggcagcagttcccgtattgatcggtccctgattggcacgatcgatggccaggactctcagttgatacagactctttctctcatagtccagctccttttgcaacctcaatatgcccttgccttggtgcgtagctatggagaacacatcattgtcgccatccaattcttgcagatagtaaaccacctggccgtaggccccttcatccgcatccgtggcctccagagtgctgaccactcccggtgcactgccctccggtatttcaatggcattttgatagggcagaaatgtgggaacattatcgtttatatcctcaaccaggagcaaaaaactctgggttacatagttgtgatcgctgtagtgactgtcagtcagcgttagcactatggcatactcgtcctgcagctcccgatccagttccttggccaaaaagatcttggcctcgttgccacccgtgttctcaatccgaatgatctcgctatcatgcgaattgcgcttgccaaaggtcagcggatcgttgtccggatcgtaaccctttagcgtgtatatcagggttccttacgaggaaaaaaaagtgcaaaaattcaatcaaaaattatttactatctatcttttgcagattatttataggaaataaatgtaaagccattcagcaaaagatgattatacggataagcaaaccatttttaaacacgacacattgtcatttttgatatctggtcgaatttatattacgattttattttgcacaacttcaagattaagtatatttagcttaaaattgttgagacatgacacactaccattctttgtatagataataagtttgctatctgatatttcacatttctgcttagcttttgaaataattttctttttttgtaatatattaactctagactggacttacccactttcgtttcaggactctccttcagacgcagtacaatctccgactggccgtcgatagcgaaacgcggcggtcgatttgaggcaaccaagctgattagtgtggtgagtattatgacttggatggatatggagcttatataactagagaaacttcgccgcctttgtccttttaagcgcaccttcttgtagtccatgctgtcgattccattaccattcgccggcggctgtgattcgttgtgcatcgtgtgtggcgtttgggaacgacacctttggggttactggttataataataacagtcactaccacatgacaggtagaatcgagcggcgacacctagaaaatagacgaagtgttacgacagaagccaagtggagtgttaacccattttccccacatgtcgcacgttttatgggccgtgatctatgacccgctggcagtttcgctcgagaagctaacttaaagtggagggaagaatccaccagagaagttctgtgctcgtttgcccaaaaaaaaaaaaaaaaacagaaacaagaagtgaattgggtcgtgcattaagaaatccgaatggaactggactcgcagtctgcgtgtctacaggtgttctatatgttgtccgtcttttctgcgtgagaattggccagtggattggctgaggcagatctttgcgaaagttttatgctcaaattaattaagcgtcagctctttattggctttatacttcagttgagtttacttaaatgctggctcagcgccagcctggaattccgctaaagaaattttatgggtttcttcacagctgcctttgggttttgattgttattttgttcgcggtttaacgaccggaacgttttctaaactgcccggcaattattacaattttggcttattcatgtgccagatttgtctcattgcaaatttcaaacaaattgcgaataagttctcgctcaagtggagtgaaaattgaaagttgtcttcgaaagatgaagctatcacgagcttaaagaaaaccgcatttgcgaatatttttaatgatgttgctacacttttggaaaaacttccatcgccaacggcttatcttttcacagaggggggtgcgtgtgaaaaatgcatttgtagagcgatgactgcatctgtcaaatgcagatgcatatatgcattattaatgccattgttcgcgagttcaactcggttaggctcatttgcaatcggagctgcggatccgcaagatttgccaactgtgg

SEQ ID NO: 6353 - DNA, 6018 bp, DROSOPHILA
atgcacaacgaatcacagccgccggcgaatggtaatggaatcgacagcatggactacaagaaggtgcgcttaaaaggacaaaggcggcgaagtttctctagttatataagctccatatccatccaagtcataatactcaccacactaatcagcttggttgcctcaaatcgaccgccgcgtttcgctatcgacggccagtcggagattgtactgcgtctgaaggagagtcctgaaacgaaagtgggaaccctgatatacacgctaaagggttacgatccggacaacgatccgctgacctttggcaagcgcaattcgcatgatagcgagatcattcggattgagaacacgggtggcaacgaggccaagatctttttggccaaggaactggatcgggagctgcaggacgagtatgccatagtgctaacgctgactgacagtcactacagcgatcacaactatgtaacccagagttttttgctcctggttgaggatataaacgataatgttcccacatttctgccctatcaaaatgccattgaaataccggagggcagtgcaccgggagtggtcagcactctggaggccacggatgcggatgaaggggcctacggccaggtggtttactatctgcaagaattggatggcgacaatgatgtgttctccatagctacgcaccaaggcaagggcatattgaggttgcaaaaggagctggactatgagagaaagagtctgtatcaactgagagtcctggccatcgatcgtgccaatcagggaccgatcaatacgggaactgctgccatattggtgaaggtaaaggatctggaggatcagccgccggagttcgtagaagtacaggcagtggcccgaattgccgaagatgctccagtgggcacaaaagttctgcgagttcgagctatagatggagatcgtgggatcaataatcccatagcctattccctggaggccaacgatctgttcgacattaatccgcacacaggcatagttcacacgctaaccaaactggatcgcgaggagcagagtgatcaggtgaatggagctcatatcctgcgtatttcggccaccgagttgtccaagtcgaatacccaaatggcgcccacaactgtacgcaccgaagttacggtcattgtaagcgatgtaaatgacgaaatacccacatttggagaaacagtctatcgttgtgaggtcaacgagaatgcccaaaccaataccccgcttaatttcatcgacgaggaggtgcaaaacgtggtcttcgaccacgatgagggcaacaatggcaccttccgcttgtttctggatccgcccaacgatctgttcgagatcgtacccgagttggctgttaatgaggccaactttatgctgcgggtgaagaactcaaagtctctcgattttgaacaattcaccgaggtcaattttacgatattcgccagggaggtcgacgagcccagtcgatggagttctgctcatgttcagatttttatacgagaccaaaacgacaacttcccagagtttagtcaaaccatttataatgcgagcgttttggaaaacagcgagcaggatacaatcatcacccatgtccaggcggttgatgtggattctggggattatggaactatgggtatacgttacaccaacctcagaggaggaatcgctcatttactcaatctcaaccccattacgggagtgataaccatcaaacaggcaggtggaactgccttcgatcgtgaaatcatttcacgacactatctcaccgtggaagccatcgacaacgctggtcagggcaacaggaatacggcccaaataatcgtagacatcctggatgtgaacgataacgcacccacatttcctcagcggcaatacgagaccaagttgctggagaatcaggctgagttcgaaacccctctgcaattggaggccagagatgcggatctcaatggcacggagaacagccaggtgacctacgagattgtcgagggtctgtaccgctccaacttcactatagatccccagagtggccttctgcgtccggtgcacagttttgatttcgaggaactggtagatgggagcagtcgcagaagtgatccttacacgggtggatcctttagcattcgagagatcgatctgctggttcgagcacgagactcgggcattccaatgctctccactgtggttcctgttcttatttacgtgcaggatgttaacgacaatgcgccgatatttcagcaaagcttctatgcaaagacggttcccgaggatctgccaggtgggagctcggtgctgcaggtaacggccatagatcgagatggatcagcacccaacaatgtggtggtgtatcgcatacagacgggtgccggtgataagtttatcatcaactcggaaacgggagttatatcggtggcacacggagccaatctagatccagatctcacagagagcaagagatcactctatactctgtcagtggtacgttcaaaagagattcctttttgtagaatattaaaaccctttcgtaattgtttaccacagattgctttggatggtggattgggcaattcccagttgatgaccacatgtacggtgaacattagcattcaggatgtgaataataagccgcctgtgctaaaggaaatgccagcattgcagatcttagagaacacgcctgtgggcacactggtgtatcgcattcaggcaactgacctggaccacaaggccattctgcggtacaaactgaacccagaacactgcgaaggtcgaactgaagagggggcgctggtgaagagtagcgaatacgacttcttgggcgccttcgaggtggactccatcgagggaaccctcaaggtggttaagctgttggatcgcgaaagagtcgagcatattaagctagccattactgtggaggatctggctgcggccaagggcagacaaatcgctgagggtttcctgagcattcaagtgctggatgaaaatgataataacccaaagtttcgacttcccttttaccgtcaatcaattacggagaacagcataaacggggcaatgattgtgaatgtgctggcctcagatgtggacaagaatcgcaccataacctatgccctggaaggaaatcccacgtaccgatcactaatgcatctggatccgcaaacaggggaaattgtggtggccagcaagattgaccatgagcagcatcagtggctaaatttcagtgtgagggccacggattctggaattccagcaagatcctcactggtggatgtgtatataacagtgctggatgagaatgataacaatccctactttgtgggtggcagcaagaactatacgattagtgaaaatgcagctccaggcaccagagttgccactctccaggctggagatgcggattcgggagattttggcaagatcaccttcctgatggatcgcatcagttcgcagggaaagtttaccatagatgcagacactggggtgctaacggtggccgatcgtttggacagggagtctaaggattcctacaacctggttatcgaggcctgggataactatcaattcggattcctggccggagaaagtcgcaatgccttcaaacaggttttctctttcagcatttccatactcgatgagaacgataatccaccagaggttgacttgcccatgagttgtgttttaatcactgagtatcacgagttgcatgaacgagtggcaagcatagtgggcaaggatgcagatgaccccactacgccaaatggtagactcgattttgccatcactcggggtaacaaagatggtatgtttgagctgcgccagatagacgcttggaatgcccaaatcttcgctagcaaaagtttgcgcaatagatacggaaactatagccttactataactacgcgagatatgggccttccagccaatattgtgcacaacaccttggatatttgcgtatcggatttcaatgatcacgctccggtttttgtgaggccacttcataacaccactgttcgcattccggagaatgcgactgtgggaacgctgatactacaggcatatgccagtgatggggatatggggcagaatgctttggtgagatacagactcaaacccgatccattgggcagctacaaaatgtttgaagtagacggcagcacaggggagctctttctgaaggaacaacttaaccgcgaaaagcagaagattcacgagatacgtatagaagcctatgatcagggattgccaacctcactgagttcagacttggatctaacgatttatgttcggaatgttaacgattatgagcctcagtttatggttaacgaaatatccgtaaacttcacggagcactcggatccaggatccgaaagaataaagctaccggacaccatagataaggatcagttggaactggacgatccgaatgatacgcccagccaggtgtgctactttatagtgaatggaaacgaagcgggatactttcgtctcgatcccgaaacccatatattgactgttgaccgtgaactggatcgcgaggtgattgccaattttacgctctatgttcgtgccactgagaattgtagaaatgattctatatctggtggcgaaaaacgtcgtcgtatgggaatcgagattaacaatagattgggaggcattgtgcataaccaacagtttggatatgatcgtttcaaacactctcgacaattgagatcgacagagagtaatgaatacggaccagaagatgcagagctgttatcgtatgaagcctatgacagtagtcaggaggatccaaccggaggattggcaacaacccatccagaactagatagcactgtaataaaagtaaaggtgcgcgtgctggacatcaacgataatccaccgagattccgttctaaaatctttactggtggtataacgaccaatgctgatttcggtttaaaattcatgcgagtggaggctacggatgcagatgaaggagataatggaaggattggatactaccaagtgggtgaaatccgacagactctttccgagggattggagaacgtacgcaaagctcccttccttctcgatcaggaaaccggagaagtgcagctaaactttgacccacaaaagggaatgaagggctatttcgatttcgtcgttttggccaacgacacctcaggaatgaaggatgtggcccatgtgtttatctacttgttaagagaggaccaaaaggtgcgattcgtgtttagacttcagccggacgaactgcgatctcgagtggactccttcagagacaccctgagcaacataacagaatcgattgtaaacattgatgagattaaggttcatgagaacaaggatggttcggtggacaagacaaagacggatctgtacatgcatctagtcgagcgggaggataactcaatctacgaggtatccgaggtgctcaaactgattgactcgcacatcgaaagcctgaatgggctatttaaagagctcaacgtgctggacacgcaggcggcagaggctcagctcctgaccgcgggacccagccgaggtcctttattcgtgtggctgattttcaccaacctctttctggccactctactggtagtcactatagcactttgcgcctctcaacggaatggataccgcaggcagctgagagccgctaaagtcaatatattccgtggtcactcctcgatgtccctgcaagacgctcaggagccggccactcgagtgccaaataccaacaagcacagtgtccaaggatcaaatcctatttggctaaagggttacgacaacgagtggttcaaatcagaagaaagtggcagtattggtggccatgactctttggatgataactttctggccgtggccacacaggatatgcacgaaacgctcaagggaactgccaaactattcaacaacagcaatgatcttaatcggcactttaatctatacaaccaaatcgacaaaatgaccaacaatgctcagatcctggcccgaaaactggagaccacggagttatag

SEQ ID NO: 6354 - protein, 2005 aa, DROSOPHILA
MHNESQPPANGNGIDSMDYKKVRLKGQRRRSFSSYISSISIQVIILTTLISLVASNRPPRFAIDGQSEIVLRLKESPETKVGTLIYTLKGYDPDNDPLTFGKRNSHDSEIIRIENTGGNEAKIFLAKELDRELQDEYAIVLTLTDSHYSDHNYVTQSFLLLVEDINDNVPTFLPYQNAIEIPEGSAPGVVSTLEATDADEGAYGQVVYYLQELDGDNDVFSIATHQGKGILRLQKELDYERKSLYQLRVLAIDRANQGPINTGTAAILVKVKDLEDQPPEFVEVQAVARIAEDAPVGTKVLRVRAIDGDRGINNPIAYSLEANDLFDINPHTGIVHTLTKLDREEQSDQVNGAHILRISATELSKSNTQMAPTTVRTEVTVIVSDVNDEIPTFGETVYRCEVNENAQTNTPLNFIDEEVQNVVFDHDEGNNGTFRLFLDPPNDLFEIVPELAVNEANFMLRVKNSKSLDFEQFTEVNFTIFAREVDEPSRWSSAHVQIFIRDQNDNFPEFSQTIYNASVLENSEQDTIITHVQAVDVDSGDYGTMGIRYTNLRGGIAHLLNLNPITGVITIKQAGGTAFDREIISRHYLTVEAIDNAGQGNRNTAQIIVDILDVNDNAPTFPQRQYETKLLENQAEFETPLQLEARDADLNGTENSQVTYEIVEGLYRSNFTIDPQSGLLRPVHSFDFEELVDGSSRRSDPYTGGSFSIREIDLLVRARDSGIPMLSTVVPVLIYVQDVNDNAPIFQQSFYAKTVPEDLPGGSSVLQVTAIDRDGSAPNNVVVYRIQTGAGDKFIINSETGVISVAHGANLDPDLTESKRSLYTLSVVRSKEIPFCRILKPFRNCLPQIALDGGLGNSQLMTTCTVNISIQDVNNKPPVLKEMPALQILENTPVGTLVYRIQATDLDHKAILRYKLNPEHCEGRTEEGALVKSSEYDFLGAFEVDSIEGTLKVVKLLDRERVEHIKLAITVEDLAAAKGRQIAEGFLSIQVLDENDNNPKFRLPFYRQSITENSINGAMIVNVLASDVDKNRTITYALEGNPTYRSLMHLDPQTGEIVVASKIDHEQHQWLNFSVRATDSGIPARSSLVDVYITVLDENDNNPYFVGGSKNYTISENAAPGTRVATLQAGDADSGDFGKITFLMDRISSQGKFTIDADTGVLTVADRLDRESKDSYNLVIEAWDNYQFGFLAGESRNAFKQVFSFSISILDENDNPPEVDLPMSCVLITEYHELHERVASIVGKDADDPTTPNGRLDFAITRGNKDGMFELRQIDAWNAQIFASKSLRNRYGNYSLTITTRDMGLPANIVHNTLDICVSDFNDHAPVFVRPLHNTTVRIPENATVGTLILQAYASDGDMGQNALVRYRLKPDPLGSYKMFEVDGSTGELFLKEQLNREKQKIHEIRIEAYDQGLPTSLSSDLDLTIYVRNVNDYEPQFMVNEISVNFTEHSDPGSERIKLPDTIDKDQLELDDPNDTPSQVCYFIVNGNEAGYFRLDPETHILTVDRELDREVIANFTLYVRATENCRNDSISGGEKRRRMGIEINNRLGGIVHNQQFGYDRFKHSRQLRSTESNEYGPEDAELLSYEAYDSSQEDPTGGLATTHPELDSTVIKVKVRVLDINDNPPRFRSKIFTGGITTNADFGLKFMRVEATDADEGDNGRIGYYQVGEIRQTLSEGLENVRKAPFLLDQETGEVQLNFDPQKGMKGYFDFVVLANDTSGMKDVAHVFIYLLREDQKVRFVFRLQPDELRSRVDSFRDTLSNITESIVNIDEIKVHENKDGSVDKTKTDLYMHLVEREDNSIYEVSEVLKLIDSHIESLNGLFKELNVLDTQAAEAQLLTAGPSRGPLFVWLIFTNLFLATLLVVTIALCASQRNGYRRQLRAAKVNIFRGHSSMSLQDAQEPATRVPNTNKHSVQGSNPIWLKGYDNEWFKSEESGSIGGHDSLDDNFLAVATQDMHETLKGTAKLFNNSNDLNRHFNLYNQIDKMTNNAQILARKLETTEL

SEQ ID NO: 6355 - DNA, 3421 bp, DROSOPHILA
ttggccagtggattttttggatttctgatgactccactgttgagaatctcaaacttgaatgctacatgtccgcttcaggtgagatcgaatgggttgatgattgatttttgtcattgatggtataacctttagcaaaatataactttcaacggcttttctgttgatgaaaacacaataaaggagattccaattccaaacggtgtttacatgttccacttgcgatcgtccctgatgaaaaaatggcggacagacgtgaaagtctatgctacgcgagttaataattattcggaataactgataaattggtttacatacttaatagctcaatctaataaaggtctacagtatttcttacattggaactacatcttaaatgtattcaatatttgacacaacattggtatacgtatacgtactgtataacacttacattgaaattacatttcatgcaatatacattcgacacagcactttcaggcacatcattagaaaagacgccactttgagaagttgaagttgagaagaagaagtatcgtaaaaaattaaatattttccgcaatgggattgtattttaactaattaaaagttttttcttattttttttccatacattaattacatttaaaacttttgcttagttaaccactcataaatttcataatgtataattacatgtcaaatctctagtggttagcgatagagtgaccgtttagtttccgtggtaggattatgtgtatttctatcaaacactttggtcacactaccttcacccctctttctttttctaaacgtgagcaaaaccgtaagtacaaaatatgagctccgcaaaaactttgaaaaagtacatgataatgttcaagataaagaacaaattcgcctacttaggtctgaatcgattgttggtacgctgaatatttcaaagtttttgcgaaatagactgacgatggtgcagatacgcagtgatttccgaaccgaatttaacctaacttttgccttgcagtgctcggttgaattgtcggaaccatggtgaacggccgcataccctcggtcttctcgaagacctacgtgactccccgtcgcccctatgagaaggcgcgtctggaccaggagttgaagatcatcggcgagtatggtctgcgcaacaagcgcgaagtgtggcgcgtcaagtacgccctggctaagatccgtaaggccgctcgtgagctgctgaccctcgacgagaaggacgagaagcgtctgttccagggtaagtaccaggcacacacatatattcagtcgaacttcctcaaacagcagcctactagttcccgacttttagagccacttctaaactttgttaattgctttgattaatcgtaattaattagtcgtaacaacccacgtgtaaagctgttgaccggatttattccattgtatattgcaaaattgcatgtttaaatgtctagacagtatgtatatgcgaaggaagttcgactgcataatccaattagttgccctgacctgatgaactgtattaaaaaatatattctgacacttcttgtctgataaaatacgttgacgttaacaaatacacactgaagagaattcttcgctagaactagcgattgcattttgaaacttccattgattgtgtacccattttacccacaggtaatgccctgctgcgccgtctggtccgtatcggtgtcctggacgagtcccgcatgaagctcgattacgtgctgggtctgaagattgaggacttcttggagcgtcgtctgcagacgcaggtgttcaagctgggacttgccaagtccatccatcatgctcgcgtcctgatccgtcagcgtcacattcggtaaatatcgcttggacaggcgacaacatcgtcgccaggctctctcagatataaactctgttctgttcagtaagaccacttgggagtcgaacaggcgccaatgcttgtaccgactctcaacgtctgtagattgcgcatgtgactccgttcacaccaatcgaaaatgcaaaatgcccgcctagcgtaagttgcactgaacgttttttgttgaacccaacatacatagcagccaccattccgatggttatcataaagcagagcttaactaatccaaatatggtgttcttcttccgtttgttttcacagtgtccgcaagcaggtggtcaacatcccgtcgttcgtcgtgcgcctggactcccagaagcacatcgacttctccctgaagtcgcccttcggcggcggccgtcccggtcgcgtcaagaggaagaacctgaagaagaaccagggcggtggcggtggagctgctgaagaggaggaggactaagcagtggtagccagctgtagccaagacaaatacatggcgcagacttgataaaaatccgtttgctttacacaaataaatgtaaaaatacacgaagttgaatgtgtttcaatgcgcatgtttgtttatagaatgggttaagccgaagatgatatcgaaatatatgcaaataagacattgaagttttaaacaaaaacaaaaaaagttatatggttaatgtaaagattattttcttttttaatattgctgaaataaaaaaaagcagtatttatcgatacccggtcagagctgcaattccagataaggctccagtgtgcccagagaagtaatctaacgaaatgctgccgttatcaacttagtactcgttatttcccgagctttcgtgtgcttcgccagcaaaattgccattctcacaaaacgaacgtttgaaaatcacttgagattcgggtaaacacaaactccaagtgacgaggaagaacagcagccggaataaatcgcgtataaatagtgtgataagcaagtgtcgccgaaatgccgaaacccggtgacaaggcgaaggtgaaggtgaacgtcaaggagcgggtggtggacgaaacctgcgacttgagtctctccgaactgagcgaaataccggtgcgggagatcgtaagtacaagctgaaatacaagtaattagcatcagctcccatcacccctctcgcttcctcttgggtccacgtttgttgtctggcgaatgtctagtcactgtctgtctcacttgcacaagtgccgtgtggtggggggtgcggtttggcatggataaagagagatccgcatactcttgttgtagttgttgttgttgttgctttgccggctggcttgcaattaacgctgacgtcgacttccacacaccccttaacccttgtgtgccggcgaatgcagttgaattcgctcgagggggttgatttttggtctttgccacccctcaaaaactcagatggttgccaaaaaagaaaaacaagtatggtagcttaagtgtagagtgtcgcgaccaccagataccgagtactaattattaaaaaagaatataaaaaataatagatatatatttgatgttttttcctt

SEQ ID NO: 6356 - DNA, 711 bp, DROSOPHILA
tgctcggttgaattgtcggaaccatggtgaacggccgcataccctcggtcttctcgaagacctacgtgactccccgtcgcccctatgagaaggcgcgtctggaccaggagttgaagatcatcggcgagtatggtctgcgcaacaagcgcgaagtgtggcgcgtcaagtacgccctggctaagatccgtaaggccgctcgtgagctgctgaccctcgacgagaaggacgagaagcgtctgttccagggtaatgccctgctgcgccgtctggtccgtatcggtgtcctggacgagtcccgcatgaagctcgattacgtgctgggtctgaagattgaggacttcttggagcgtcgtctgcagacgcaggtgttcaagctgggacttgccaagtccatccatcatgctcgcgtcctgatccgtcagcgtcacattcgtgtccgcaagcaggtggtcaacatcccgtcgttcgtcgtgcgcctggactcccagaagcacatcgacttctccctgaagtcgcccttcggcggcggccgtcccggtcgcgtcaagaggaagaacctgaagaagaaccagggcggtggcggtggagctgctgaagaggaggaggactaagcagtggtagccagctgtagccaagacaaatacatggcgcagacttgataaaaatccgtttgctttacacaaataaatgtaaaaatacacgaagttgaat

SEQ ID NO: 6357 - protein, 195 aa, DROSOPHILA
MVNGRIPSVFSKTYVTPRRPYEKARLDQELKIIGEYGLRNKREVWRVKYALAKIRKAARELLTLDEKDEKRLFQGNALLRRLVRIGVLDESRMKLDYVLGLKIEDFLERRLQTQVFKLGLAKSIHHARVLIRQRHIRVRKQVVNIPSFVVRLDSQKHIDFSLKSPFGGGRPGRVKRKNLKKNQGGGGGAAEEEED

SEQ ID NO: 6358 - DNA, 8354 bp, DROSOPHILA
aatcgattcgtgctcattcaccaggcggctgaaaataagtggcactcgccagcaattactagcagcgcccaccgctacctttattaactttaaaactgcatccattggcaaggcgacccgggcggtgagaacataaatcatggatgaaagtgaaaattggttgcacctaccacgagcacgggttcccaggttcccaggtgggcgtcgaaaggtgccgcgtccgccgacccacgaccccgcccatttgcggcgtaattacgaaacaatacacgcgtcggaagagaaaccagcaggaggccagccaggaatgaagaggcagaggagccgccaggcgtccggaacatggagctcggagccatgagtcagagggccgcagtagcatagccccaatccccagagcttcgcgaaggtgttatctgcggggcccccaagtaagcactttaaaaaatgtatggtcacatatgtatacccccaaaaggatggaaccccaaatttaaccagaaaatagtttaagcaccattttgataggatctaccagcaaaatcctctcagtgcatcgccacctgtacgctgtgtagttttcctgttttgactgctgtgtttttgcaatttaaccgcaataaataatggagcagcttgttaaatttgagcgcccgcccaccaggaggcgctgcaaaaatgtaggttagacagcccaggataacgatagtgatgttggtggttatgatggcaatgatgacggggatgatgatggcgatgttatcagtggccatttcactggctgaccgaaacgagactcgtttggtgtggaaatgcgatttttacatatgtgatatagattttaattgcggggcattaaaatgcaagtggcggccaaaaatgcgcttaaaataattacatttattgccgcatcgccgatttggcagccgactaagcgaaaagcaaccgcaaatgtcgacacagcaacgccaagtatcaagtatttcatccatcggccgtgtatcactaaataattttgcatttattttatataatacagtacacattgcattaaactaaataaaatctatttaatatatatatatatatttaatatgtactcgtacacaatcaaccctatatacgccgcacctcctaatcatccgatttgtcttagtccgcacttttgtgtagcgtagttaatatacgaatcgcctttagttttgttaacaattattgctatttgaattcattattggtttaagtgtattctcgtgtttgtcgtttaaaatcctaacgtattttgtttgtttgtttgcggtgtttcaagttctcacttctcacgatgtctgcgtcgttagtgtggatatacatatttaaaatatagtttctatttaaagttctgtgtatgctcgataaacaattgaacagctaaaacagtttgccagtacaccaaactcagctcgtcaacaattcgaattcggtcgagtaaactatttacagtggagcgtatcaatataaattcaccaattgtggttaaaaacatgcaagccggggctcgttgtacaattgaactagaagcaatcagagtgcaatcttatggcgaaaacgtaacatttagttgcgattgctagacagtttgatgtgatccaaacggatggatgccctaagcaagcccaagttcaaatttgaatatattctgggaatggcggtgcttaagttcttaaaggcttagctgaagctaaacggtaggtggttttatttatcggcgtaaaacaaggatccaaagaaatgtatgacaattacatttgaagatagatggtcgtaagaaatatcaacagaagcgaatcaatcaaactttgtcttaaatttacacaggagagttatgcagtggataaattatgcctaacaaattataaatatctctaaaataggctctcaatacattcatacatagattgttctcaagtttcgtgcacttttaacaaatatctcgtgtgatatcggttgcgaacataggaatagacagacagaagtgtgtgtttcgtgtttacagtatacagtagtaatacatacgtatgtaataataataataacagtaactatttaacgcaacgtggtcgtcaaatggaaagggggaggggacggtaaagcaggcgcttaactggaattaaacattaatcaacaaaccgaccacaaatcgactgccactcattcctggcagaagccctcagtctcctcgatggcaaaggtcagcttctccaccagctgatcgtagctcttgtacggcggcaggtccaatcgattgaagcaggtgtgcgagcgcggcagccacgtctccttgcccaccttctcgatgcagaagcgctgcggcccgttggagcccatcagctcggcgaatcctccgaccggcacgcgacacgtgcccgtcacaaactgcagcaggcgagctcgcttctcgttatccgtctcgcgaacaaactgtggagccaattatccggattagcgaatggaaagggcacaaagaacacaaaggaacccacctgccagaaccagacaacttgcttggagttgcggttgtagtgcctgtagatggtgttgcgctgccagtcctccacgtccacgtcctgcatgccgcacagaataagctccagctcgcgctcgtcaaagtacttgagccattccaggggcaccacctcattgaagccttccaggaacgtctttgtctgctgctcaatgccactgcaataggaatcagttaataccgagtcaaaaatgacacccatattgacaacatattgtcgtttatcaagtaaaatgcataccgtgtcatccgccactccgtcatgagggtgatgtactcctccttgttctcctccgtgacgcgctccttttccccgttctccttcaactcatgatggattatctgaccgagcacttcgaagtccacgctaaaccagagctccaatccacactcatcgatgttgttatcttttacccagataagtgagttgtagaactccggatcgatcgtttcgatgtccttgatggtcaacttcttgttcagcatgcgcttgtaaaatggcattgtgaatccactgtagataaaccttccatgatacagggccatcgcaataaagcgaccgatgaacttgaagtactgcaggtgatcggggttcacgtacgaggcgggatttatctgcaggctgtagttgttcttgttcgcgtactcaaacaagcagtacatgggattcagaacctcgtgggagagcaagaagaaccactcgcgagatacaccaccataatccagtccctcctcgccgcggaatatgatatagagccgccttcgcagttcgtaggctggcagacgcatgatctggtggtatgaatcctcgaacagggtttgtcgcgtcaccgtgatcttgatgtgcgatggcaaagcgttgctctggcacaagtaccggaactgcgacagcttccagcggaagctgcgttcgtaggcgcgtggcactccgtacactcccttggcgcccttcggagcaccgggtcgaggatcttcgaaggtggttcgtctcgtgttgtgatctacgaagaagcgctcaccggcggctgtatagcggatttcccagccgggtggaagcgggccctcgttgatcaagctcacctcctggccctgcgtgcgtggatcctcccactgggtggttcggttcttgtggttaacaaagtacactctgttgtccgattggatctgcgtaaggattaagtaaataaaggaacgagttaaaataaatactttttctaatctagacaaacggctttaccttcttctcccagccatctggtagtggacccagtgcatcctcgtcgtcctgcgtcacctgggctgtcaccgccgttggttgctgctgctgctgggagtacaggtatcgctggttgccttgagacacgacgtgggcccgctgaccctgccagtgctggaagtgcatcagacgctcactgttcggccgctgccaggtagtttttcttgtgttgtggtctacgtagtaaactcgaccgcgcccatccttcctgatctcccagcccgggggcagcggtgtcggtttctcccagtatgtggatcgtgtattgtgatctacgtagtatctgcgaccgtactggtccagacggatttcccaccctgcaggcagcggctcatcatccgctggttgtgtctgcagttgcggatctgtgctttggctcacgggcagtccaactcctggctgttcaattggtgggcctgctactccaggtggtcctactgctgctcctcctccagctggcaaataaacagcagctggttgtgtattctctggcagcgctccgtacacttgggttagaggacgagctagtgcgggagctggtggctgctgaggatacggagctgtctgcggcacggccgccccactgccattgaccattctcaggggctgctgttgattctgggattgctgctgttgctgttcccacaccgggggcgcctgcgtagatctcctgtgatctccacctccattcggcagaggagagcgggtctctccgccgttgctatttccactgctcgagcgtagtcgcatccgtgcccgtactccaccgtaaatcatgcaacttcgtccggcggccgcatcactgaccaccgacggattgaccgcctggacgggtggattgccattctgttggccagccactggctgaatctgcagcttgctcatatcgagtttgaggccattgaggatggccactagttcgccgctcttcgtctggcgattgtccgacttgctggtgacgaacaggtcgatggtcagctcaaggaactcgcaccgcccattgtagtgctgcagaatgtgcgccaggttgatgatccgctctccaagcatggcatctttacggaaactggagtgatccagcactttgaagtgcagcgttgaattgggtgtaatctagagacgatagatcccgtggatattacaaataattgacttttattactgtttctactcaccagcactgtgaactcctcgttccacttgggcaaatagctgttcttcaccaggtccgttttccgcttgcttttgctgtcaatcaagagctccacgtagggatttggcttgaggaagccattgttgcgcagcgaagcctcctcgactgaaaggatttggggccattattgattgaacagaatgtttcactttcttttgtttgctcacttgtcacgcttaattgatgatatccttgattggcactcccactggcccccgcccccgagctggaggtgggcgtggggctggcggatcccgctccattcactgtctgcccggcttccatgccgccggaagctgcacccgctggcagcccatttccatcggccatttagtggctgagtgtgtgagtgctcctggtgctccgcctcctcctccgccttatattcctccctttgagtgaagagaaagccagtattgagcacgctgctattgaatattggtggtggaaagtatcgaatggggggaaattgcgtgttctggactgataagataagtccggaacacggtctacatacgtaaatggtttatcaatacccaaaaatgtacaatgctgttgaacaggaagcttttatagagtggaaataactatccgaataaaagtgttgtacacacttttgctaggtttacagattaccaacaggcctttatgggaaccctgagtgatttactaagcactttttaggtgttatgcagttttccttagtcgctttaagctctcgactacttatacacctgatcttagaaggcagataatgccagctctatatcattatgaaagcgactatccgcagataagatatggcctgtatagctttgtgtattatatagtgtgtaaacgacagtatggcaacaaaactgtttgcgaataggccttcacttttttggtgaaataaactgctcgaacaaattgtgagctgtaaaatcggcgctaatgtatgtacagtgcaactcggtcatatatgaaagataaaaattatgctatttcaagcgaaattaatcatgaccaaactgggtaaacagtttattaaaaaactgagtaatgtttctgatcccaaaatatattctttgactaagtgaggctagagttctaaattattgaaagaaacttgtattactatagaaattcccccaaataaatatataaatgcactgataagtgcacttgatttcgtggactttaaactactgggaagcaccgtattatcgcctattaattttctccataatttgcgactgccacggctgtgtgcgtgtgtgtttccctgtactttttcgtacacactcagcaccgattgctggtcatccataactttgatagcaaacaccccgctacacaatagattgtataataatgttgccatgtgagtcatcggctcaacgcgaaaaagaaaacggcaagtgaattcggtttcaattgttgaatggctattgcatattgattgtgtgcaggaagcaacatggccgatatggcgatacacaagcccacaaataagttattttgttatatatcgtcagaactgaaatctcaatgctttaatgacttcttcgctttgcttatcggcatgctgataactaccatgattttctcgctgtgtaccgttcgcgatttctcttttgctagcgttttcactacattaattaaccgagaacacgtgagcaagtgcagcttgttgtttaccattagtgtctactcatcagattctgtgaccggattgaaatcgatttggaagggctttgcatggatctgaatgggacacagttctccgatcaattagcacgcactttccggctcatttcgcctatcattcgagcgcttatcagtgggccgatgaacaaagggaagctatctggtggggcagccggagcgcgagccaagcgaagtaatcagcaacagctgtcaataagcctagaatgcacttctcgctcgatggatggggaggggtggtggagggaggggaacttgaacttccttgaattatcgaccgcagggcttagtcacccacacagcgccactatgctacagtacacacatatatatgtgtagatatatatttattcgtggtcatgtaacgcacgccagaaagaaggtaactacctctcccactcccactccttctgtgggtgggcgtgtgtgtgtttgtgtgtgtgcgcttgtaattgaggcaaaggtcgcgacttccgtcccgctcgcactcgctgccgccgctctaccgctggcgaattccaatgcaagaggcgttcctttttgtttttagcaatttctgggggtttctcctcctccgttttcctttcctttctacctgtgtcttaccttctgctgcttcttcttctgcctctggtgctcctacaacttgcgcctgtgtgtgtggttgttgtctcctgtgtgcggctgcatgtgcgagtgtgtgtgcgggattcttaactgggtttcccgggccccaaaattgatggctggattattgcactagttggcgctgccgccctcgctttggtccacgtaatcgcgagcagttgatatcgctgcactaattgtttatttgttattttgcttcgcttgcaagcagcaatttctagagctgcaactttggacgatgtttttcgatacaactgatgtggccactcagtgcgcgaatcgataggttgaattcaattggcgaggcttgttatgcacgctagactgggttggcgtactcgctatattgccaacttacatgttcaaccagagttgccgtacaagctcaaaatggagtagccaaccagatttgaaaatgaccgcgaataggaattaggaataaaaataagaacgtattgcccgtagtcacaacaaaacaaaggtaaataattagccaaaaagttatgcaccagctagtacttctggcccctctgattttattggaatctaagcttattactccatataaattagaagccccctgaatattcattactcagttgcgttgctcattgaatttctttaaatgttatttaattttgtggtgctattgaataaatataaaagcgcggattcagttcatcgaataacatagtgtttggcagtaaaaagtgcttacaatgctaaaatccgcaagtgctttgctatgtggtcttcttgctttaaatttgtatggagcttgggcagaatccgatgtgatttgtcctttaaaggaccctcctagtcaatgtggaggattctgtctgggtgtacttacgcccgtgttaaatcacctgaccatttcccaaaatctggcgaattccaataattcaagcaaggctaacgaggtcctggtgagacagtacacg

SEQ ID NO: 6359 - DNA, 4307 bp, DROSOPHILA
gtagaaaggaaaggaaaacggaggaggagaaacccccagaaattgctaaaaacaaaaaggaacgcctcttgcattggaattcgccagcggtagagcggcggcagcgagtgcgagcgggacggaagtcgcgacctttgcctcaattacaagcgcacacacacaaacacacacacgcccacccacagaaggagtgggagtgggagagggaggaatataaggcggaggaggaggcggagcaccaggagcactcacacactcagccactaaatggccgatggaaatgggctgccagcgggtgcagcttccggcggcatggaagccgggcagacagtgaatggagcgggatccgccagccccacgcccacctccagctcgggggcgggggccagtgggagtgccaatcaaggatatcatcaattaagcgtgacaatcgaggaggcttcgctgcgcaacaatggcttcctcaagccaaatccctacgtggagctcttgattgacagcaaaagcaagcggaaaacggacctggtgaagaacagctatttgcccaagtggaacgaggagttcacagtgctgattacacccaattcaacgctgcacttcaaagtgctggatcactccagtttccgtaaagatgccatgcttggagagcggatcatcaacctggcgcacattctgcagcactacaatgggcggtgcgagttccttgagctgaccatcgacctgttcgtcaccagcaagtcggacaatcgccagacgaagagcggcgaactagtggccatcctcaatggcctcaaactcgatatgagcaagctgcagattcagccagtggctggccaacagaatggcaatccacccgtccaggcggtcaatccgtcggtggtcagtgatgcggccgccggacgaagttgcatgatttacggtggagtacgggcacggatgcgactacgctcgagcagtggaaatagcaacggcggagagacccgctctcctctgccgaatggaggtggagatcacaggagatctacgcaggcgcccccggtgtgggaacagcaacagcagcaatcccagaatcaacagcagcccctgagaatggtcaatggcagtggggcggccgtgccgcagacagctccgtatcctcagcagccaccagctcccgcactagctcgtcctctaacccaagtgtacggagcgctgccagagaatacacaaccagctgctgtttatttgccagctggaggaggagcagcagtaggaccacctggagtagcaggcccaccaattgaacagccaggagttggactgcccgtgagccaaagcacagatccgcaactgcagacacaaccagcggatgatgagccgctgcctgcagggtgggaaatccgtctggaccagtacggtcgcagatactacgtagatcacaatacacgatccacatactgggagaaaccgacaccgctgcccccgggctgggagatcaggaaggatgggcgcggtcgagtttactacgtagaccacaacacaagaaaaactacctggcagcggccgaacagtgagcgtctgatgcacttccagcactggcagggtcagcgggcccacgtcgtgtctcaaggcaaccagcgatacctgtactcccagcagcagcagcaaccaacggcggtgacagcccaggtgacgcaggacgacgaggatgcactgggtccactaccagatggctgggagaagaagatccaatcggacaacagagtgtactttgttaaccacaagaaccgaaccacccagtgggaggatccacgcacgcagggccaggaggtgagcttgatcaacgagggcccgcttccacccggctgggaaatccgctatacagccgccggtgagcgcttcttcgtagatcacaacacgagacgaaccaccttcgaagatcctcgacccggtgctccgaagggcgccaagggagtgtacggagtgccacgcgcctacgaacgcagcttccgctggaagctgtcgcagttccggtacttgtgccagagcaacgctttgccatcgcacatcaagatcacggtgacgcgacaaaccctgttcgaggattcataccaccagatcatgcgtctgccagcctacgaactgcgaaggcggctctatatcatattccgcggcgaggagggactggattatggtggtgtatctcgcgagtggttcttcttgctctcccacgaggttctgaatcccatgtactgcttgtttgagtacgcgaacaagaacaactacagcctgcagataaatcccgcctcgtacgtgaaccccgatcacctgcagtacttcaagttcatcggtcgctttattgcgatggccctgtatcatggaaggtttatctacagtggattcacaatgccattttacaagcgcatgctgaacaagaagttgaccatcaaggacatcgaaacgatcgatccggagttctacaactcacttatctgggtaaaagataacaacatcgatgagtgtggattggagctctggtttagcgtggacttcgaagtgctcggtcagataatccatcatgagttgaaggagaacggggaaaaggagcgcgtcacggaggagaacaaggaggagtacatcaccctcatgacggagtggcggatgacacgtggcattgagcagcagacaaagacgttcctggaaggcttcaatgaggtggtgcccctggaatggctcaagtactttgacgagcgcgagctggagcttattctgtgcggcatgcaggacgtggacgtggaggactggcagcgcaacaccatctacaggcactacaaccgcaactccaagcaagttgtctggttctggcagtttgttcgcgagacggataacgagaagcgagctcgcctgctgcagtttgtgacgggcacgtgtcgcgtgccggtcggaggattcgccgagctgatgggctccaacgggccgcagcgcttctgcatcgagaaggtgggcaaggagacgtggctgccgcgctcgcacacctgcttcaatcgattggacctgccgccgtacaagagctacgatcagctggtggagaagctgacctttgccatcgaggagactgagggcttctgccaggaatgagtggcagtcgatttgtggtcggtttgttgattaatgtttaattccagttaagcgcctgctttaccgtcccctccccctttccatttgacgaccacgttgcgttaaatagttactgttattattattattacatacgtatgtattactactgtatactgtaaacacgaaacacacacttctgtctgtctattcctatgttcgcaaccgatatcacacgagatatttgttaaaagtgcacgaaacttgagaacaatctatgtatgaatgtattgagagcctattttagagatatttataatttgttaggcataatttatccactgcataactctcctgtgtaaatttaagacaaagtttgattgattcgcttctgttgatatttcttacgaccatctatcttcaaatgtaattgtcatacatttctttggatccttgttttacgccgataaataaaaccacctaccgtttagcttcagctaagcctttaagaacttaagcaccgccattcccagaatatattcaaatttgaacttgggcttgcttagggcatccatccgtttggatcacatcaaactgtctagcaatcgcaactaaatgttacgttttcgccataagattgcactctgattgcttctagttcaattgtacaacgagccccggcttgcatgtttttaaccacaattggtgaatttatattgatacgctccactgtaaatagtttactcgaccgaattcgaattgttgacgagctgagtttggtgtactggcaaactgttttagctgttcaattgtttatcgagcatacacagaactttaaatagaaactatattttaaatatgtatatccacactaacgacgcagacatcgtgagaagtgagaacttgaaacaccgcaaacaaacaaacaaaatacgttaggattttaaacgacaaacacgagaatacacttaaaccaataatgaattcaaatagcaataattgttaacaaaactaaaggcgattcgtatattaactacgctacacaaaagtgcggactaagacaaatcggatgattaggaggtgcggcgtatatagggttgattgtgtacgagtacatattaaatatatatatatatattaaatagattttatttagtttaatgcaatgtgtactgtattatataaaataaatgcaaaattatttagtgata

SEQ ID NO: 6360 - protein, 949 aa, DROSOPHILA; identical to SEQ ID NO: 5685

SEQ ID NO: 6361 - DNA, 9129 bp, DROSOPHILA
taacatgctgccctctttccactaacagttttacataatccggagtatgtgttcatatttttgttaacacttttgttaaagtaaaacgttatgtacatacattagttaacgcggaagcggcgtgatcgtgatccagatcaagtatagcattggaacttaacttacaaatagcaatacacatagtaaaatatccattgatcacaatcaacgaacggcatacatacatataattatattgttgaaattgcctgggaatttgctattttctacatacatcggtatatctaaaacctatagttagcatagatcaatcaatcaaagaatcggttatatattgcagtacaatggatccattttcaattcatcttcgctcgaaagatgtgcaacttccagttgcagacactgctgcgtgtccttctttacacaattaacttttcaattaaaatatttgtatttcggttaacttagattacaattgccaataagatactaggcttagatttactttacaattaacacaaacattaggcaaaaggcgtgtaaaataggttacaaatgtgcaaaacggcaacgcgctctgccaatttcaatgatgcaactctaactaacatttatgctaaagactgattcttctggccgcgctgaagattcctgctgcgattcttgaggcggcagctgcctaaacgcgatacttgtgtatttgagctaaagaaacacttaaaataacgcccaatcgatcgatccactgatccgaagggcgattcaaagactgaccctcgattagtattacagcgcctacataaacttatatataattttactttttctgtccttccgtttttgcatctttcatttttgtttcattcgtacacgacaaacctaacagccagttttgcgaaatatctgcataaatggtatactcctgcatttattgtttgtttgcttttataacttcatttaattcatattatgtggttgtgtttcgtgtgtgtgtgtgtgtgtggatgtagtgtgtaaaatagacgcttagagatcgctgtatcttgggttcaacatcgttttttgtttaaacaagtctgctgtgtgtatgtatatgctgctggttaacgaccattcactcattattcatcataatcattaatattctcaacatctatatcgaaatccaggtcatccgattcgggatccgaaccggaaccggtgacggatcccgaaccaccagcatcccggtgcctaacatatccccccataaacgcgccagcatcgtttctagaatcctcctcctcaaaatcatcctcgtcgtcctcgtccgcatcgtcgtcctcctctccttcgctcgaggattgtagatgtaactcgcgcagctgccgttgcacaaaatgttaatgttccatcaaggccgctatagcaacaagcacaatggaaattgagaaaacaaaacgaaatcgttatgcataattcaagagatcaatggggtgaaagttggcttctcttacgtgacggtgtgcgtccggtcttgttctcattgggtgtgaaatttagaaagtcccaaatcaaaattgtatcatcatgcgagctgctaacaatctggaactcatcgaattgcaaacgaaatacgcgaccagtatgttcctaaaagggttcaccatcgagattagacaaatgctactacggactggccgaatgactcaccacaagggtattcagacagagagtattggaggctgctcttggatccagggcggcgaccaaatcccaaaccttgatcttgccatcgtaggcaccgctaacgattcgtttcgtatcgaaacgaatgcagcgaaccaattcctcatggccctccaggacacgtaaacaggcaccgcactcaatgtcccacagtctgaaaaaaagaaaataaaattcaaatttgttatattagattgttgtagacaaagtaaaagaaaagaaaatgatctctttatgcagtttaaaatgataggaaaacttaatataatatttatgatatataaatatatacaaaaacgaacagttcattaatattcagatactaacaaaatgtaaggaaatacgcgttaattaaagctactatctgtgatacggcagacggagttaattcccactactaatcgcaacattcacgcagaaattatctacacccatcattaatcacatcagcgccggaaagtcggttggttaagttcacacgcctcaccttatggaattgtctgagctgccgctgaccaccaggcgatctctgtactgtaggcaggcgatgccacgcttgtggccattcaaggtgcgcacgaattcacagctagatgtggaccagaccttgatggtgcgatccccgctggcggacacgatgtacttctcatcaaagtccaccacattgacggcggcacggtgaccgacaaggacgcgccgcagcgtaatctcgctgggtgaggtcatgtcccagacggcgatggagcgatccttggagcaggtaaccatcatgccattgttaaagcgcaagtgcagcaccgcctcgcagtggtggataagggtgttgaccatctcgccggtattgacgtcccacacgcggacggtggagtcgctggagccactgatgatcaccttgtcgtcatactgcaggcacagcaccgatccagtgtggcccattagggtctgcaattcggcgggcagtgtgttagtaatcagaatcttatggattgattatgtcgaatgctaccttaacgcactgcaaatccgtgcgatcccagatcttgatggtgttgtccctcagtccggagacaatcttgccgtcatcgtactgcagacaatagacacccttcgagttctcggaccggcagttgatgcggcgcagcatgtggcggccagtccgccagttgttctctatgctgtcaatgtcctaaaacgcatagaatatgtgggtttaataaaccgattgcataattcggcacacttcgaggacaactcacattcattatcttggggaacaactcgcgatggaatgagtgtggccgttgagtctggcccggtcttggcttgaagaggtactgcatccaattacgccgctcggccagtccgcgccacaaggaatctgtgcgcaccttgcgttcgatgagcttcttccagagcatgccctcggaaatgacgcgcagccattccttgcagaccagctcggatgatttgagcgattcggcatccaagtacgacaaaatgttttctgcgatgtgatccagacccttgactgcaaataattaatcataaaatgttataataatgcacaagtaattgtaattatcaagcaaggcacagattccatgtaatctaattatcttggaaaagcccatctctgtggacaaagtttctgactaaggcagctatttatatttggcccccagctacacataaccgattttccatcagatatgaggtggagcttttgtggctgctaccgctcttggcagacacccactcaacccaatcaaatgcaatgcaatgcaagcacatcagccagctttaattgagcgccaaactagaggcaaaatgatgcacctaacggcattaaaatgcacttagcccagtaggcgggagtgggtgtggaagggagtgtgtgggagtggctgtggagtaggcgcaacctatagactggcatatttacatgtgtcacggttaggagtggttgagtttcactcgaaggatgaggcgggggtatggccataaccacatccacatcttcatctttgtattgacaaaccggctgatgggccaacagagaagtcagagtctggagtgcatgcgagcacactcgcattcagtgccttccctgcttgctgttcgcagcatttgcccaacacaattaaaaatgtgcataactcggaatggcaggctgtttggcgggcggcagcgatttggctcaacttgtttgccgtcgccggcgactaacggtcttaagagtgtctatccgtctgcgagcaagtccgtccgtccgtccgtccgctctgtccacccgactgtcccccccaccaccttttagctgcctttgaagtgcattacaatgtaaatggaggggacaatgttacctacttgcaactctttttcattctagaacactcagtgatgccaactaagcggaagttatacaaacgtatgtgctagcattcgattttcttttgagtaaatatttaaaactatgctcctaagggataaattagtcaattaattggtgaataactaatcagatgcttggtaagcaaagtaaattaatagctcaatttaaacttgacagtttataacattttaatcaggctcttcattctaatttctgataagcatatcataatggcttgctatgtttatagtgactgcatgaactttgtacttttaaagcaatatatgaattagttatatctggaaaaaaaaagccaagtggtcatagtgtactgtcattacataacaagaaagcaagaacaaggagtgcatcgccggggattaagtcaacggaagcatgagacgacttcctcaaaagaacttattccagactggtggctcaaggaaggaaaggcttgcaaattaaagagacttttttcgctatttcagaacaggtatgcatgcatgcatgcatttcagcgaatatctgagcaaacgaaccgaaagtaaatatacgttttctgtataaatgcccttgcaaaggctagaattgcacgcacagctcttgttgattgtttgagtcatcgatacgctcacgtattgatgcattgataagcgaactgatcgcttattcacatactcatactcatagttaacctgtttgcccatacccaacccaatcatatccattgcacccgtagcacactccatagttttgttattagttaacatctgttggacgacaacaatcgatgccacgaataaatcgattcacattttcttatgaataatatacaaggttcgttcccgctttcgttctgtttgtgttccggtaaagcgcgtttaatggaagcaacgaccttttagtcaacagccaacaaccagcaacctaaagcccacccactggcttcacctcctcctactcctctgggctcctctccactccaacagttggaaacatgcccggcaacaatccggaggagcaagggtgtctgtcgggggacgcggaacgaatcgcaccgggttcagagcgcggcttgcctttcatgttgttcaactttgtacctgcagtttgttattgtttcgccaattgcgtgtgtcgagggcttaaactcagctttgtgctgctagactcgcctgagattctaatggtggatgagccatttctgagccttcattttaggaggaaaacggtcaaactccgatggtggaattcgcaccctaacagctgttattgccttcttatcggctgcgtgaattggtttctctattggtcaactgggattactgaccttcccatacaaagcatgctgttgataacaactgggttataaatcacgttcttggaatgacttagcatgactaatttatccgttcaatatttataatatttaggaatagatctaacagcttcaaaaatgcagattaatatatgatataccacttcatcatttcctcacttgtagaataaccactattgaatccacagctaaaactgcatttttaacgttcatattttcatagtcgttggctaacatgttacagtttacagtcttggcctaatactttgttgtgaacgtaatatatcaatctgtatgaacggaagttatttctccacttcgactggactcaggtggcaatagccagtgtatcggcaggcactcacttggcagcaatgtgataaagtcccgctggagcatcggcttgagataggcattgatctgtccgtgttgatagtggcacatgcgcgacagcaggtgctccacaaagtccacctggcccgactcgctccactgggtgaagtactgaaagcagagttcccgctccgtttggtaggtgggcgatgagtctttcttgcgcaccgggtcgtacagcatagtggttgtgaactgtatgggtgaaaagtggcataaagaagcaaattaattatgagattgcatttgtttcgtttttgttgttgttgttgttgttgtggggcgacgatgatgtgttatggggtgcttcgatgtcaaggggcgatcgttaaaactggaaaagtaggtagctgctggttgtgcaacttttctttagtttaggctaccgacgacccaaactgggggcttaaaattaggcaattagcttcgactacgctgagcgtttctttctattcgtaatttttctcattttttttttattcggcggcgaaagagtttgcaaagcggatttctgaagaatgaaaaacgcgactggcagcgcagcggtagaaacagatcattcacacggccagtttataaataataattgtatcgatgtttatttggtcttccatgctcattatgcgcattctatatatagacatacccattgatgggccccaattaaatcaaacgtcatcaattaaacgctaaagatctcggcaaacaattttatcggcgtgaagtaaacaaattggtcgattcgagtgtgagtgatttgagtaattaagttaactgcaatgccagcaatgcgaaaaccttgccagtatttgtagtaaatgttgtgaatatgtatgtacaaacatactaagttgtattcgggtcggttgccttaatttaattgccgtattatggtttttgtaagctttagttgtttgcctttgcctggtaactttgagctgaaggatgctacttaaactatgcactgattatgctatgagaaaggtttgtggcaataagcaatatgaatgtatatatcctctaattgatagttaataatatctcgtttgtgtttcgctgctattaccaagaagccatctgtctcattaaccagattccaccttgaatccggcgaaattaaagcccagatgactcaagcgaaaccgagcgaaaaaattgaaaataaaaaacgatttttttggcccattactcgatggttttacgcgaactgaccttcagtaagccgcctatcgtatatagctccacaattaaataagtactgattgaaatgtacacggccgtactttgtgcacagcgtttgttattaattgtgtacacaaactcgaggccaattaacgaaatcttaagactcgaaaaccggagattggggatatatacatatatatgcaacgataattgaacaaaggggatgatgatgatgatgctggcgatgaataagtaggctaatgtctaatatccacaagagtttaaggttatagcccatgggatggctatgtgccacagtgtccgaatttaatagagtgcacgagtgcaaaatctgtagtatatacgaaaataaagcactagcacacgcacaccagtgtgtgacaacacgcataggtggcgtaggtgtgcgtgcccctgtgtgtgtgtatgtgtgtgggtctattgaggcgacaccttgggcaatatgtacttaaatcggtgtgtttaatgcatttagaagggcagagatcccgcttaaagcaggtaacttagcgaaaactcacggcctgtgcattggagttggtttcgtccattattttgtcagtctccattttcatcattgtgttgtttgtgtgtttgtagagtttactggctcgtcgtttgcttctctctcactcgctcactgccagagttttccgtcgcactcgcactcacgcaccacgtagcgtttttcgctgatttttcgttaacacgtctcgcaaatcgcttttcgccagcgatttcatataatttttaggtcgaaggaaaattacaatttgctcgtctcggtttctgtaggaccgcaggcgggatgcgcgaaaacggcgaggcgaacgcgatggcaaaggcaaactcaacttgccgaggtccctcaccaattgagcgaatgtcgtatgcaagtcattattctcaccgctcctggcggcttgcacgttgtttgtttttgcttattcagatgacgccaactactggacactcacttttcacacggagaattttatttttttttaccagatctcgcccaaatacggactgcgaaaccacaaagccaaagatgagtgtgcactatcgttatcgatatctgtcacatatatgaacggtcacactgccacgggccagtgctgcaaaatacggcaagagcacacaatttcgtcgtttctgctctaaattttcgaacaggttgttgcaattacaactatttatgaaatgtttttaagttatttccctttcagagctatgaattgtaagcattgtatggctacccaacacactttgccagctctgacaactctgcacatccatatcagctgatttctcgatcgctctctccgttttctgttgttatttaattgataaacttgttgcggggggccactctccagataaccccccacttttaaattaataaatattgcgcaagtaagtgccgtccagctcgccgaatgctcactttcattcgaccgcagagctgttcccattctaatcatttccttgagcattcataatcgagctacaatacacattttttttcaaattcacagtgcaactaactcaaatcctcaggatggcgtgccaaaaccaaaatgccgccaacttcttgagcaatggcaagaaaattgtgggggtggctctcaattacatgtaactcagtgtcatagtaatcttgggtctgcatgggtaatccacgaatactttcttccgtcgcagggacgttgtgctggccaggaacgttcccgtgcccaaggagccgctcgtcttcctcaagcccacatcttcgtacctccaggagggtcagcccattgtggtgagttctacagagaattaattaagataacattaagatagtagcaagatagcaaaagtccataaactggagagtaaacgaatggaaattgaaaatccctcttgtgatttaaactttgtattcccccagttaccaaaagtctttaccaaggtggcatatgaagtggaactaggcgtggtgattggaaagccctgcaagaacgtatccaaggcagatgccatgagctatgtggcaggatactgcctggct

SEQ ID NO: 6362 - DNA, 2387 bp, DROSOPHILA
tttggctttgtggtttcgcagtccgtatttgggcgagatctggtaaaaaaaaataaaattctccgtgtgaaaagtgagtgtccagtagttggcgtcatctgaataagcaaaaacaaacaacgtgcaagccgccaggagcggtgagaataatgacttgcatacgacattcgctcaattggtgagggacctcggcaagttgagtttgcctttgccatcgcgttcgcctcgccgttttcgcgcatcccgcctgcggtcctacagaaaccgagacgagcaaattgtaattttccttcgacctaaaaattatatgaaatcgctggcgaaaagcgatttgcgagacgtgttaacgaaaaatcagcgaaaaacgctacgtggtgcgtgagtgcgagtgcgacggaaaactctggcagtgagcgagtgagagagaagcaaacgacgagccagtaaactctacaaacacacaaacaacacaatgatgaaaatggagactgacaaaataatggacgaaaccaactccaatgcacaggccttcacaaccactatgctgtacgacccggtgcgcaagaaagactcatcgcccacctaccaaacggagcgggaactctgctttcagtacttcacccagtggagcgagtcgggccaggtggactttgtggagcacctgctgtcgcgcatgtgccactatcaacacggacagatcaatgcctatctcaagccgatgctccagcgggactttatcacattgctgccaatcaagggtctggatcacatcgcagaaaacattttgtcgtacttggatgccgaatcgctcaaatcatccgagctggtctgcaaggaatggctgcgcgtcatttccgagggcatgctctggaagaagctcatcgaacgcaaggtgcgcacagattccttgtggcgcggactggccgagcggcgtaattggatgcagtacctcttcaagccaagaccgggccagactcaacggccacactcattccatcgcgagttgttccccaagataatgaatgacattgacagcatagagaacaactggcggactggccgccacatgctgcgccgcatcaactgccggtccgagaactcgaagggtgtctattgtctgcagtacgatgacggcaagattgtctccggactgagggacaacaccatcaagatctgggatcgcacggatttgcagtgcgttaagaccctaatgggccacactggatcggtgctgtgcctgcagtatgacgacaaggtgatcatcagtggctccagcgactccaccgtccgcgtgtgggacgtcaataccggcgagatggtcaacacccttatccaccactgcgaggcggtgctgcacttgcgctttaacaatggcatgatggttacctgctccaaggatcgctccatcgccgtctgggacatgacctcacccagcgagattacgctgcggcgcgtccttgtcggtcaccgtgccgccgtcaatgtggtggactttgatgagaagtacatcgtgtccgccagcggggatcgcaccatcaaggtctggtccacatctagctgtgaattcgtgcgcaccttgaatggccacaagcgtggcatcgcctgcctacagtacagagatcgcctggtggtcagcggcagctcagacaattccataagactgtgggacattgagtgcggtgcctgtttacgtgtcctggagggccatgaggaattggttcgctgcattcgtttcgatacgaaacgaatcgttagcggtgcctacgatggcaagatcaaggtttgggatttggtcgccgccctggatccaagagcagcctccaatactctctgtctgaatacccttgtggaacatactggtcgcgtatttcgtttgcaattcgatgagttccagattgttagcagctcgcatgatgatacaattttgatttgggactttctaaatttcacacccaatgagaacaagaccggacgcacaccgtcaccggccttgatggaacattaacattttgtgcaacggcagctgcgcgagttacatctacaatcctcgagcgaaggagaggaggacgacgatgcggacgaggacgacgaggatgattttgaggaggaggattctagaaacgatgctggcgcgtttatggggggatatgttaggcaccgggatgctggtggttcgggatccgtcaccggttccggttcggatcccgaatcggatgacctggatttcgatatagatgttgagaatattaatgattatgatgaataatgagtgaatggtcgttaaccagcagcatatacatacacacagcagacttgtttaaacaaaaaacgatgttgaacccaagatacagcgatctctaagcgtctattttacacactacatccac

SEQ ID NO: 6363 - protein, 510 aa, DROSOPHILA
MMKMETDKIMDETNSNAQAFTTTMLYDPVRKKDSSPTYQTERELCFQYFTQWSESGQVDFVEHLLSRMCHYQHGQINAYLKPMLQRDFITLLPIKGLDHIAENILSYLDAESLKSSELVCKEWLRVISEGMLWKKLIERKVRTDSLWRGLAERRNWMQYLFKPRPGQTQRPHSFHRELFPKIMNDIDSIENNWRTGRHMLRRINCRSENSKGVYCLQYDDGKIVSGLRDNTIKIWDRTDLQCVKTLMGHTGSVLCLQYDDKVIISGSSDSTVRVWDVNTGEMVNTLIHHCEAVLHLRFNNGMMVTCSKDRSIAVWDMTSPSEITLRRVLVGHRAAVNVVDFDEKYIVSASGDRTIKVWSTSSCEFVRTLNGHKRGIACLQYRDRLVVSGSSDNSIRLWDIECGACLRVLEGHEELVRCIRFDTKRIVSGAYDGKIKVWDLVAALDPRAASNTLCLNTLVEHTGRVFRLQFDEFQIVSSSHDDTILIWDFLNFTPNENKTGRTPSPALMEH

SEQ ID NO: 6364 - DNA, 10850 bp, DROSOPHILA
cagcgcgcacaatggtgagctaaacgactaaaagtcagtgaaatgttcgagcagcgaggagatcagagtaaggtgaaggatttccccaaatcgacatttggaaatgggaaaagttggcagataaatgacagataaagtcagctaaaagtggtgctcgaataaggtgttatcgtagacatttcaatggcttccaattgggcgtctttattgttttggtacaatgaaataactgatatacaataaataggtgattcattaaccatcaaaattatatgtatatcagaaacaaaaatctaataaaattcgtttaaactgatttcaaaacagccaaagaaaagaaagtcatactgtgcattattataaaaattttcataaaaaagaaactgcacaaaaactcaactgctaccactgtaaaatgcccaccaaaatacttgcggcaatttctaggaccatttccacaatatacatactagtaaacatatattgcttttttcttccgcaaaatggcattatttaaaaatgtcgatgggtcacgctgaactcgtcaacgtccttcagaggtataagcgtttttttttttagctcccaggaaaaatgttgccgtcctcgtgtaattgaaaacggttattgacaagttaatggcccgaacaaccagccaaccaagaagaggatctaagctaactactgtaattgcctatttgtatgctaacccaaatgaaccgaaaaaatcgagtgaataaattataaactggactgagcgcaattcgaaaaatatttgccgttttattgatgcgttgatactgatttaattaaaatgaatactatactagtttttcatatcaatttaacattatttaatgatgaaaccaatcctctactacatgcataaaaagtccaatgaatattaaattcaaattgatatacctctcatatttggcttacttagaataatattaaactttttattaaaattactcttatttccttcacatttttttagactatccccgagtggaggtcggaccccagaatcctttaaaagtagaacgggatcatgtggcgaaactggactgcagagtggatgccaaaccgatggttagcaatgtgcgatggtcccgaaatggtcaatatgtgagtgccacgcccacccacaccatatatagagtaaatcgccatcatgccgggaagtacacctgcagtgcggacaacggcttgggcaaaactggcgaaaaagatatagtcttggatgttctatatccgccgattgtgtttatcgaatcgaaaacgcacgaagcggaggaaggtgaaacggttttgattcgttgcaatgtcaccgcaaatccatcgcccatcaatgtcgaatggctaaaagaaggagctccggacttccgatacactggcgagctcttaaccctcggttcagtgagggctgagcacgccggaaactatatctgcagatcggtgaacattatgcaaccgttcagttcgaaacgtgtagagggtgtgggcaattccacggtggctctattggttcgacatcggccgggccaggcttatataactccgaataagccagtcgttcatgtgggcaatggtgtgactctaacctgttcagcgaatccgcccggatggcctgtaccccaataccgatggttccgagatatggatggtgacattggaaatacacagaaaattttagcgcaaggtccacagtactctataccgaaagctcacttgggaagcgagggcaagtaccactgtcatgcggtcaacgagttgggaattggtaaaatagccaccataatcttagaggtacatcagccaccccagtttctggccaaactacagcaacatatgacacgtcgggtgggcgatgtagactatgcggtcacctgcagtgccaagggaaagcctacaccgcaaattcgatggatcaaagatggtaccgagattctgcccactcgcaagatgtttgatataagaactacacccacggatgccggtggcggagtggtggcggtgcaaagtatactgagattcaggggtaaggctagaccgaatggaaaccaactacttccgaacgatagaggtctgtatacttgcctttacgaaaacgacgtaaattcggccaattcttcaatgcatctgaggatcgagcacgaaccgatagtcattcatcagtacaacaaagtggcctacgatcttcgagaatccgctgaggttgtctgcagggttcaggcctatccgaaaccggagtttcaatggcaatacggcaacaatccttcgccattgaccatgtcttcggatggtcattatgaaattagtacgagaatggagaataatgatgtgtacacctccattttgaggatagcacacttgcagcactctgattacggagaatatatttgcagagctgtaaatcctttggacagcataagagcaccaataagactgcaacccaaaggatcgccagagaaacccaccaatttaaagatcctcgaagttggtcacaactatgccgtcctaaactggacaccgggatttaatggcggctttatgagcaccaaatatctggtgagctacaggagagtggcaacacccagggaacaaaccctatccgattgttcaggaaatggctatatacccagctatcagatcagcagttcgtccagtaattccaaccacgaatggatcgaattcaattgctttaaggagaacccctgtaaactcgcaccattggatcaacatcagagttatatgtttaaggtttatgccctgaattcgaagggcacctcgggatattcgaatgagatattggccaccaccaaagtcagtaaaattccaccgcctttgcatgttagctacgatcccaattcacatgttctgggcatcaacgtggccgccacctgtctgtccctcattgcggtggtggaatcactggtaaccagggatgccacggtgcccatgtgggagattgtggaaaccctgactttgctcccgtcgggcagcgaaacgaccttcaaggaggccatcatcaatcatgtgtcgcgtccagcccactacaccaccgccaccacgtccggaaggagccttggagtgggtggtggctcccacctgggcgaggatcgcaccatggcgttggccgagaccgcgggacccggtccagtggtgcgggtcaaactctgtctgagatctaaccacgagcactgtggtgcatatgccaatgcagaaagtgagtataagtggttgcaataataactaactatgtaaattcaattatgaaactacctattaagattttccataatccgaaaactaatcgtatatttcccctcttagttggcaagtcctacatgccgcacaaatcctccatgacgacatctgcattagtggccatcatcatcgcttcgctttctttcgtcgtctttcttggtcttctctacgctttttgccactgccgtaggaaacatgccgccaaaaaggagagtagctcagtaggaggaggagttggaggaggcaacgctaacgccacggctaatccaggatctaccggtgccaaagagtacgacctcgacttggacgccagccgaagaccgtcgctaagtcaggatccacagcaatcgcaacagcagccaccgccaccaccaccctactatcccacgggaactctggactccaaggacattggcaatgggaacggcggcatggagctcaccctcaccgccctacacgatcctgatgagcagctgaatatgcaacagcagcagcaccacagcaaccacggccagtatcaacagcccaaagccatactgggtatctacggcggagtggctggctctgggggcaacaattccggcggacagcatccacattcgaacggctacggctatcatgtgacaagtgccatcggcgtggacagcgacagctatcaagtgctgccctccgttgccaactcagcagccggatcccacggacatggcagtggacacggacacggactaggagccggagagtgtgagtacatgcagagaaaatgttgtgcaaatagtttaaaattatacagaaatgatggtgaaaagatccttaggataatagaaaccctgagaaaaaactaaatttttattacacactgattcgttggtgaatccattgatgttctatctatagaattgcgagtgttgtttacttttccccataacttcgcacacttgacactaattttttgttcgctgactgtgcagggctggacaaatttcgcttcagttcggcgacaacttatgaagagacgtgactctgtggctagaaaagtgggttgcggaggattgcgttttcgggggctctggaggattacgggggttttttggtgggcgtgtgtgtcttgattaagcgacacatttttcggcgcagatttatggcggccatttcgatgggtgtccctgttcccaggccagagtttttggccgtaattgcatttcatgtcaatctagagctgctcctcctccacttaccgagctactcatgcaaatgcaacgtggccgccgttggtcctttccacggatttcccacgcttttcccccgagcttgcccacacattttccatggtgtttggtgtcgggcataagcagctcccccttggcaaccgaaatgacaccaatcggcaacgcaaagcgccgccggaaacggaaacgggagcgactgaaaatgtggagctgccatcgtaattccaattatgtgagaattaaggcgttatccttcagctggctttgttcccccaatcgaatatccactgtatggttcaagttctgtgctattgccttgtttttaattggttacaagacggcttaagggatttgagaaatcaaatagcattgtgactaagcattgttcatttgctcacttaattgatttggttactaaaaagctggtcttagtttaaaattccatttaattaaatgaaacgaactgattagatatgatatgattttttatacatttagtattctttcccactgcgatgagtagtccaaaaatgtaataaacaaacttaacgcaattagataacttgaattttcaaattctctcctcgagtaatcccattaaagaggtcgcctttcagtctttaatcctattaggccggaaaacttaacccaaccccgaaagaacttctgcgctttattttttacccctgtccaactgagcttctcggcaaaaggggcgttgaacaataaagaatggaactctattcacacctaaatggaagctacaagtttgaaaccgagtagatgggtgagcggcactgagcaaatgagttgaactgaaatgagttgaagaaatacaataaagctatcttcattaggagtagcacaataagcggaatattttaggtatttaaaagtacatatgtatgtttaaaaacatagaaacatataacatagataggaatctctaaacttagtatttatgctagtttctgtatagattcgcattttctctgagtgttgccctcaggaatgcattttaattgtgggggttgcgaccggtcgcgggctttgttgctccttctttgcgttccccttttggcaagcgtcaacttaattactatttctctgcccccccttcgcacacttgcaaaccgccacacactcacacacacgcacacatactcatcgtcgttggtgtgcggctacaaccgaagcaggaccacttgaggcgacaccaccaacatgcaacatcagcggcggcagcagcagcaacagcggcattaacccaatgcagcagcaacattcagcacgcgccaatctaacgaaccaacccaccatcgccactgccagctccaccaacaactacaacaaccacttgaacaacaccaacatcgcccacaccaccaacaacaccaacaactgcaccaccctgaaacgcggccacttgggaaatagggagagagagcgggaaagatgccaggtaaccgcagccacggcggcaacaacaacggcactggcaaccaccataacaacaacatctcgcaatgccaaggcagcaacaacaacaacaacactagccattacaggtaactccagctatgggcgacacattgaaaaggcgaaacaaaagcaactatcgcaccatacgagacaataaatataaacgcaatcgtcgtctgcacaaaatgcacttaaaaaaaatcagtatagaagagcacctcacacaatattatagctgatgttttgttactagctgttgttgcactcttaaatcgttttaaatgtttccaaagcgtttctcttggtgtacaactctttctaagctatactataagttttggcagtttgttgaaagggtaaaactttatttaactggaaaatttaaattgaagaaatttaaacatagaaccggtacacataatattattaaagttacataatattaagagaataaaataaatatgcctacctttcccctacgtgtccaatcgatagacactacattattttaacagccaacaaaataataaaaattctcagatacagatacatataccggaaattccgtcaacaaatttccatgatcaaaattcacatatttcgttggcattttagttaaacttctttacaaaaatgcattcagtgttgccgttgatgtatcgtagaaggagttcccatctgaaggccctccaatggacgatccagtcgagccagaatttcttcaagatgagcttcaaagcgccatcgataaaagtgcctaaggctgccgccattaaggaattggccaataaaccaacgcaaccccagtctcagccctcgcaatcgcagtcttcggcaacacaaccaactcaaccgcctcagcaagcggaaatcaaaaagaatcctttgacaatgggcgccattagccccgcaccacccactcccattagcccaaaaccctcagttcaaccaaaaatcccagatcagcgggccaagtggatggccaaggtttctccggaatcgcagagaaaagcgaaattggcagctgcaggaggttctccgccttccggtccaccaaagaaccagtttagccaagcaaataatcccagtttcgcgatgcccggtcaaagttcgcctgcaaactttagtgctgcacctaaaactcaagcctcctggcagcaaaaggtggaaaaatctgcggaaaatgaagattccggtgcattcaagggtgcctcttctgagtctcaacgaaaaaactggatgaaccgcatgcagggatcgcaacaaaggaaacagaatcagtggctgaaagagatgcaggccaaacagcaggctggcaaggatattcaggcacagaagatgcagaaaatggagtctcaaaaggccacgacgaccccagctgcaccacctaaagaagcggctccatccactccacaaccggccgaaaagcccgaagaaaagagtccagaacatttggcatacttagatgcgatcaagcaactgaatagctatcaggttttggaacccacttccggcagagccaccaccaagagcagtagaaaggaacaggatccggttatcgagcaaactttggagtgcctggaaaagtcgggtcttacgaaaaaggatctgaaggccatacccgtaatacaggtagccggttccaaaggacggggctcaacgtgtgccatcgtggagagtattcttcggtgtcatggggtgaaaactggtgttctctcctcgccgcacctgtttttaaccagcgaaaggataaggatcgacggtgaacccctgagcgatgttcagtttacggaactcttttggaaaatcaacactgatctagcgaatatgcaacccacaccttcctataacaaaatcatgacggtcatggctttccacgctttccatcaagccggcgttgaggtggccattttagaagtgggaaatgcaggcgccagtgatgccaccaacatagcctcgcatgcccagaccatagggataacaacattgggatgggagcagagctcgaatttgggaaattctttaagggatatagcctgggcgaaggcgtccattatgaagccggaggccaatatctatacgaatgtcacccaaacggaatgctgtgaggttttggcccaaaaggccaaacaaattggcgcccaacttcgccgtgtgccaacatttaacgactatgtcgaaggtgatatgaacaacaagctgctgatgaacaaggcaaactactctatgagattgaacggatccctggccgtacaattggcctacgattttttgaagcgacacaagcccgaatatgtggtaggattggaacataattctactctgctaacaccgggagctagtcgcggaatcgagatctttgaacagcccggacactttgacttcatgcgacacgacatgtttaatgtctatttggatagcgccgatacctttgagtcgatgatggcctgccgggattggttttacaccagaacacgtgcaaatcgacagccaaaaatcctgctgtttaacaaggtcaacgagttcaatgccaaggatcttctgactattatacgcagtaatttgcgcttcgaagaggcctgttttgtgcccaatcccaactacttcgagggcgaaatcctggccgaggaggatggtaaggcgatggtatggcacggcatggaggagctgcaaagggccaagaggaatgccggaaattggagagctctctgcgaggagaatggcaaaagggacaactcgcaactttccatatccatcaatgccttcttcgagtacctgaccaataagtacggcaaacagaagtacggaatgaagaacgaactggatgtcctggtcaccggctcccggcaattggtggccgccaccatatcgtgtctacgaaaaatgaagtcatcgaatccttggcaatgaaaatataggcttagagaattttcctatgttttattcgccttaaatttcgtcgtggtttacgtttacttgtctctttttttgtatataaatacaattgtaaaaatgttttttaaagcagttttactaagactttaaattgacgcaccccaaaacaattgcattaactgacattgtttataattaagaacaaatatgttctcaattgtcagagaaagttgaaacctttttatttggtgttattttagctcatgtattattaagcatggctgaaactaatttaacattacactttactattcaaaccgtgttataataatcctttggacagctgtctgatgagaatgaccggtcacttatgccatatatatagatgtgtttatgttagtgcgtgtttttccaattagccactgtgactctcaagttttcccacttaccgcaaagcacctgaagcactttgcacccactttcgacaccttttttttggtacatctgcacaactatatatactagctgtagccgccaactaaaatggcccgtaataatccaaggaaatgtggtaatttgcagggtcaagcagcaattcgaacgagaataactacagtaatgccagggatctgtcgcaggaggcattgtggcgcctccaaatggccaccgcccagtcgcaacagatttacgtggagcgaccaccgtcggcattcagtggcctggtcgactatagtggctattcgccgcacatccccacggtgaccagttcgctcagccaacagagtttcagtccaacgcagcaattagcgccccacgaaatgctgcaggccgcccagcgttacggaactttgaggaaatccggaaaacaaccgcctcttcccccgcagcgaaaggatatgcagcagcaggcgaagccacctcagcaaatgggtgagtttattattatttattggaagtcaaaatgggcttgctagcggcagtaataagcaaatagcactactacatgtatctaggacacgtgttgcattttataataggtgatggcattgattttgaacagagtatacgagatttatgcaagatggggtttccaaaatctcgtgcccaaaactagattattgccgcacaagctgctcgacgagcaacaataaaatctcattgggaaaataatccatccacaaatccaatccggacacaaatccaatgcctgaaaatccgaaatcggttgaggcgactaagaaatcagtttgattgattatgcacttaagttttgggaaatgtttggacaagagttttgctgatgcttcgagctgaagctgttcggataaacaaaatagagttttcacaatggaaggcagggacagcacacacacacacacacacacacacacgaacatttacccctcttcaaacacagtgcagcatgctttcaccgaaacccatctaaatttctgtacaaaatttgcatttgtacacccttttatgcagcagcagccagagaagaaggatacaccagctcacacagataaatgcacataaaatacatggtttgcccctccttgcgaaaagcccgggaaagtgctccgccttctatcaagaacaacaaatcgcttgcagcgacaactatcgccgcttcttttttgaaaaaaaatgatgttgggaaatgtttgaggagttgggttaaaaatactgaaaatataccaaaacaaactacgatgaaggcgaaggaaaaggacttacaaaaaaagagtgctatttaaaatgtaaaatgctgagctgaaaatatttcacaaaatcaaaatcaaacaacgctgctagctgtaagcgaagtgaaataaataacaacagaagctggcgtacactgagagaaaaacaaaacacagcactggtgagagtaacagagcgactcaaaataaatctactatctataaagacggcagctttaagttagcaattgaatttaatacataattt

SEQ ID NO: 6365 - DNA, 5900 bp, DROSOPHILA
actatccccgagtggaggtcggaccccagaatcctttaaaagtagaacgggatcatgtggcgaaactggactgcagagtggatgccaaaccgatggttagcaatgtgcgatggtcccgaaatggtcaatatgtgagtgccacgcccacccacaccatatatagagtaaatcgccatcatgccgggaagtacacctgcagtgcggacaacggcttgggcaaaactggcgaaaaagatatagtcttggatgttctatatccgccgattgtgtttatcgaatcgaaaacgcacgaagcggaggaaggtgaaacggttttgattcgttgcaatgtcaccgcaaatccatcgcccatcaatgtcgaatggctaaaagaaggagctccggacttccgatacactggcgagctcttaaccctcggttcagtgagggctgagcacgccggaaactatatctgcagatcggtgaacattatgcaaccgttcagttcgaaacgtgtagagggtgtgggcaattccacggtggctctattggttcgacatcggccgggccaggcttatataactccgaataagccagtcgttcatgtgggcaatggtgtgactctaacctgttcagcgaatccgcccggatggcctgtaccccaataccgatggttccgagatatggatggtgacattggaaatacacagaaaattttagcgcaaggtccacagtactctataccgaaagctcacttgggaagcgagggcaagtaccactgtcatgcggtcaacgagttgggaattggtaaaatagccaccataatcttagaggtacatcagccaccccagtttctggccaaactacagcaacatatgacacgtcgggtgggcgatgtagactatgcggtcacctgcagtgccaagggaaagcctacaccgcaaattcgatggatcaaagatggtaccgagattctgcccactcgcaagatgtttgatataagaactacacccacggatgccggtggcggagtggtggcggtgcaaagtatactgagattcaggggtaaggctagaccgaatggaaaccaactacttccgaacgatagaggtctgtatacttgcctttacgaaaacgacgtaaattcggccaattcttcaatgcatctgaggatcgagcacgaaccgatagtcattcatcagtacaacaaagtggcctacgatcttcgagaatccgctgaggttgtctgcagggttcaggcctatccgaaaccggagtttcaatggcaatacggcaacaatccttcgccattgaccatgtcttcggatggtcattatgaaattagtacgagaatggagaataatgatgtgtacacctccattttgaggatagcacacttgcagcactctgattacggagaatatatttgcagagctgtaaatcctttggacagcataagagcaccaataagactgcaacccaaaggatcgccagagaaacccaccaatttaaagatcctcgaagttggtcacaactatgccgtcctaaactggacaccgggatttaatggcggctttatgagcaccaaatatctggtgagctacaggagagtggcaacacccagggaacaaaccctatccgattgttcaggaaatggctatatacccagctatcagatcagcagttcgtccagtaattccaaccacgaatggatcgaattcaattgctttaaggagaacccctgtaaactcgcaccattggatcaacatcagagttatatgtttaaggtttatgccctgaattcgaagggcacctcgggatattcgaatgagatattggccaccaccaaagtcagtaaaattccaccgcctttgcatgttagctacgatcccaattcacatgttctgggcatcaacgtggccgccacctgtctgtccctcattgcggtggtggaatcactggtaaccagggatgccacggtgcccatgtgggagattgtggaaaccctgactttgctcccgtcgggcagcgaaacgaccttcaaggaggccatcatcaatcatgtgtcgcgtccagcccactacaccaccgccaccacgtccggaaggagccttggagtgggtggtggctcccacctgggcgaggatcgcaccatggcgttggccgagaccgcgggacccggtccagtggtgcgggtcaaactctgtctgagatctaaccacgagcactgtggtgcatatgccaatgcagaaattggcaagtcctacatgccgcacaaatcctccatgacgacatctgcattagtggccatcatcatcgcttcgctttctttcgtcgtctttcttggtcttctctacgctttttgccactgccgtaggaaacatgccgccaaaaaggagagtagctcagtaggaggaggagttggaggaggcaacgctaacgccacggctaatccaggatctaccggtgccaaagagtacgacctcgacttggacgccagccgaagaccgtcgctaagtcaggatccacagcaatcgcaacagcagccaccgccaccaccaccctactatcccacgggaactctggactccaaggacattggcaatgggaacggcggcatggagctcaccctcaccgccctacacgatcctgatgagcagctgaatatgcaacagcagcagcaccacagcaaccacggccagtatcaacagcccaaagccatactgggtatctacggcggagtggctggctctgggggcaacaattccggcggacagcatccacattcgaacggctacggctatcatgtgacaagtgccatcggcgtggacagcgacagctatcaagtgctgccctccgttgccaactcagcagccggatcccacggacatggcagtggacacggacacggactaggagccggagagtcaggaccacttgaggcgacaccaccaacatgcaacatcagcggcggcagcagcagcaacagcggcattaacccaatgcagcagcaacattcagcacgcgccaatctaacgaaccaacccaccatcgccactgccagctccaccaacaactacaacaaccacttgaacaacaccaacatcgcccacaccaccaacaacaccaacaactgcaccaccctgaaacgcggccacttgggaaatagggagagagagcgggaaagatgccaggtaaccgcagccacggcggcaacaacaacggcactggcaaccaccataacaacaacatctcgcaatgccaaggcagcaacaacaacaacaacactagccattacagtgttgccgttgatgtatcgtagaaggagttcccatctgaaggccctccaatggacgatccagtcgagccagaatttcttcaagatgagcttcaaagcgccatcgataaaagtgcctaaggctgccgccattaaggaattggccaataaaccaacgcaaccccagtctcagccctcgcaatcgcagtcttcggcaacacaaccaactcaaccgcctcagcaagcggaaatcaaaaagaatcctttgacaatgggcgccattagccccgcaccacccactcccattagcccaaaaccctcagttcaaccaaaaatcccagatcagcgggccaagtggatggccaaggtttctccggaatcgcagagaaaagcgaaattggcagctgcaggaggttctccgccttccggtccaccaaagaaccagtttagccaagcaaataatcccagtttcgcgatgcccggtcaaagttcgcctgcaaactttagtgctgcacctaaaactcaagcctcctggcagcaaaaggtggaaaaatctgcggaaaatgaagattccggtgcattcaagggtgcctcttctgagtctcaacgaaaaaactggatgaaccgcatgcagggatcgcaacaaaggaaacagaatcagtggctgaaagagatgcaggccaaacagcaggctggcaaggatattcaggcacagaagatgcagaaaatggagtctcaaaaggccacgacgaccccagctgcaccacctaaagaagcggctccatccactccacaaccggccgaaaagcccgaagaaaagagtccagaacatttggcatacttagatgcgatcaagcaactgaatagctatcaggttttggaacccacttccggcagagccaccaccaagagcagtagaaaggaacaggatccggttatcgagcaaactttggagtgcctggaaaagtcgggtcttacgaaaaaggatctgaaggccatacccgtaatacaggtagccggttccaaaggacggggctcaacgtgtgccatcgtggagagtattcttcggtgtcatggggtgaaaactggtgttctctcctcgccgcacctgtttttaaccagcgaaaggataaggatcgacggtgaacccctgagcgatgttcagtttacggaactcttttggaaaatcaacactgatctagcgaatatgcaacccacaccttcctataacaaaatcatgacggtcatggctttccacgctttccatcaagccggcgttgaggtggccattttagaagtgggaaatgcaggcgccagtgatgccaccaacatagcctcgcatgcccagaccatagggataacaacattgggatgggagcagagctcgaatttgggaaattctttaagggatatagcctgggcgaaggcgtccattatgaagccggaggccaatatctatacgaatgtcacccaaacggaatgctgtgaggttttggcccaaaaggccaaacaaattggcgcccaacttcgccgtgtgccaacatttaacgactatgtcgaaggtgatatgaacaacaagctgctgatgaacaaggcaaactactctatgagattgaacggatccctggccgtacaattggcctacgattttttgaagcgacacaagcccgaatatgtggtaggattggaacataattctactctgctaacaccgggagctagtcgcggaatcgagatctttgaacagcccggacactttgacttcatgcgacacgacatgtttaatgtctatttggatagcgccgatacctttgagtcgatgatggcctgccgggattggttttacaccagaacacgtgcaaatcgacagccaaaaatcctgctgtttaacaaggtcaacgagttcaatgccaaggatcttctgactattatacgcagtaatttgcgcttcgaagaggcctgttttgtgcccaatcccaactacttcgagggcgaaatcctggccgaggaggatggtaaggcgatggtatggcacggcatggaggagctgcaaagggccaagaggaatgccggaaattggagagctctctgcgaggagaatggcaaaagggacaactcgcaactttccatatccatcaatgccttcttcgagtacctgaccaataagtacggcaaacagaagtacggaatgaagaacgaactggatgtcctggtcaccggctcccggcaattggtggccgccaccatatcgtggtcaagcagcaattcgaacgagaataactacagtaatgccagggatctgtcgcaggaggcattgtggcgcctccaaatggccaccgcccagtcgcaacagatttacgtggagcgaccaccgtcggcattcagtggcctggtcgactatagtggctattcgccgcacatccccacggtgaccagttcgctcagccaacagagtttcagtccaacgcagcaattagcgccccacgaaatgctgcaggccgcccagcgttacggaactttgaggaaatccggaaaacaaccgcctcttcccccgcagcgaaaggatatgcagcagcaggcgaagccacctcagcaaatgggtgagtttattattatttattggaagtcaaaatgggcttgctag

SEQ ID NO: 6366 - protein, 1935 aa, DROSOPHILA
MVSNVRWSRNGQYVSATPTHTIYRVNRHHAGKYTCSADNGLGKTGEKDIVLDVLYPPIVFIESKTHEAEEGETVLIRCNVTANPSPINVEWLKEGAPDFRYTGELLTLGSVRAEHAGNYICRSVNIMQPFSSKRVEGVGNSTVALLVRHRPGQAYITPNKPVVHVGNGVTLTCSANPPGWPVPQYRWFRDMDGDIGNTQKILAQGPQYSIPKAHLGSEGKYHCHAVNELGIGKIATIILEVHQPPQFLAKLQQHMTRRVGDVDYAVTCSAKGKPTPQIRWIKDGTEILPTRKMFDIRTTPTDAGGGVVAVQSILRFRGKARPNGNQLLPNDRGLYTCLYENDVNSANSSMHLRIEHEPIVIHQYNKVAYDLRESAEVVCRVQAYPKPEFQWQYGNNPSPLTMSSDGHYEISTRMENNDVYTSILRIAHLQHSDYGEYICRAVNPLDSIRAPIRLQPKGSPEKPTNLKILEVGHNYAVLNWTPGFNGGFMSTKYLVSYRRVATPREQTLSDCSGNGYIPSYQISSSSSNSNHEWIEFNCFKENPCKLAPLDQHQSYMFKVYALNSKGTSGYSNEILATTKVSKIPPPLHVSYDPNSHVLGINVAATCLSLIAVVESLVTRDATVPMWEIVETLTLLPSGSETTFKEAIINHVSRPAHYTTATTSGRSLGVGGGSHLGEDRTMALAETAGPGPVVRVKLCLRSNHEHCGAYANAEIGKSYMPHKSSMTTSALVAIIIASLSFVVFLGLLYAFCHCRRKHAAKKESSSVGGGVGGGNANATANPGSTGAKEYDLDLDASRRPSLSQDPQQSQQQPPPPPPYYPTGTLDSKDIGNGNGGMELTLTALHDPDEQLNMQQQQHHSNHGQYQQPKAILGIYGGVAGSGGNNSGGQHPHSNGYGYHVTSAIGVDSDSYQVLPSVANSAAGSHGHGSGHGHGLGAGESGPLEATPPTCNISGGSSSNSGINPMQQQHSARANLTNQPTIATASSTNNYNNHLNNTNIAHTTNNTNNCTTLKRGHLGNRERERERCQVTAATAATTTALATTITTTSRNAKAATTTTTLAITVLPLMYRRRSSHLKALQWTIQSSQNFFKMSFKAPSIKVPKAAAIKELANKPTQPQSQPSQSQSSATQPTQPPQQAEIKKNPLTMGAISPAPPTPISPKPSVQPKIPDQRAKWMAKVSPESQRKAKLAAAGGSPPSGPPKNQFSQANNPSFAMPGQSSPANFSAAPKTQASWQQKVEKSAENEDSGAFKGASSESQRKNWMNRMQGSQQRKQNQWLKEMQAKQQAGKDIQAQKMQKMESQKATTTPAAPPKEAAPSTPQPAEKPEEKSPEHLAYLDAIKQLNSYQVLEPTSGRATTKSSRKEQDPVIEQTLECLEKSGLTKKDLKAIPVIQVAGSKGRGSTCAIVESILRCHGVKTGVLSSPHLFLTSERIRIDGEPLSDVQFTELFWKINTDLANMQPTPSYNKIMTVMAFHAFHQAGVEVAILEVGNAGASDATNIASHAQTIGITTLGWEQSSNLGNSLRDIAWAKASIMKPEANIYTNVTQTECCEVLAQKAKQIGAQLRRVPTFNDYVEGDMNNKLLMNKANYSMRLNGSLAVQLAYDFLKRHKPEYVVGLEHNSTLLTPGASRGIEIFEQPGHFDFMRHDMFNVYLDSADTFESMMACRDWFYTRTRANRQPKILLFNKVNEFNAKDLLTIIRSNLRFEEACFVPNPNYFEGEILAEEDGKAMVWHGMEELQRAKRNAGNWRALCEENGKRDNSQLSISINAFFEYLTNKYGKQKYGMKNELDVLVTGSRQLVAATISWSSSNSNENNYSNARDLSQEALWRLQMATAQSQQIYVERPPSAFSGLVDYSGYSPHIPTVTSSLSQQSFSPTQQLAPHEMLQAAQRYGTLRKSGKQPPLPPQRKDMQQQAKPPQQMGEFIIIYWKSKWAC

SEQ ID NO: 6367 - DNA, 1683 bp, DROSOPHILA
cctttatggctgcttgactatcagacagtatagaaatgtccttgccacgatagtttctttgcagattaaactccgcacagcgtccaatagcacatacttcagcttgaaaagctggtgtatctgcccattgattcgttgtattttaaattggggcctacaacccccagcccacttctctcgtcggtgagggatccgtttgtataccactttatcgtttgtggcttcatagggtgtactttccccagggttgtccaactgtttttattactgagatgagtgctgaagttctaagcgaacctgtgctcagctggcatctcatcccttggttgcattagcaaagggatatccctttttaggctttcagcatcctttctcgtgaggttgcagtcatttcctactccctcaattcttattagggtggctttccgtttcatttcaatgacgatatgaagcggtgttacctccattagtacttctagggctgcagtgggacaggtacgcactgctcctgtcatgcatatgctctatcaccccaggccaagatgttgtttggtgaaaatccttgccaccacagccgaggccgccttggcgcggtgttcacctgagctatccctgtactcccgaccattaaatgatcggctccatcgtcggcgttgctgatctggagatacccagatcaccatccgccggtatcgccccgggcagagatccgcagtacccgggtaaggctaactagaccgggcggacgccaattacccggactccccgttagcgactgggctagttgtttcacgggcccccagcctggcagactatcggcacgggtcgaatgacaccttagtccggcccggaggtttggaaatttttgagagttaccagctccagcccaactacaattagccagcactcatagcagagacatgacctaactaagagcctgtttccagccgcccttacgtggattacggcacgtaccaccgttggtggcgcgttgatccccttgtgatacctactggcgtggcgccctccattaaacgttagcgtccttacatttgtaaattgtaacaaactgtttttcttggttctgctcgctaagacttacaaaggctagctcagagagttttgattgccccactaagagatgttatggctccagaagctcttcccagaactgtcgcacgtccgtttaggaacgctcctgtcgcagggcaccagacactgactccacaatttcctttgaccacgtgccgtctcgaatgagacctaggatgtttggtggcagggccgcaagggtatcctccgttacgtcgaaccaaagcagactccttacacttcctcttgggaaccactcatatctggagatatatttttcgatatggcagctgaacacgtacaccacctcaaagttgaacaccaaatttcgtttcttttcgctctccttttttcttttatgagcgttttccgttttttttttaagcgctctcgtatctattcttactataatccgatggacgcataatgtcaacgcaaacggtacttcaataattgctttacttttctgggcgcagtttatgtttggaaacattatgacaatttcacattttcaccttttttttcaaaccgaacgcgcttggactttatcaatacggaccagctttggaaatatggtaacgagaaggtgct

SEQ ID NO: 6368 - DNA, 276 bp, DROSOPHILA
atggtgatctgggtatctccagatcagcaacgccgacgatggagccgatcatttaatggtcgggagtacagggatagctcagccctagaagtactaatggaggtaacaccgcttcatatcgtcattgaaatgaaacggaaagccaccctaataagaattgagggagtaggaaatgactgcaacctcacgagaaaggatgctgaaagcctaaaaagggatatccctttgctaatgcaaccaagggatgagatgccagctgagcacaggttcgcttag

SEQ ID NO: 6369 - protein, 91 aa, DROSOPHILA
MVIWVSPDQQRRRWSRSFNGREYRDSSALEVLMEVTPLHIVIEMKRKATLIRIEGVGNDCNLTRKDAESLKRDIPLLMQPRDEMPAEHRFA

SEQ ID NO: 6370 - DNA, 3313 bp, DROSOPHILA
taaggatacttttaagacagcctgctgcctcgtaaaagtcgctgccggaaatgcaatggcaaaagctgcgggaaaaatagaaggaaaccccgaaaagaaatctcagcccgaactacaaaatgcaaccatttcttctcgagtttcccatttttttttttttgtttttcaccgcacacatatacacgttcctcttggagagttctcaaaattgaaaattttttttatatatattttttttttgagcaacgaatagaatttgcatccccttgcgctgccactgaagaagtttataagatccactttaataatgtcgagtgctcgttttcatcataagaaattaaaactaaaacaaaaaatccacgtctagaaagcaattttccgcaatgggctttttgtcatacatatattatttagcgaaacgaaatgcattacgatagatgaaaaatttcacacgtttcgcacaagaagtggatgaaaagagttaagcttcaacgctaaaaaaaaacagaaattttatagaaatcttatttaaggatttcaaacatatttttttgggttaccacgcagttaattcgacatagccctagtatttagggaatagaaaacgaaattgatcgcgaacgtattcagcaactccgaggctattacgcttgattgagtttttccatttggtttttggccagtcaatccgcctttttgcctccttatcccatcagcaaggtaacgccagccatgttaaattaataaaaatgtaatgcccaagacaggacctgcggccatcagagagtccggcacaagaattgggctaataaatttacaaaaatgagttcgacgcttaatttgccatgagcatttttcatttcatttcgcaccgggcctcggaacatggcttttaagcctcaccaaaatgaaatcgaggggaaaccgagggaaacctcaacgacatgcacacacacatacacgtacacactgacacacccacacgcagagcagtgaaaacatggaaaacagaaggcgaacgaaaatgaaaatgaacaacaagctgaagtgagtggaggaaaatgttggtaggggcagcggagggggaagctacttaacgaaaacaagtgaggagaaatttattttccaggatctcgagagcaaagactgcaggatgctctactttatataagacatgtttttcggaagtatttaataaggataagacattcatattttttcattaatcaaggacattcatttagtactcaattattatattaaagaaacaaaaacttgcataatttttagaaatatttataatttgctgtataaaccaattgtataaattctaataccctgcccgaccagcagaacattaacttaattttaaagaaaacctaaatatatgcgtacagtggcttataagaaagataaacaaatatagaaataaataaatttaagaattgtgtgcagctgccgaaattcaacacgaagcgaagttaatttgcataaggaaaaagttttccccggctatacacatagttaataaatcgcttccaggtttatttggaactcattgcttattttctttctgatttcttgtgctttcagcttggacttccgacccagtcgcggaatttacgatttgcaaatcaaaaacacatcttataatcgagataatggacgctttgagtgccgcatcaaggcgaagggaacgggcgcggatgtccatcaggagttctacaatctgaccgtgctgacggctccacatccgccgatggtcactcccggcaatttagcagtggccaccgaagagaagccattggagttgacctgcagcagtattggtggctcaccagatccaatgataacgtaagggaattcgaatgtttaaatatcccatttaacttggttttaataccacatataaagaagtgattttcttattttctcttagttttcgttggcgtaccccactgattcatttttctacatctcccttttggctatgtggcaaagtaaatcacttaacgggcggtcgccttcattaataatccttctagggcacatggttgcacatcccgacttgcttctcctattttttggcactaaatcgtgggtatcactcgtgtattttttgcagctggtaccgagagggcagcacagtgccactgcagtcgtatgctctgaagggcggatcgaagaaccactatacaaacgccacactccaaattgttccccgacgggccgacgatggcgccaagtacaaatgcgtcgtctggaatcgtgccatgcccgagggtcatatgctggagaccagcgtcacgctgaatgtcaactgtgagtagttgggtttcggagttgcactccaagaaacagagtgaactcctatcgatttagaacctgatttttaagttattacattcttaatttatagcatcatagataaattgtatctcagttttcattttggctagaaaagaaagctgttcataaaatagaagaaatttcacaaccaaattatactccacttcatttaaagcaaataaatttctttacctcaaaaacttggccagaggtaaaccgaatattttccatggaaaacccgaccaacttgtttttcgattctcattcttcattttggtcatttcttttgtaattaaagtttggcaactgcgttatgggaacacatgctgttgtcgcatgatcaacgtgaccaaaaagccaagcagatgacacgagacacataaagtgtctgccacccaaaactactcccccaaaatcccccacacatgaccacttgattgttagttattggaccacaacaactgaaatctgctgcagaatgaccggggcatcaacttgtcatattagttggcaactttagcccccaaaacatcataacacatttgaggcggatattaaattttcggggacaacgcggcgtatgcgcaatatacttgtcaccgcgcgctgcatttaataaaaatcactagaaatgacatgttacggaatctgcataaaatttatgcaatcaaataaagtaacaaactagcaataaaaggcagaggaaaaatacatacatatatatacagtgggtggttttgggttggatggtggcaaactggagtagagccgagtttgccacaaatatattcataggaaaacataaattgcagccatttttatacacgccggatttggagccgcaaaagtagacaacaagaacaactcatatatgtttatatatatataaatgtctcctataaatatgtgttctctgtttgtgattctcccccagcgtcgtcagcgtaacaaatatttatagtct

SEQ ID NO: 6371 - DNA, 496 bp, DROSOPHILA
atggaaaacagaaggcgaacgaaaatgaaaatgaacaacaagctgaacttggacttccgacccagtcgcggaatttacgatttgcaaatcaaaaacacatcttataatcgagataatggacgctttgagtgccgcatcaaggcgaagggaacgggcgcggatgtccatcaggagttctacaatctgaccgtgctgacggctccacatccgccgatggtcactcccggcaatttagcagtggccaccgaagagaagccattggagttgacctgcagcagtattggtggctcaccagatccaatgataacctggtaccgagagggcagcacagtgccactgcagtcgtatgctctgaagggcggatcgaagaaccactatacaaacgccacactccaaattgttccccgacgggccgacgatggcgccaagtacaaatgcgtcgtctggaatcgtgccatgcccgagggtcatatgctggagaccagcgtcacgctga

SEQ ID NO: 6372 - protein, 157 aa, DROSOPHILA
MKMNNKLNLDFRPSRGIYDLQIKNTSYNRDNGRFECRIKAKGTGADVHQEFYNLTVLTAPHPPMVTPGNLAVATEEKPLELTCSSIGGSPDPMITWYREGSTVPLQSYALKGGSKNHYTNATLQIVPRRADDGAKYKCVVWNRAMPEGHMLETSVTL

SEQ ID NO: 6373 - DNA, 14278 bp, DROSOPHILA
aacataaacttttaagctccaaaatggttcgaaacatggatagactggcatacctatgtggcgccatctacacttcaagaatatgttcggtcgaaagctctgccaatattgaaaaaatacgactgaaaacaagcattcgtcaattttcggagaaacaaaatactcaggtattattcgaaaacaataacagataacaatgtttttttctaccttttcttctggttttacaattatcacttctcgatcgaagatgttggtttttaccattttgccaccatttctgaccaattaaagacacgctgtaatgtatttttaaagttcgcttgcatttaacgaactcacatattttaatttcacaagagaacgcagcttaagtagtttacagcatataggtaggttataaaagtacatatacagtaagtatggtgtgaacatcacatgcagatgcagattgatagcatttatcatgcaaaagagttaactcctttccgctttccccggctcattgatattttgcactcgacgactgaattcattgtttaaacgcatatatttttttaactttggtattaaactagatttacgcttaggagtaattaatttacttatggctaaaacactacttgtcggtcacacttaagaggggagttgggtgcttaactcgaatagtttactgttttcgtcgccttggcttctgctttattctagatgctgctgcagcagatgttgcatgtgttgcacgtgttgctgctgcacatgttgctgccctattttgctggtgatgaagctgaggagggaatacaccccggttcccagttgcacaatcagattgcatttggctaaattgataaattgataaaatctctcatctacagaatgaatctcatgtttgcgtataaaacacagttcttctgtcaaatgcgatcggattgcaatgggtaactaagtgggggcgagtcggaaaggtcgggctgtgtcgagagtggatggctagctcaaatcagtggccattgatcacctggtgggtgggttcgatgggtctgacgggcgtagtgatgatgtccccggcattggacttgctgcgcgtcaccagcatgggggtcttgggcttcggggtctccgtcagcttgatcttgacgcgacccgtctccggggaatagacgggtgagtatcttccggacttgggcgacgagggcaggtaggcgccatctggttcgttgttgttctgctcggcgagctgctgttgctgtgcgtacttggatgccctgggggattgcggtgtggggtagcgaggggtgatggggtagtattcatgggcggcaggctctccggtttcgggtgcctctttggtacctccattggccgaaccgttgccatttagcaggggctgctgaccagccccgtccttggcctctccgttctcgtagggcttcttgacaatctgtgcctcgtccaatttggtcttctctccgatcagtggagagtgctcctggccgttgccatggccattcttgtgcagcggcttgcccagctgcttcttgtccatgtccaggagctccgtctgccgctgggcctctgcatctcgggcggccgcattgctgtcgtacttgcaacgcttgatggccacaaagaggaccaggcccactacaattagtccaatcacggccagcagatagtagatggcgctgctgtcgtcctttggcttgcctatcttggcggtcaggatgtcctcggactccttgctgctgtccagtggcccatcagtaaccacatcggactccagaccagtatccaaattggtcatcaccaccggcacgatattatcttcttccacgggcttcttttcctcctggtcgccttcgtagataccaattttattggagaaaacagtgtctggattctccgaattctctggattctcaagaggtctaacatcgctctcctctggcttaccatcgctatctatgtcgtcctcggaagttatcttaactttagagggatcgggaatgatgagcagaccaccgccgctgccagaaccctcgtcatcttcgtcctcgtcctttacgatgtgctcctcgaggacactgggggaggccgcagcatccaccaactgagattccgcagcttcaggctctgcaacggtctcttcgggcaatttaagctccatattggtttcgctgagatctccggatccctccacctggtcagaaggcagcgggatctgaggcgagcgaaccttcttagcagtggctgcaggatttccaacaatgggcaaaaagtcttttcctagttcctcctcatcctcgcgttctgcagaaactgcagccggctggtcgcccatcatcagctcgttctcctcggtatcgaaccattggtacttctccttcttgcagatctcatcctgcttcaattgcagccaagagcgacccctgaactccaggggataggagcagacaacggggtgttccatgtagacgattcgttccaccaaccagttgcgcacctccagagtctggcaggagcagttgatggcgttgtggctcagctccaactggtgcaactggtgcatgtgggtcagctccagcggcaggtgggtgatgttgttgtgctgcaggttcagcacctgcagatgctgcggcagtttcctcagcttgtccgaggtgagctgattatgcttgaggttcagtcgcttgaggcccttgcccaggtgacccagatccttcagctggttatgcgacaaatcagcggaggtgagctccggcagcttgtctagcaaatggctcaagcgggtgaggttcaggtgggacagatcgatggagtgcaccggcaccgttgactggaaggtcttctcggtcagcctcagaccacgggtgctgttgcatttgaggtggtacagtggcttgtgcgtgtgctgggacaagctgcaggtgcagtccgccgggcagccggtgggcgtgcgagcgggagtgggcgtggcgttggcaaccacaatgaggaacagggccaaccaggcggtcaggtggacgcgttccatggctgtgtggatgatttgtgtttggtacgctggcagtggatccttctagcttcctctcttggcgtcttatctgaaaaggaatggaaatgcgattagaatcttgcttgtttattagataccacaatccagagcacacccatctaaatgctcataaaataaaacagataatcaaaagagcaaaattgggctaaatacattgtctgctaatacttcttgaaacacgaaacatcaatatgtttatttataaattattactttttcatttttcttggaatgcgaattaaaaaacagtatgaatcacatcttctgaaaaaatcatgcactttgctctccacctataaaacaaaaatgtattaaatctactcacaagctgaataagtattctttaaagtaaaagaaaataaaaaaattcattgaaatttacttattaggagtcggtttcgctgaagttcgatccttctagcactaccattgaacggaaactaacagagctttggagctaactttgcttggcaacctgtcttcgtcactggttgcgtcattcccgattctaccaacttccacgatcttccttttctacagcttttccttctcgcgaaccaaccaaaccctatcgacagacgttatcggtgttagattcgcttatcgccgctgttcaagccccagtatttgacgctatcttcgcgaagggtaattaatatttcactcgttcgctttccgccaaacgctccgtgacatcagcaagaagcacctgacccaccagcttgccctaaatgcctaaaaataaaaaaaaataaccacttaagagtgactcaaagcgattgtgatatgtactaatcatcggaggatctgaggaggtgtgggccttgggctgttgcactcgcttaatcagagcagattgtcagcggcccgcttttaatccgcatcttctgtttattgctcgctttccacgagccacgcaaactgattgacggctgtctcgtggatgcaatttaagtgcaactggcgctcgtttggatcgacctcccaccgaagccccctccgcattgataagccctgagcctctgaccgcaaaagctaaaacgctcgcacactgaagaaaattctatgggttctatttataaaattaagcttattttatagaaaattctcttgtaataaaaattcacttttttcataatagacaactttaaatactttcattatatccctattcgtattttctgtcatttatttcgttgttactatgaagttattcacaacgaaagatatttcaagtaaaagatacaccaagtatctttaacccagatttatatataatatattagatattaaaccaatatgcaaagtatctttgagctagatttttatataatatgaatacatgatatgctaagcttatatgcaaagtatgcaaagtaaactgccatacaaagtatcttaaagatttatttatatctggtgtaaagggcaagatttcgatcacttgcagttctcgcacttgcaatcgggtttttccgcagtgtgtcacagtggcgatggccaatcctaatcaacagatagacgagatctagaaaagatgccgggttgtctgagtgactgagtggtctgagttgcactcgcagagccagctcaatttgcaatttgtggcgcggacctgaattattcagcagttggacgactgtatttacatgcgagtagcaagctgaaatgagctgccgtaagggttgccccaccccctgcacgtgtctcccggcgggggattcccttttcccaccccttgccagcgggctgccctcactgaacgctggaaattggaaatggtcacatacatgcagctgccgctgggcaaatgattgagggatccccgccccgcggaccagaaaataccaactggaaatgaggcgtcacacaagcatgcaaaaataaatctgcacggaatctggccgatctgcgatctgcgatccgccatccgccatccgccatccgcgattccgaagggggaatccaaggtcagtgtcattatgcgggcattcgtccgaaaagagaggagacacatgaaaagtggtttcccagcaattgtgtcacttcttttggctaaacgtgtgtctccgattgcctttggtgttgacaaattgcccagagttggatgcataaacggaactttctcctggttgctgcctgctaacgcaaggtgggcagacatttatcaaaatctgtcaattgctgaattcgtaatttgcagctgccacctgttcgcgccaaatgcaatcaatgcggttaattgcatttcgctaacatcttctgcaccatcagctatctgagatctgcgcagctctgatatcataattcgatcacgaggcttagttaattattccggacgactatcgtaccccttgcactttgatgttggcgacgacaggaaaccgaaattagagcagccctctctacaggctgtgtagtctggtgatgaatataaaggctttaacacatccaccaaatgccacttaatggcgaaaacgagaccaacttagaataaaccgtttgcaaattgagagaaatcagcgtctgacaacggcgaaaaatcttaaacgatgacaaatgttcaaccttgacagagaaaaaaaaagtccaacagagaacaatctcaagtttctgtcttcgagttcaactggaaagaaatgctgttctccacaactcgttctttcacactcgaacaaaaacgtatgtggaagaccacaaaaaattaaatcacttcatgctgcgatcgctggcaaaataaattgttatatatgtgtatttttagatttgtgcaaatcttttttatacatttcaattagcgcagctcggcagccacaatgctaaaatgaaaagtgtttagttgggcttttgtttggccatataaataaatatatacgggtttatgcaaatagacttagatcttctgggccactcgtttaaaattcaattcttttcatttcatttcatttcttttcttttccgctggcactgacatatacttttctatcgaattcgcaatattttctctttcgctggcgggaaaaaagagcaacaaactgatgacgccaggcaattaaaacatcaggtgattcgggtattttacctggcgcagaaaaagccaagctgaagctgccgcaaacgctaatgtgttgaccgcattaagacggcaaaacgccgagcaaaaagaggcaaaaagaggcaaaaagtaccgccaaagtcataagagatgacgtctaactatgggctgtgagtcaatatgctggatttgaatttggccaagccagcacagcacagacactcacactcattgattcattcagtcattcacagtattcattcaaaactagcagcgagcggcggcaatggatagacaaattagcatattctaattttcaactgaatccgatggttgacagatcggctggtaatatgtggtatatgtgttcagtgccatatacatataatgacccacattggcggcggagtacgccgtcaacattatcaataaaatgccatttaagcattttgcaattcaactgttcaatcaagtgcaaatgagcctaaactcaggcgtaacctgaaaaactcttacccatattaaggcgcgttcccgttttctttggaatctacaatacttttagcttgggttcacttcgcttttgcttttgccgagcagtgtttaattgatttccacgaatcgggagaaaaccaatcaccgggccatgcataaccgaaatatgaatatgtgagtggccaaaataccacataaaagccaaagagacgggcaaaaagtgcagggcgtaagctgaaattatgtgaattatgcaaaacgtgttggccaaaagcagaaaggcaaagtcaatgtaccacataatggtcattaaaatgggcagagcaatattgcgtatacgacaagtggccagattctgtacccgcggagataatctcgaaatacaacgcacaatttgaacttgacctacgaaatcagcggctatcaacaaatgggctgattttcgcttttcgggcaggcggccagaaaatgtttgctgccgaaaatcttgacattcaactaatgctcgactctccctctcgattgaattcaaaactaagttgggcaggaaacactcaaaataaacaaaaaccacaaaaaatcaccggcaaaagagaaaggcaggcaggcggaaagcagccttaaaaacacacctctcttgtttttctttctattttcgggctgcctcatgcaatctatgcaaacatttcacacccacacacggcccaaagaacctaaatctttgccattgcgagtgtaggaataagaaggcacccagatacaattgatgatggactcggatgtcaacgggtgttgattctgattagtgccaaacgccatttcaaatgagtgtttctgtcagagctgtgaggctgggaaagctatgagatcggtatttgaatggtaaaaccccagcaaactcagtatttctttgaaaagttttcttattcagaccagaatatttctggtcattaaaaatgttgccttgccaagtgatgctaataaaatgatgtacatatttattcaaaatattaaatatattttgattcaatatattatattacctacaaatttcatttgtctaggtaaaaacatatttaaggcacaaatatatattattagtctaggctacagtatatattttgagtaaagaaaagcctggcgataaagtcgttttgctgcggcttttcttgccacatgaatccattaaaaaaccaattaactaccgttcaaaagtttagtgattaatccgtaattgctatgtcgagttatatgggtggaaagttctccgctcatcgaaaaggaaacgctctgacggctggggttgacttttcattgaacttttctggcattcaattagaaacacgttaatgtagactgatcaatgcctcgtaattgtctgaagtttatcaataacaagttctatacggcttatatcccagagatcaaatcggctcagctggaagtcgcgccacgtagccataattagccaactcgagctacaatgttacttgtagtagatacagatacgaatacatctatcctgctgtttgtgcatactaatagtcgagttaaataaatatccacactctcgttaattggaaaaaaacgaacgaaaaaaggcatgcagatcgttctgccgcagaacttggatagtcatgagtttcggtttcgcttttcgttttcggcatcggatgatgcaattggcaaaatttcgtacttggctagttatttgaccaaattaacgcagctgtgtgggctgcgcttttcggaatcggaattggaattggaattggaataggaatcggaatcggtgtagcttttgaaatagattcgtgcgtcgaccttcccccaagtgaattgcatcgcattaacacatcgacgactgcttccgattaaactgaaaacgaaactaaggcgtactttgaggtaaaaattacttacacactgctcgaggtgagttttaaatgtattcgccgttaaacattgacaataaatctccagattgcgccataaaatatcaattaaatcatcctaactattcgctgtggcccgaatcggtctttagcccaagcattttgtggctagccgaaaggcatttgtacacagcatgctatagatgccaagacgacgcctgactcttgcgagaaattatttgccaatctgcacctgcgaaattcatgcctccgactgccatatcccccccttattatccgccgatcgctcagccgctggtttatttacactgctcatcgcgagttcaagttcaggcacagccagcaaattcaattatgctgtttgcctagcgacagtggtgcttactgatgatcactttcaaaggaatccgaagcggcaaatacttcagtctagtaataaactacatttaattgctatatgtcattatttgtcaatctgtgcgaatggaattccaggaaaactaaacgccatttcactgaaaggtgttcgacaggggaactgactcagctggctggctgatgtcataacaatgattataaaatttgcgaaattattaacgccaaatgacgtcagtagagtcaatcgaattttgggcaaaaacaaaaatccaaaaatggaaaggccaattgagagactccgtcatcgattgcaaaatgcgatctggaaattggctttaacttggatttcgccagcttcgttttgttagcttcctttaaaccagatatcaaagcagtatcgagtttggcccgggggatagtttcaagagcaagtgctgaccttcccgcaagttagccgtgtagtgcagtgtaattatagccactaacccattcacattcccgctggctgctgttgttgcacagaaggcgagcgtctggataaaagagcccatcagttcataccatctgattatgcacttcaagaaataaataagtacataagttttgcagataataatattggcacaaacacggtgagtgtaaacacatttcttcagccttgaacgtttcgttaaaacaatattttggtctgaagaatcttaattctgtgcgaaaaaagtactacattgtacactggtcgaaaggcattcataaaatatattttatagtacacaatatattgtttatttgcacttgagctagaactatgaactagatttatgataagttgattgtgttttttccagtgcacaatatggacactcctccagacaaattagcctgcggttagctgtggatgcattcgaagatcgcatgatcgtacagccgtttttcatggcttcgtttggcagttgacacgttaagagcacgcacgtttgccggccatttaagtggccccagcatcgcatcttggccattgccactggccagaagatggaggagccgataaagcggagagcggcatttgacagttatgaccacttgctttatttttagagccaaaaacggctaggccagttggcagcgattcgcaacagcagcacaaagcaaaagcacagtaaaagcaaaagcaaagcgaagcgaagccggccggcacccacggactggctaaaaacaacaaacgcggccaaaagcaactgaactggtttcggttttcgatgatgactcgcaagcccagttaagagctcccaaataaatatcccctttccgcgccatgatcttgactttgtttttgtttctgcttggggaatgccaatttgatgtttgcacaactcaattcgtaccttctataagacatgcatacgtcgatatccacggatcctctggccagatctgtaaaaatgaaatataaaagcggttaagatgacagttttatatcaaacgttcgagagtgcacattggagtgagttgcattggggagttttctatttctatttatctgcgcaattatttcttggctttgattttaattgggcgcaattaaagtcttaattgccggcccgtctaaattaatttttaacgaactttgcttcgccaatagactgtcattcagctgcagctgcctttggggttattaagctaatccttcgcgccgttgaatagtgaatagtgaatagtgaatagtgaaagcactgcccaacaataaagactatcctttgaaatagaaatgcaactaaaactgtcgaaaggtcaatggagttcaggcttcaaggctagaaaacatatagtttctgttatttaagagcagcataactttgacaattaaggcctgaatcaccataacccgctgattctcagggcgttgctcatccattgttagattcgaagagccaacaacctgttgcctgattgttatgcgacggacgtgaccgaaaatactgtcacgtaatccgcaaactcccacagaaatgttggtgccacttggcttgtgaatggaatggactggaaatgttcggactaatcgaagaggtctgaactcatcacaacatgcaaattaacagccattgatgaactggtcagctcgcgatctttggaatcttgcgcaggtggccaacggtccagagatcagaacagagcagaacagatgtcgagatcttggcaaactcttgtctgttgaacttgaattgttcgcagaagcgaactatttccctgagatgtttacttttcgaaaatttccagcagataaacaatctgttggcccattctgcgtcacaaatcccattccgttgaggaaccctccatatgccctagccggaattcctttcatttcagcgagtttttcacactatctactctctgcggcggctttttatcttatcttcctacatttgctaattatagatagggtccaacccaaaaaaaaaaaacacgaaacacagtcatgtgcacttgagccccgggatttgtgcctctcatttgcgtttgacaaaattgcggaacacttctctttccattttctagaatgcactccaagtttcaatctatgcgaggggtttcccaatgatattgttttgattgcgccccgataacagcttgtttcgccttatcgaaacacatttgttgctcatcccccttggaatacaactctagctgtgtatctaatggggacaaggttgacacatccaccgaaaatgggaccatgaagtgcactccgtgaattgtttccatggctttggtgggtttaagtgctattcctataatgcattcgatctcgtattgccttggatcgagacgaaatataacacctcgaaaatcgagagcccagacgcaaggcgccaattcgccagcaagttgagtcaaaatgacttgaacttgaaatacaagtcgaaataccattggtagaacttgatgtttccgttctagatatgtttattggggagatatgtgtacattacaggaaacgatgtatgtaaatatttccgataaattgccgaacttcagggtatagataagtaagtgtgtctgcgccactcacagatactatatacacacgggcgggcacccaccaacttggactttttgcctggctggctgactggctgggcagcgaactgttggccataaagccgatttctggaaattgcctggaaacagtttcgagttcgcagtcgcacacctctgtgaattatgcgctggaaattagcaccttggcttggaggtggtggagcaaaagtcggaggagtattgcgcaagagctggagtttacagctccacgcggagctggacgatccaccttcgcagttttcgcaactcgggatcacatctctatctccaagttgattgataatctcattacgcgatgatgttgcatgactctacgcttttagacctgacaaacagcgccatgtattattaagatttctttttataccccatttcgtgtgcaagtgattcaccctgcgttgaagtgggtggcagtccatgggcaaccacaaacacgggggaaaacataacaaaatgggaaagaatatagccccgatcgctaacctatccgtatctgaatgaatcaactgcctgccgagtgcggtttccaatggctttacgtaaacgattccgaattgcagggcgctaaaagctcacatctagaggtgcttgggtgggtttacgttttaactctcatgtgtatatgtacatcacatatacatcacgtatggccagacggatcggatcggatcggatcggaccagctgtgggcttggggtggctggaagccaagtcgcgtaggtagcggagtgtctggcggagatttcacatgaatgcgtgctgcttctgtctctcgtaataagtttgcaatcggtttaagtgcccatgcccgagggttaagagagtaaccattttattatagtttactcatccctctttcatacttgctttttggcaattatataactcggatggattgggaaatagggtcaagtttgccactgaaacccaaccgcaaatgcatatgtgagtaataaatgtcgaagcggttcggccagtcacttgcttcagtttcaaaaaccctgaaccctggccttttacattcgcatcgagattaatccaatcccttgcgaatcgagataacacacacacacagtagcgctatatttttggctagttcttatcacaatccgcagacagcgaggcttttactacaggttatcaaagcccaactcacagtacactagattttttcgcttttcacttttatttttcgaggtctttatatttccatacagaagatcacttttgttcaatcagatatgtgttttttatgcgtgagtacgtattattcgctgctagcactgtatttgtcttttgtcttttgtctttctgggtagagtccttcagcactcgatgcgatcgcagtgtctttcggtttgaactggcggccagagactggcgaagatcgcatccgccgagatttctcagactgcctgctatcacagaatgtgtcgcagccgccaaaaaaaaagcataagatgaggaaaataaaacaagaaaagatacaaaaattcgaatctcagaaggggagagcgcccaaaaacgccgagagggatgacaatgaaggcaaaaacaacagagcagcagcacgtcacacaagcaatttagactcgtaaatcgcccaatgcaagtatcttgatatctgtcagatatctggcggtttggtttcgatttgcgccctgtatccgaaagatttttatgcatctttttatgtaccactatttagcttggcactagctagttggcgagcgtgtgtggcaacggaaactatataatttttaattacctagacggttggagagttggaactcgtaacgctgccttttcggatcggcacttttttttcgctttttgttcagattcgcgcacacgcacccgacgacacgtctcgactttggagttgccccaactgaacaaagctcgatacctgcgagaatcgagtaccgtatagaacgtgaaccgaaaatcggggatcggagatcggagatcacacacgaccgttcgcggggagagcttagcaacgaatgaaccgctattggaacccccgattgcgagaagctacaaaacttcaacggagcgagagatacagatacgcgctcggaaagagcaaagcacatgacgaaagctactggttatgggtattcattcgaaggcaaatagagagaaggagagtgccaagcccgtggatacactgtaaatgtatctgtatctgtatctgtacctatatagagctggagaacacgtggataatcggcggcacacgcgctatagaat

SEQ ID NO: 6374 - DNA, 2378 bp, DROSOPHILA
ctccccgcgaacggtcgtgtgtgatctccgatctccgatccccgattttcggttcacgttctatacggtactcgattctcgcaggtatcgagctttgttcagttggggcaactccaaagtcgagacgtgtcgtcgggtgcgtgtgcgcgaatctgaacaaaaagcgaaaaaaaagtgccgatccgaaaaggcagcgttacgagttccaactctccaaccgtctagatctggccagaggatccgtggatatcgacgtatgcatgtcttatagaagataagacgccaagagaggaagctagaaggatccactgccagcgtaccaaacacaaatcatccacacagccatggaacgcgtccacctgaccgcctggttggccctgttcctcattgtggttgccaacgccacgcccactcccgctcgcacgcccaccggctgcccggcggactgcacctgcagcttgtcccagcacacgcacaagccactgtaccacctcaaatgcaacagcacccgtggtctgaggctgaccgagaagaccttccagtcaacggtgccggtgcactccatcgatctgtcccacctgaacctcacccgcttgagccatttgctagacaagctgccggagctcacctccgctgatttgtcgcataaccagctgaaggatctgggtcacctgggcaagggcctcaagcgactgaacctcaagcataatcagctcacctcggacaagctgaggaaactgccgcagcatctgcaggtgctgaacctgcagcacaacaacatcacccacctgccgctggagctgacccacatgcaccagttgcaccagttggagctgagccacaacgccatcaactgctcctgccagactctggaggtgcgcaactggttggtggaacgaatcgtctacatggaacaccccgttgtctgctcctatcccctggagttcaggggtcgctcttggctgcaattgaagcaggatgagatctgcaagaaggagaagtaccaatggttcgataccgaggagaacgagctgatgatgggcgaccagccggctgcagtttctgcagaacgcgaggatgaggaggaactaggaaaagactttttgcccattgttggaaatcctgcagccactgctaagaaggttcgctcgcctcagatcccgctgccttctgaccaggtggagggatccggagatctcagcgaaaccaatatggagcttaaattgcccgaagagaccgttgcagagcctgaagctgcggaatctcagttggtggatgctgcggcctcccccagtgtcctcgaggagcacatcgtaaaggacgaggacgaagatgacgagggttctggcagcggcggtggtctgctcatcattcccgatccctctaaagttaagataacttccgaggacgacatagatagcgatggtaagccagaggagagcgatgttagacctcttgagaatccagagaattcggagaatccagacactgttttctccaataaaattggtatctacgaaggcgaccaggaggaaaagaagcccgtggaagaagataatatcgtgccggtggtgatgaccaatttggatactggtctggagtccgatgtggttactgatgggccactggacagcagcaaggagtccgaggacatcctgaccgccaagataggcaagccaaaggacgacagcagcgccatctactatctgctggccgtgattggactaattgtagtgggcctggtcctctttgtggccatcaagcgttgcaagtacgacagcaatgcggccgcccgagatgcagaggcccagcggcagacggagctcctggacatggacaagaagcagctgggcaagccgctgcacaagaatggccatggcaacggccaggagcactctccactgatcggagagaagaccaaattggacgaggcacagattgtcaagaagccctacgagaacggagaggccaaggacggggctggtcagcagcccctgctaaatggcaacggttcggccaatggaggtaccaaagaggcacccgaaaccggagagcctgccgcccatgaatactaccccatcacccctcgctaccccacaccgcaatcccccagggcatccaagtacgcacagcaacagcagctcgccgagcagaacaacaacgaaccagatggcgcctacctgccctcgtcgcccaagtccggaagatactcacccgtctattccccggagacgggtcgcgtcaagatcaagctgacggagaccccgaagcccaagacccccatgctggtgacgcgcagcaagtccaatgccggggacatcatcactacgcccgtcagacccatcgaacccacccaccaggtgatcaatggccactga

SEQ ID NO: 6375 - protein, 677 aa, DROSOPHILA
MERVHLTAWLALFLIVVANATPTPARTPTGCPADCTCSLSQHTHKPLYHLKCNSTRGLRLTEKTFQSTVPVHSIDLSHLNLTRLSHLLDKLPELTSADLSHNQLKDLGHLGKGLKRLNLKHNQLTSDKLRKLPQHLQVLNLQHNNITHLPLELTHMHQLHQLELSHNAINCSCQTLEVRNWLVERIVYMEHPVVCSYPLEFRGRSWLQLKQDEICKKEKYQWFDTEENELMMGDQPAAVSAEREDEEELGKDFLPIVGNPAATAKKVRSPQIPLPSDQVEGSGDLSETNMELKLPEETVAEPEAAESQLVDAAASPSVLEEHIVKDEDEDDEGSGSGGGLLIIPDPSKVKITSEDDIDSDGKPEESDVRPLENPENSENPDTVFSNKIGIYEGDQEEKKPVEEDNIVPVVMTNLDTGLESDVVTDGPLDSSKESEDILTAKIGKPKDDSSAIYYLLAVIGLIVVGLVLFVAIKRCKYDSNAAARDAEAQRQTELLDMDKKQLGKPLHKNGHGNGQEHSPLIGEKTKLDEAQIVKKPYENGEAKDGAGQQPLLNGNGSANGGTKEAPETGEPAAHEYYPITPRYPTPQSPRASKYAQQQQLAEQNNNEPDGAYLPSSPKSGRYSPVYSPETGRVKIKLTETPKPKTPMLVTRSKSNAGDIITTPVRPIEPTHQVINGH

SEQ ID NO: 6376 - DNA, 5872 bp, DROSOPHILA
cagtttgcgtgtctgcgagcctgcatttgaaggctgtgcagcaaaggcatctgacatggaggcacgaaggaagccctgtgtgtgtgtgggtgtgtgttttcggcggcgccattgtcgataataacgatggactgagccccgggtcgcaggctcttttgtgcgcgtaacatgtgtcaattacaggcgcccacacccacacactcgcacactggcacacacgcacacacacagagagcgagcgggaggaacaggagcagccggcacgtccagcacacacccacacacgcatatgcgctcacttagtttcgctctcacaccgtcgataactcaaaaagctgccaaaaagtgtgcgcacattttttatatgcgccgtccgaaagtatgcacatattttttatatttgtgctgccggcatttgacagctaagcgacgctgccctatgttaatttattttcacacagcatttgctttttgtttgcatgtgcgtcgggaaggggggaaattactttccgcctctgtttttgttggcgaataaaaaatcttaattaaaaaatttcgaatcgctgtaacaggtggaaaggccagctgctaagtagaacggccaaactttgcctctccgagagatttggattgccgggtgctataaattagcagtttccacttgttacgtagaaagctattatcaacttattatttgaattacttctttctgtatatagttgcgatgaaatggggtttgtcattaattattccatcagattgattgtgaaagctaacagcgatctgtaaacttaacagccgttaagcgatctcctataatgatcatcatcatcatcatcatcaagttcttcactgagttttggaggctgttcgtacatagctctcctctcattttcctcactcttttgtggttctattgctctctgccgctctccaacgcgaatgtctgtggctataaaaaccgggtccccaccgcagcagcagttatttctccgatccgacgtcgggtgaacagatcagtcgtgccgcaactgcagctatatctttacctatgtgttctaattttccgtgccagtaaccgttctgatcgtgcgaataaaaagtatgtcacttgggggcgctgcactggcattgaaaagtgaattacattgatcgtgacatgggaatggaaaatgtcgccgagccatgtaaatcgtttggcctacccgtctaccagccaaccaaccaatcaaccaaccaaccaaaacctgtgccaagaactgcgtgtgcgcagaagcgtttgggaaaactctgtgactggcatacgaaataagtcaaggtcttcagcataagaagacgccagaacataagtcatactggcgacttatagagatagcgcccatttcccatccataatcgcgggtagcaatgaactttgaagccggcacgtcacttgatagcttccttaacccatgtgggccccatgggctccgattacattacctcgccaattattcccctgtgcaaaacgtaactgcattattaacaagtgttccgaccacctttccattgttggcgcttcgcgataagccggcacaacaaagagcaacagacgccgcgatatcagttgagttcagttctgctgctcgcaccagggcaggttcaatgtctggcgcggttttatcgaccgattgcccactcagaggggtccacttagcgagccgaccaatctatgaaatcgcacagtttaatgaaagattattcacctagagactcgaaaaatttccatgcgcaaaggtttaaggctgcactttctgttgatatatataatgtcgccgtaataaaaacattcacttgggtcgtagatgtttgttgaaataattagccgttttcccacataaaacgctttaataatgatgtaaaagtaattagccgtttttccctaacgagatcactagataatattttttatgcccctttttatattggcttaaataagctgtagtcatcatcatagacagagggtagtgtaatgactacaataggtggggacatctggctttccatgccagtttttaaaataaaatttagaccccgtactcaattgccactgctccacttgggtccgaataaatgttttgagtgcatgaaggggattttcacagcctaagcacttgtcactcccccacagcccctcctaaaccacaccatccaactgctcatggcggctgataagaacttgcggcccacaagccatgtagtaaatcggtatcagacagcactatggtgcgcttatcactcagttactcgcaggcggttgccctaggcacaagtggaactgaaatcggaagggtggcatccacaaagtgctctatttggccattccctagctgtcactaatcatatccgtacgattgagcaatatctgactaactgtttcgatcatgtttgctttcaccccctgccctttgaagtgagcgagaacgagaagcgtcccgatctggaggatcaggatcaggatcagaatcaggagcaggctggcggcaggaaaatggagatcctgctggaactaaacctaaagcagaagctggccacccgactaggcaccatcctgctggccacagtgatcttcggcgccttttgctgggacaacgcgttggccagtctaacactgggagcagtggtggctctcctgctcagaaatcccaccttcgtctttgccttggtaatgaccgcgtccagggacctaaagtgggtatttgagtggctaatttcgcggagaaaccccccaacttccgttctcttttagggctttccagcgattcgtggccctcaacatctacctgctaagaaaggatcgcggcggattcactgtggcccgctgtttccaggaccaggccagacgccgccccaaaaagacatgcttcgtgatggacgatcgccatttaagctttgcagaggctctggagtttagccaaaagatagctggatattttagcgatcgcggcctggagaggggcgactgtgtggccctactaatggaaacgcgtctggagtatccctgcatttggttgggtctctcccagctcggggtaatcacagcccttattaactccaatctgcgcggggagtctctgctgcactccatcaaagtggccaatgccaaggccctaattgtgggcagtgaactcctggatgtgctggtatcacttagggagaaggagcagttggacgaggtgcccatctatcagtacacagatgacgaggttcgcggggtggctggacatgatcttttgccaggagctgtggacttggttactgctctaaagacccaaaagaaactggagctaccgagtgctgtctgtcctggagaagctcgttccaaattgctctacgtttacacctctggaactacgggcttgcccaaagcagctgtgatcaccaacctgcggttcctcttcatgtctgcaggatcctactacatgctcaagatgtccagcgacgatgtggtgtacgatccccttcccctctaccacaccgctggtggaattgtgggagtgggcaatgccatcctcaatggatccacggtggtgctgcgcaaaaagttctcggccaggaacttctggcttgactgcgatcgccacaactgcactgtggcccagtatatcggggagctgtgtcgctatcttctggccacctcctactcccccgatcagcagaagcacaacctgcgtctgatgtacggaaatggactgaggccacagatctggtcgcagttcgtccgtcgcttcggtattccgcacataggagaaatttacggcgccaccgagggaaactccaacctgatcaacatcaccaaccgagtgggggccatcggatttgttcccgtctacggatcgagcctctaccctgttcaagtcctgcggtgcgacgagtacacgggtgagctgctcaaggactccaagggtcactgcatcaggtgtcagcctgggcaagcgggtctcctggtgggcaaggtggacgctcggcgggccgtgagtgccttccatggatacgccgataagggagcctcggagcagaagctccttcgaaatgtcttcacatccggagacgtcttctttaactcgggcgacatggtggtgcgagacatactcggttacttttacttcaaggatcgcacgggagacaccttccgctggcggggtgaaaacgtcgccacccaggaagtggaggccattatcacgaactgtgttggcttggaggactgcgtggtctatggcgtgcaggtgagtttcagatatttccgatttctttttatttaagtttgcatcataaataattgataccttatcatcaaatggtggtcagcaagaaagaatggaatctggctttaattaccgtttaatagcaatctgaaatgtgtttatagatcgcatatataactattgtttcagtgtagctgagggaactacccatgtcgctcttagtcactgggtttctgggttgtgccatgtagataacaaaccacctgaaaccacaagccgcaaaccttgattttcactatcggcccgcatatctttgcagatcccccatgtggagggcaaggcgggaatggcggcgattgtggatccggagcgcaaggtggacatggattacctgtccgtggtgctgcggggcagtttgcctccgtacgctcgccccctgttcatccgactgctggacgagattccgcgcaccgccaccttcaagctgaagaaacgggagttggccaaagaggcgtatgacatcggccagctctcagatcccatatactacctgaatcgggacggtatctacagaccactcagtcaggagcagcacgagttgctgcgatcgggaaaggcgggactctgaggatagaggtcccttttgcgcccacaattgtattccagccaatcctctgtgtatattgcaaaacgcttgtctgtcccaatgtatttttaacgcttaaacaacgactgattccgaaagaccaaaatacctaaatgccgaaatagtgataaagttctttcgctgctggcccaaaatgccgggcgcgtttcttggccataaaatggcagcttaaccgataatgggagccaatacgttttacggccagaagatgctgctaccgccacaagatatatcgaaagtgttaaatccccaagattaagttctcgctcattggcagctgctgcagttgctgctgctgttgctgctgctacttttacagttgctgctgtgctgttgcaacattaacgccatttccgctcgcttgcggcagctgcgacttcgttggccgtcgcctaagataaacgatgtgcaaaatccatacaaaacaatggcaggagcaggaaggcaaggtcttgcaaccgcagcagcgcaacatcgtcgacggccaccaatatcgatgtcgatgtcgatggcgaaaaagttgtggcaggcaatcataaaaaacgaagaaatggcaaacaaagctgggcgccatttttaagggagcgaaaatggcgatggcgcgctgcttctgggatgccaaaggttcttggatggctaaaagttgttgcattcagttcaaagtgagtccttttcgatttcgctggatcgtaattggtatgatatttcacttggaatatatgcaagctttttagggtcctggaatgtgcttttaagataatgctataatgcctgattaagattacttgggccgccatacaaggcaaacgacaaaggtttagaaagacacaagcacttgtttcggcactgggggaaacttcagttttgcagggatcccgggattccaatacacaatgtaaaagccggatgcccaaaatacacataaagttgcagctgcagcagctgccgaactccccggcca

SEQ ID NO: 6377 - DNA, 2165 bp, DROSOPHILA
acgtcgggtgaacagatcagtcgtgccgcaactgcagctatatctttacctatgtgttctaattttccgtgccagtaaccgttctgatcgtgcgaataaaaatgagcgagaacgagaagcgtcccgatctggaggatcaggatcaggatcagaatcaggagcaggctggcggcaggaaaatggagatcctgctggaactaaacctaaagcagaagctggccacccgactaggcaccatcctgctggccacagtgatcttcggcgccttttgctgggacaacgcgttggccagtctaacactgggagcagtggtggctctcctgctcagaaatcccaccttcgtctttgccttggtaatgaccgcgtccagggacctaaaggctttccagcgattcgtggccctcaacatctacctgctaagaaaggatcgcggcggattcactgtggcccgctgtttccaggaccaggccagacgccgccccaaaaagacatgcttcgtgatggacgatcgccatttaagctttgcagaggctctggagtttagccaaaagatagctggatattttagcgatcgcggcctggagaggggcgactgtgtggccctactaatggaaacgcgtctggagtatccctgcatttggttgggtctctcccagctcggggtaatcacagcccttattaactccaatctgcgcggggagtctctgctgcactccatcaaagtggccaatgccaaggccctaattgtgggcagtgaactcctggatgtgctggtatcacttagggagaaggagcagttggacgaggtgcccatctatcagtacacagatgacgaggttcgcggggtggctggacatgatcttttgccaggagctgtggacttggttactgctctaaagacccaaaagaaactggagctaccgagtgctgtctgtcctggagaagctcgttccaaattgctctacgtttacacctctggaactacgggcttgcccaaagcagctgtgatcaccaacctgcggttcctcttcatgtctgcaggatcctactacatgctcaagatgtccagcgacgatgtggtgtacgatccccttcccctctaccacaccgctggtggaattgtgggagtgggcaatgccatcctcaatggatccacggtggtgctgcgcaaaaagttctcggccaggaacttctggcttgactgcgatcgccacaactgcactgtggcccagtatatcggggagctgtgtcgctatcttctggccacctcctactcccccgatcagcagaagcacaacctgcgtctgatgtacggaaatggactgaggccacagatctggtcgcagttcgtccgtcgcttcggtattccgcacataggagaaatttacggcgccaccgagggaaactccaacctgatcaacatcaccaaccgagtgggggccatcggatttgttcccgtctacggatcgagcctctaccctgttcaagtcctgcggtgcgacgagtacacgggtgagctgctcaaggactccaagggtcactgcatcaggtgtcagcctgggcaagcgggtctcctggtgggcaaggtggacgctcggcgggccgtgagtgccttccatggatacgccgataagggagcctcggagcagaagctccttcgaaatgtcttcacatccggagacgtcttctttaactcgggcgacatggtggtgcgagacatactcggttacttttacttcaaggatcgcacgggagacaccttccgctggcggggtgaaaacgtcgccacccaggaagtggaggccattatcacgaactgtgttggcttggaggactgcgtggtctatggcgtgcagatcccccatgtggagggcaaggcgggaatggcggcgattgtggatccggagcgcaaggtggacatggattacctgtccgtggtgctgcggggcagtttgcctccgtacgctcgccccctgttcatccgactgctggacgagattccgcgcaccgccaccttcaagctgaagaaacgggagttggccaaagaggcgtatgacatcggccagctctcagatcccatatactacctgaatcgggacggtatctacagaccactcagtcaggagcagcacgagttgctgcgatcgggaaaggcgggactctga

SEQ ID NO: 6378 - protein, 661 aa, DROSOPHILA
MEILLELNLKQKLATRLGTILLATVIFGAFCWDNALASLTLGAVVALLLRNPTFVFALVMTASRDLKAFQRFVALNIYLLRKDRGGFTVARCFQDQARRRPKKTCFVMDDRHLSFAEALEFSQKIAGYFSDRGLERGDCVALLMETRLEYPCIWLGLSQLGVITALINSNLRGESLLHSIKVANAKALIVGSELLDVLVSLREKEQLDEVPIYQYTDDEVRGVAGHDLLPGAVDLVTALKTQKKLELPSAVCPGEARSKLLYVYTSGTTGLPKAAVITNLRFLFMSAGSYYMLKMSSDDVVYDPLPLYHTAGGIVGVGNAILNGSTVVLRKKFSARNFWLDCDRHNCTVAQYIGELCRYLLATSYSPDQQKHNLRLMYGNGLRPQIWSQFVRRFGIPHIGEIYGATEGNSNLINITNRVGAIGFVPVYGSSLYPVQVLRCDEYTGELLKDSKGHCIRCQPGQAGLLVGKVDARRAVSAFHGYADKGASEQKLLRNVFTSGDVFFNSGDMVVRDILGYFYFKDRTGDTFRWRGENVATQEVEAIITNCVGLEDCVVYGVQIPHVEGKAGMAAIVDPERKVDMDYLSVVLRGSLPPYARPLFIRLLDEIPRTATFKLKKRELAKEAYDIGQLSDPIYYLNRDGIYRPLSQEQHELLRSGKAGL

SEQ ID NO: 6379 - DNA, 3896 bp, DROSOPHILA
gcactcactttccacgaggaaaattggggcgcccaaattgacagtataaggaattttggtttatttactcttttcactctattttctagggcccctgtcaagtgcacacagcaaggtcattgtaaatgtatttatttatttttaatatttccccaacccccacagcagtctatctttggtctggcctgtgccgaaaaccccaataaataagcgagagcaagccaaacaaataatttgttctgccgtcttagtttaaacaaaatttcgtaattgaaacagcgtatttatttttggcggcaaggtcgctgtcaaatcatttacatgtggggcggacgaacgcagcgccccaaattgggcccaccgttcatattctataatctatagagttagaacgttagacagttctttgttttaactgaacgaccaacttacgtttatttggtagttctggcataacgtatatatcttttttaaagttctgtaagctccaaattgtatgaggtataaattgtttacatcatttttgcgtatttaattatgacaaccaaaacaaaagaattatatcatatatatttcaataatcacattgatatatgtttgctggctgtttcaaccctagtaatagggggccgtgagaagaacgcctcagggtttctttttttttttgttttcggtaggctatcaaaattaaacggtaagttcttgtctgatcggtattcggacgcacatcagacgagaacttatcgcatctgtggtactacaaattttcttttttcgtccggaatacccaagaatctccctgttcaggcccgaaccgcccctgtgcgcatgtcgagcgacctacacacaaaaagcactaaacaggccagaatccgaatccgaacacgagcgcacgactcacccatacacacacacgcgcagacacatatagccactgactgactgcaccaccgaccgccgaggagttggcgcggttctcggtggttagttgagcgtttggtggcattgcgagcggacggagagtgattcggaaaagcagaatagctgaaaagcggaaaagctggccactgcgacaaaggttaagcagcagcgacaaacacaaaacgacaacaaagggaaaacgcatctaagctggcgcagagatcccaaaaaaaatacactccaaaaaccagcccagaccaacgcactttgggtttctttgttacgatctttttaacatcgagtcgaagcacgttggagtcaaaaaagtcttcgaattagtgcgcaatatttaacggaataacaagaaacacaacgaacgcgaaacgtgcgcaataatttgtttaaaatcaatgaagactgcaactgcgcaaaactgaaaaattgcatcatagccaacacagaacggggcagggaaaagtctatgagcgcggaaaagtggaaaatcaatagggggcagaataagtaaagcccgaataaatatagggggatccaaaaccaatcccatctaagtaatcatcaaaagtgcaagttcgctatgccttcccttttggaggcgctggagcgcaagtacttcgcagaatgcgaattcgagaatgcccaccaaccggaactccacaaacgaagcgacctgcccaatgactttacggtcaccaagtgcggcggacgcatggagttctccatcttcataccccgcctatccccgctgaccagtgtgccagccttgctagtcctcaacgactgtgacatcgattcggccggggacttcgacagcatccgggagaagtgccagcgggtgagggaactggatctggcccagaacaagctgagcgactggtcggaggtcttcagcatactggagcacatgccgcgcattgagttcctcaacctgagcaagaaccagctggccagtccgatcggcacgttgcccacggctcccacgatcaatctgaagagcctggtgctgaacggcacctacttggactgggcctgcgtggataccctgctgaagaatttgcccgtgctccaggaactgcatctcagcctgaacaactacaggcaggtgctgatcgatgctgaggaggcggaacagcggctgcaggaaacggaaacgccagaggaaaccgagcggcgaatcaccaaagcacatcctgctctaaagaccctgcatttcaccggtaatcccgtcgagcactggcaggaaatctgccggctgggccggctgtttcccaacctcgaggccctcgttctggcagactgtcccatcaaatcgctgcaggccgaggagagcagcgagacacatagatacttccccagcctgaggcttttgaacctaagttccgcgcaactggatagctgggcggccatcgatgagctggccaagtttagcgagctacgcaacctccgtgtgaaacactggcccctctgggaaagtctggagtgcacggagcacgagagaaggcagctcctgatagccaggctgcccaacgtggagatgctcaacggaggcggcaagatcagtagcgatgagcgcgtcgactcggagcgagcttttgtcagatactatatggacaagccggaggaggaacggcctgcgcgctaccaagagcttctgcagatccacggcaagctggatcccttggtcaatgtgagcctgaaaccagacaagcgggtcaaggtcctgttcacctacaacgatgtgagcgagagccggttcgtggacatctatctgaccgtcaacgatttgaaggtgaagctggagaagctggtgggtctggcgcccaacaagatgcgcctctactatctggatcaggactacaaggaattcgggccggaggagatgaggtaccccaacaagcagttgtacagctacaacatccagtcgggcgacgagatcatcatcgatgccaagaagtgaggcgcgacgtatgggctacatgcttccgtatctggagaggattaccattaacccgaaccgcccttcgtcccccgcctggtgctacaacttgtgatcttgtacacgaatcatttacatttactttactctactgttagtgccgttctgttctccgcagcgaacccctgtgtacatacgttctgaaaatggccaagcgagcattactgcgcacccacatcgtatattttaattattactgcctaacctaagccacacacaaaatacaaatacaaaccaccacaaaaaaaaacaaaacaaaaacaaaacaaaaaatcaaaaaaacaagcaagaatgcattaaacaattttaaaatttacccactctccgcgttttatggtgatgggcagcactttgcgctggggatcgctggaagataagatatgactcatagagcgaactcgaagcaccccaacacaggcacacgtccacggattggggatagtggggagctttcgcgatcccgttgtcgatagctgacttcagcactgcaattatctcgctcgaggggagctttgaaaagttgccggaaaagagacctgagaactggctctcccgcttcccacatacaattagctgaacaataagtatctatgatggttacacgtccacttaacacatttttgttatggacactggtgttcaaaataatagtgatgaaatgtctagtaaataattcgtcaacgatttaaataactctaaaatatttaatattttcacaaaattaaaaaaaaaattatatttatgttaaacattttataatattttgaatctgatatataggtatcttagatgtaagttataattcttatactaacatttatgtgatattcaaataaaatgctatgctcgtactattattttgattacaactacatgatattcaccatttagcgggtatttatcacgttctggccagtgaaatcacgattatttgctttgctttcatctaaagctgtttatg

SEQ ID NO: 6380 - DNA, 1896 bp, DROSOPHILA
tggcattgcgagcggacggagagtgattcggaaaagcagaatagctgaaaagcggaaaagctggccactgcgacaaaggttaagcagcagcgacaaacacaaaacgacaacaaagggaaaacgcatctaagctggcgcagagatcccaaaaaaaatacactccaaaaaccagcccagaccaacgcactttgggtttctttgttacgatctttttaacatcgagtcgaagcacgttggagtcaaaaaagtcttcgaattagtgcgcaatatttaacggaataacaagaaacacaacgaacgcgaaacgtgcgcaataatttgtttaaaatcaatgaagactgcaactgcgcaaaactgaaaaattgcatcatagccaacacagaacggggcagggaaaagtctatgagcgcggaaaagtggaaaatcaatagggggcagaataagtaaagcccgaataaatatagggggatccaaaaccaatcccatctaagtaatcatcaaaagtgcaagttcgctatgccttcccttttggaggcgctggagcgcaagtacttcgcagaatgcgaattcgagaatgcccaccaaccggaactccacaaacgaagcgacctgcccaatgactttacggtcaccaagtgcggcggacgcatggagttctccatcttcataccccgcctatccccgctgaccagtgtgccagccttgctagtcctcaacgactgtgacatcgattcggccggggacttcgacagcatccgggagaagtgccagcgggtgagggaactggatctggcccagaacaagctgagcgactggtcggaggtcttcagcatactggagcacatgccgcgcattgagttcctcaacctgagcaagaaccagctggccagtccgatcggcacgttgcccacggctcccacgatcaatctgaagagcctggtgctgaacggcacctacttggactgggcctgcgtggataccctgctgaagaatttgcccgtgctccaggaactgcatctcagcctgaacaactacaggcaggtgctgatcgatgctgaggaggcggaacagcggctgcaggaaacggaaacgccagaggaaaccgagcggcgaatcaccaaagcacatcctgctctaaagaccctgcatttcaccggtaatcccgtcgagcactggcaggaaatctgccggctgggccggctgtttcccaacctcgaggccctcgttctggcagactgtcccatcaaatcgctgcaggccgaggagagcagcgagacacatagatacttccccagcctgaggcttttgaacctaagttccgcgcaactggatagctgggcggccatcgatgagctggccaagtttagcgagctacgcaacctccgtgtgaaacactggcccctctgggaaagtctggagtgcacggagcacgagagaaggcagctcctgatagccaggctgcccaacgtggagatgctcaacggaggcggcaagatcagtagcgatgagcgcgtcgactcggagcgagcttttgtcagatactatatggacaagccggaggaggaacggcctgcgcgctaccaagagcttctgcagatccacggcaagctggatcccttggtcaatgtgagcctgaaaccagacaagcgggtcaaggtcctgttcacctacaacgatgtgagcgagagccggttcgtggacatctatctgaccgtcaacgatttgaaggtgaagctggagaagctggtgggtctggcgcccaacaagatgcgcctctactatctggatcaggactacaaggaattcgggccggaggagatgaggtaccccaacaagcagttgtacagctacaacatccagtcgggcgacgagatcatcatcgatgccaagaagtga

SEQ ID NO: 6381 - protein, 459 aa, DROSOPHILA
MPSLLEALERKYFAECEFENAHQPELHKRSDLPNDFTVTKCGGRMEFSIFIPRLSPLTSVPALLVLNDCDIDSAGDFDSIREKCQRVRELDLAQNKLSDWSEVFSILEHMPRIEFLNLSKNQLASPIGTLPTAPTINLKSLVLNGTYLDWACVDTLLKNLPVLQELHLSLNNYRQVLIDAEEAEQRLQETETPEETERRITKAHPALKTLHFTGNPVEHWQEICRLGRLFPNLEALVLADCPIKSLQAEESSETHRYFPSLRLLNLSSAQLDSWAAIDELAKFSELRNLRVKHWPLWESLECTEHERRQLLIARLPNVEMLNGGGKISSDERVDSERAFVRYYMDKPEEERPARYQELLQIHGKLDPLVNVSLKPDKRVKVLFTYNDVSESRFVDIYLTVNDLKVKLEKLVGLAPNKMRLYYLDQDYKEFGPEEMRYPNKQLYSYNIQSGDEIIIDAKK

SEQ ID NO: 6382 - DNA, 8246 bp, DROSOPHILA
gggagtcggggattcgagttgcatacctgtgcattctgccggataaaattagaacgtgaaagtcgctgcagttgacagcgtaaaaatgtgtgaacttaggaacaggaaagcgacggcggggtgccacaatatgcaactatatatgtgggtttctccgattttctgccgccagtgcatgaaccaatgcgaaattaataacgaaaccgaaaggcggctccaaattacacttgccactgacttgggctccctgcgaccccacacctttggcaaaacttttccccaacttccgccgattgatgcataaactttcgaattgccgaaaatgatttgagaccaccccatggcctccccccccccccctactttgaacatatttttagcccagtcataatacagtcactattttattggtacaaaacaacaggcactactcgaaagcgagtttttcgaatatgaagatatggcaaagtttaataatttttagaaacatttttattaaattacagctcaaatgcctcagtaatttctcaaaacaacaaacgataaatgaaactttaaaaattaaagttcaatggtgtaagggagtgagtcaaaggcaaaattagtcaactgtttttagtcactaatttgattacgatttcaagcaaaataactgaaaagattggatatcatgaagtaacttgcttaaaaatatgattgaataataatgacagctgagttaacttattgtgttcaacttgcatttttgttggatcccaagaggagctgccatgtggcgagttttaagctcgataactccgcattggccccactgtgcgcactgtggctgtttgcgtatctgtgtgcgtgtcggtgtgccggtgcctcggtgtgtgagtgcgatcggccgtctcgctctggccgcagcgtcggcactcgagtcgcagtcgactcaaagtcaccagaacatcgtcgacggactcgagttttgttccgccgatcagttgtgtcttgtgcgttgtgcggtgaagttgcgccttcgttctgaaacctaataagctgagaatcagaacctctggacatctgaacgtctgaaaatccagcagcagctactcggaccgtgcggtgcatccttctccagactgagactaagatccgattccagccttagccttcgaccccacaaatcgccgctttcaagatgagagaaatcgtgaacctgcaggccggccagtgcggcaaccaaatcggcgctaaggtaggtctcgtcactagtctcttttccaactcacattttctcgagtcggccgatcgccgatttctggtggcacttaatttattcagattgcccgaaaacgtttttcaatgagtttccaaaatgatcggctgcggtgcgcagttcgatgtcgccgcctttttcagcgcattcagcaattaaagcgaaagaaaattaacaaaaaaaaaaacaagcacagatacgttaaataaaaaatgcaaagtgcaaaaagtggacgttgaaagaaacttattttgagctcgtctggcactcgatatgccctttctgcttcgcaaaattcgctcaagacgaagaaaaaaagaaaacgggttgggccggctgcagatcacgaaaagtgattcatggcaaaccctgtcggggaaattgggcggggaactttgggagggagaattgtggctgaggcgcaaatcagcgaggaaacttctggggacttttgcaattttttgacgccgagaagggaaatctcttgaattatctgaccggagaaatcttttcgctttgcttgagtttcctgcgctccaaagaaaccacaaaaaatgcaataaaagaagcaatagtatgtaaagaaagctttatacgttggttgggcaatataacttgatttcagtagcaaactcactggagaagtaactgaagtccatcattaatatttatgaatataatgtacacagttatccaatttttcccgaagctatatacaaatatttacaagaggctttcccaatatgaatccaactgcagctgttctaatctttcctagaattacgggtagagtatccgatgagcaatcgtgccaaccaaccactactgggcttttatcaatcgaagtgagcgagaaacggaaactcgagtaatgcaaacgatcggagcaattgggttctgacttatatataggatagatataggatagtccactcaatccaatccaatcagcacgcccgaaaaaccaagtgcagttcttcgcgaaaaggaggcaggcaggcaaccggcttttgcgaactcagttgttttttggcaataccagtttggatcgatgtgtttcttacaagtggcaccccgctgagtgcatttttctgtggcatcaatgtcaatgccacagactcgattcgctcccaatcatcgtccaattgcaaagtgggtcgctgataaaaccacatcatagtacactcacgaaagataagcccgcggatcttaatcatttgatatgagtcaatttgtggagaattagacgacgcagcgactgactagtcagcagcttcaatttaaaagcaaactcgcctgccttttcggcttcccggaatttcggcaatagcaatggttttatggggcagcgctcgtaggtatatacataagtactgaatgagatatgatgggaagtttgtctggtaatttgagcagcgaaacccccccggtaatgtgagaccccaaaaaaccggcaaactgagaaagaaacaactaacagctgagtggacaagcggattcttgaataagaatggcaaagaatgccagcccgaaaaccgcacaagtgcaggagaggaaggaagtgactcaccggacctgtcctgtatacaattacaggatatcggggttgcccactggccactgactttgtgtgcgaatccccttttggctcgagccacgacgatgaatgcatactaagtgtgcggcctccgagattaagtaggatccaagtggccgtccagatccgaagtcaataaacccggggctctctttcggaattcttatcgccttcctccgtcgtttttgacactccacagcagctgcgggaaaagacaaaagtcaagagtgagtgtgggtgcgggtgcggggcacttcaatcgaagaattttcctcctcggatgccaaatgctttatatcttgtgaaaatagcactctcttcgtctctttgcatagccagcgatcctctgcagaaagaagatgggctccaagttcacgctcgagtgagtctcgcatagacgaagtgcagtcgcggattgggggagtggaggagtctctggctcccagacatgcaacacttaatgagggcgtctcgattgccagtcgccagatgatcgcatgctagaggcgtggccaggggcggcggtcccgtctccaaagggggcttagaccaggccagttgcagttactagtagactccaggcagcagagcttagctttgcgagctaattgcacaaattgaagattggactcgccagcgaagctgttagaacagatgttgtctattttcgtggatgaaagcccggaaaactaattgtggaaaagcatagcaatgaattccactttgataatatgaaggaaagaaacatatactcctaggatatactatcttctcatacaaccatcttgcttggggcttttcaagctacagttggccagttccatttgtagaacgttttccatcacaagcaatcaaccttacgttccgattcgacacgagttttcttaaccaaattgaattctcgccaccgatcgtgttcgcccgaaataaatctggccgaaaagccatcaatctataattgcaatctaactgtgcctcggtttatacctccaactgccgttcaccgaaaaggccgacagttttccgacaaagccattatctggcaaatgaaaatccgaggtggagcattagtcgaatgtaaaagtaaagcgatcagcgatggtcgtgcccgcaggggggagaagtggaaatggggggcaggaggggccgtgaaaaacgacttttcacttcaacagttttgtgtgctaattcggttttcatatttgctgctgccgcgtgtggttttgttttctgtttgcgcggccttataagccgcgctttgttgttggagcttcataattgcagcggccacactccaattaaatttgatgatcttgctaagattgcagttgcctgagattcacttcgttgatgtagtttccgcccctctccgctgggccgtaaataaacaaagaaatgcagacgccatgggtagctccactgctccttctcctcgcagtcagatccccatccccatctgcaaccccatccccatccccagttcccagtgcctttgtttatagtcgcacacgtcaagttcaagtgccaaagggaaacaactcagacagcagacatcgctaacatttttattatttcccctattcctcgccggagaatctcggtgactgttgccaagccagccgcgtttcgctccgttggagaggccatgctgatccccaaaaccgatccccaaatagtcgcccaatgatccccggaggcgcccaaatttggttcttgttaaacgcagcacaacaattgcagagcacttcctcaataaatcgccgcgatggctgtgtatccatgagatacgtaatttatcgcatttcgatcgggtcactggatgggaagggggatgtctaaggaggtggccccatctaatggtgggtcattggcctgcagtctctaattcttggcccccgatgagtcagcagtcgtgtatctctcacactcccatcccatcccatcgcaacccattccattctgctctgctccgctatttttaaatgcatttctccccaggagcggcgtgtcgtggaaattttgtcccatacagtgagaagagggacagggttttttatttaatttttaccagcccggacgcattttttaaatttagcactaaatcagggcatgttcggcggcgtccaaaactgacgtttgaaaaactaaacataaattcggttttcccttttttttcggggcaatctgtctcacttttgactgcgccatcggaggccccctatatggacaggccaggccgtccgcatccgcatttagcccatatatatactcgtacttgtgtatttttccaaacctcaaactttatgggctgcggctgcgccttgttgtttgtcacattgtcacattttcacatcggaggaggcaggaacagagatttctagaatggttcttggggtgcctctctatgttttttttttttttttggattttgggcggattctgtggctgcggccatatgtcagggctcaacatgaactctgacatggctgggtgggcacaattactcaacttgatgaacggctccgggaatatttagtgggtcttcgtgtcgactaaagaatccgcaatcgccaagtgctccgctgggttcataaagatatcatatgtgttggccgataaggatgaaagatctccgctggagtggcggataaggagctgtcaagatgcgggatgcagcttcttatctcaatggcgtatattatgtacatacgtatatttatttctcagaaacatggcaagttttctttgaacgaagcattatttgatgttcagggaatttgctaattggtttaatagactcgagcttgagaaactcaaactaattacttctaatcaaacgagtttttttacttttatccaataaatatgactttcttgtatatgcaattcgaatgagttatcattctaggatccagctttgagtaaaacttcctaacacacttcctaaccttttgctttcccgcagttctgggagatcatttccgaggagcacggcatcgacagcaatggcatctacgtgggcgacagtgatctgcagctggagcgcgtcagtgtctactacaacgaagcatcgggtaacactttgccatgtcattagatcgcccaaatggttttcactaatcgcatcccctttcagcagtcacgcggtcgtcgggtggcaagtacgtgcccagggccatcctgctcgatctggagcccggaaccatggagtcggtgcgttccggtccgtacggacaactcttccggccggacaacttcgtgtacggacagtcgggagcgggcaacaactgggccaagggtcactacaccgagggcgccgagctggtggacaatgtcctggacgtggtccgcaaggagtgcgagaactgcgactgcctgcaggttggtacttttggatgagaacgtgttaatctggtactgattccgtatgtctttagggcttccaattgacgcactcgctgggcggcggcactgggtccggaatgggcaccctgctgatctcgaagatccgcgaggagtaccccgaccgcatcatgaacacctactcggtggtgccatcgcccaaggtgtcggacaccgtggtggagccctacaacgccaccctgtcgatccaccagctggtggagaacacagacgagacgtactgcatcgacaacgaggcgctgtacgacatctgcttccggacgctgaaggtgtcgaatcccagctacggagacttgaaccacctggtctcgctgaccatgtccggggtgaccacctgcctgcgtttccccggccagctgaacgccgatctgcgcaagctggcggtcaacatggttccattcccgcgtctccacttcttcatgcccggattcgcgccgctcacctcgcgcggatcgcagcagtaccgcgccctcaccgttcccgaactgacccagcagatgttcgacgccaagaacatgatggccgcctgtgatccacgccacggtcgctacctcacggtggccgccgtcttccgcggccgcatgtccatgaaggaggtggacgagcagatgctggcggtgcagaacaagaacagctcctacttcgtggagtggatcccgaacaatgtgaagaccgcggtgtgcgacatcccgccgaagggcctgaagatgtcctcaacgttcatcggcaacaccacggccatccaggagctgttcaagcggatctccgagcagttctcggccatgttccggcgcaaggccttcctgcactggtacaccggcgagggcatggacgagatggagttcaccgaggcggagagcaacatgaacgacctggtgtccgagtaccagcagtaccaggaggccaccgccgacgacgagttcgacccggaggtcaatcaggaggaggtcgagggcgattgtatttaatggtgtggccagaggaatgaggggcgtgcgtgacggcaggggggatagggatgtccgctttctgcgcggcatgcgccaccagctggcggccaagcactgcagcatcctgtgacccccgccgttggacacacacacagtcacagcagacgcagaccacacaccaccacaatcatcacacacggacaggaaggacatgcagacgaacaggaaggtcaagcgtagttagaacatcaaacggaaatgttcccaagcccatgcttccgctactccccatcatccagctcatccatcgtcatccatcatcgcccatcccgccgcatcatctcacatctcacatctgacatctcgcatcttcatctttttgttcattttcggcacttgtcacctcctctgcgctatatactttatactatactatactatataccatatacacactttacacggaggcacgtctatcgcatttctcgcagccattttcacccgctttccaacccacccaccaccacccatgtcactccattcataaccccaagttatcccacgtcattcttatactactatttatatcgcaacgtcagcagaaggaccacaagtatctagtattgcaaaggatatcgaatttatgcagaaatctcaaaacgagaatgtccagcgtctaggaagtcggcactcaagacttggcggcacttacgtttagggctatacgataaacgagctcatccaaagataatcgaacgacaactctcatgagatcctctataaaaggcaatttctgaaaagcatctgcaattgtatttacataatcttagggcacaatctattcactttgtattcgtgtgcagtacttctcttgtagttttatatggataaaaacatttgtacccaataaataactaataataatggcaaacatttttgacaaataataaatggaatttatttaaaatttacaacattgtgtttctgcttaaaagagagagtcatgtatataacttct

SEQ ID NO: 6383 - DNA, 1542 bp, DROSOPHILA
tgcggtgaagttgcgccttcgttctgaaacctaataagctgagaatcagaacctctggacatctgaacgtctgaaaatccagcagcagctactcggaccgtgcggtgcatccttctccagactgagactaagatccgattccagccttagccttcgaccccacaaatcgccgctttcaagatgagagaaatcgtgaacctgcaggccggccagtgcggcaaccaaatcggcgctaagttctgggagatcatttccgaggagcacggcatcgacagcaatggcatctacgtgggcgacagtgatctgcagctggagcgcgtcagtgtctactacaacgaagcatcggtcacgcggtcgtcgggtggcaagtacgtgcccagggccatcctgctcgatctggagcccggaaccatggagtcggtgcgttccggtccgtacggacaactcttccggccggacaacttcgtgtacggacagtcgggagcgggcaacaactgggccaagggtcactacaccgagggcgccgagctggtggacaatgtcctggacgtggtccgcaaggagtgcgagaactgcgactgcctgcagggcttccaattgacgcactcgctgggcggcggcactgggtccggaatgggcaccctgctgatctcgaagatccgcgaggagtaccccgaccgcatcatgaacacctactcggtggtgccatcgcccaaggtgtcggacaccgtggtggagccctacaacgccaccctgtcgatccaccagctggtggagaacacagacgagacgtactgcatcgacaacgaggcgctgtacgacatctgcttccggacgctgaaggtgtcgaatcccagctacggagacttgaaccacctggtctcgctgaccatgtccggggtgaccacctgcctgcgtttccccggccagctgaacgccgatctgcgcaagctggcggtcaacatggttccattcccgcgtctccacttcttcatgcccggattcgcgccgctcacctcgcgcggatcgcagcagtaccgcgccctcaccgttcccgaactgacccagcagatgttcgacgccaagaacatgatggccgcctgtgatccacgccacggtcgctacctcacggtggccgccgtcttccgcggccgcatgtccatgaaggaggtggacgagcagatgctggcggtgcagaacaagaacagctcctacttcgtggagtggatcccgaacaatgtgaagaccgcggtgtgcgacatcccgccgaagggcctgaagatgtcctcaacgttcatcggcaacaccacggccatccaggagctgttcaagcggatctccgagcagttctcggccatgttccggcgcaaggccttcctgcactggtacaccggcgagggcatggacgagatggagttcaccgaggcggagagcaacatgaacgacctggtgtccgagtaccagcagtaccaggaggccaccgccgacgacgagttcgacccggaggtcaatcaggaggaggtcgagggcgattgtatttaa

SEQ ID NO: 6384 - protein, 453 aa, DROSOPHILA
MREIVNLQAGQCGNQIGAKFWEIISEEHGIDSNGIYVGDSDLQLERVSVYYNEASVTRSSGGKYVPRAILLDLEPGTMESVRSGPYGQLFRPDNFVYGQSGAGNNWAKGHYTEGAELVDNVLDVVRKECENCDCLQGFQLTHSLGGGTGSGMGTLLISKIREEYPDRIMNTYSVVPSPKVSDTVVEPYNATLSIHQLVENTDETYCIDNEALYDICFRTLKVSNPSYGDLNHLVSLTMSGVTTCLRFPGQLNADLRKLAVNMVPFPRLHFFMPGFAPLTSRGSQQYRALTVPELTQQMFDAKNMMAACDPRHGRYLTVAAVFRGRMSMKEVDEQMLAVQNKNSSYFVEWIPNNVKTAVCDIPPKGLKMSSTFIGNTTAIQELFKRISEQFSAMFRRKAFLHWYTGEGMDEMEFTEAESNMNDLVSEYQQYQEATADDEFDPEVNQEEVEGDCI

SEQ ID NO: 6385 - DNA, 18167 bp, DROSOPHILA
cagaccaaaagtatgcaaactgacattgttttttgtaaagcgcctgcgaaaccaccgaggctaagaaggcagctccaaactccagtcgaaagtgaggatcattgcagtttgagtttgggccaactttgtcagctacagctacagtacgataataagcgccatgaggaggaatcccagaggattttaatgcgagagaaggaaagggttcagaacacgcccccactaaccaagcagccgcgaaagagacgaatagccccacaacctccaccgaaacccccaccaaaaccgagaaaaattcgtactgagaaaaccaccaacgatgaccactgtgcgttcattgagcagctctttttcgaaacaactgaggcaaaaccatcggctacagtggttgcgggtaagctcagtgccggaaaaaaacacacgatttttgccctcgacgtcgctgctttgctaattaataccctcaatattttaagtactgggtatgttgggtttattgcagggtacgaaaaagcgaaaccctattctgaataggcaaataataaaatgaattcttcattgacgtaaattcaatttagataaaataaataatattactatattttcgcaatctagtccgcagctgttccgatctctaaacgcaacgaataattatagtaggaaaagtatttaaaatacataccttaaaaagttcatttccaattaagttgatttctaagttaattcttagttgtatcattatcgaaggtattcaagctgtcgatcatatctcgtgtgatctttttcacgtttctgctctgctttcgtttcatgtaactcgagcttaagaccgtcaacaaaaagcatacataaatgcatatacatatgaatatatttctctgtcggttctctctctctctctctctatatatggtcgctctctttctccgcttggtgtgcggcttttgactttccagtgggttttaattccaaaccagttggttgttagtaacgctttgaactcgcttccgcgcagatcggtccatgttgaaatcgaaaaacgctctggaaaatagaaaagttgaatgtaaaacaaatagaacagaagggcaattgcgagtgcagtgtgaaaaagtgtgaaaagtgtctgtttttgaggaaaagttccttgccaatgaccggattagcaatctacaggtgtttacatgatgttcttctctgctcttttattatctgggcaaaggggagtacctttttctttgttatccggggttcatcttggcagttcggcttttgttttgttttcaatttgcctcaattgctcatggacaacaaattaaacaatttacttttgaaagggagacggcaactgacgccaacgctttttattttacttttttatttgtgatacccccatctctccgcgagcaaaaccagtttttgggttctgctgtgtacaattttctttgtttaccttttggggtattttctcgaacctttctcattttcattttcatttgccccgcagcagacacacaccttttccccctattttttttttttttttttttttttttgtatttgaccatttcccatatagattttcataattttgcggctttccagttgtttctctcttctcgttccaagcgctctctttcggcttccagtggcgccttgtttttatttacttttgtttaattattatttcttacacatgtcgcctttttgtgaatgagccatcgccgtcgcggattaatggcacataaatcatttggagccgcagttggcggactgttttatttaattccaaatatttatgcagcgagctcatcgcaagttgccggcgaaatcgaaagacattttaataaccaattaaagaagtaaataatcataaataatttttatttattttaagtttttaacttaattccattgatttttctgcagaccatatctatttccccacaactatctgtttctctatctcgattgtctatttctctactttgccataacacttttaattgctaaccgaacgtaaagacgacgtggtcagtttggattgcaccgattcgctagaataccacaactgcagcagcgacgagtgctgttatgcctcgaatgataccctaaccgagcgtcaaaatcgggagttgcagcagcgtcaaaggcaacatcatcatcatcaccatcatattcacaatgcccacgaaagccatcaccattatccctacgatcggagatccttgtgcacgagttgttcaagcaatgattccctattcacagatcccgtggacgaactgatcatatcgaagcactatctaaatacagcagcgaaggaacataataatccgaaagccaaacgcgatcgtccactgagcgaaatcagtgtgacgtcggtggacaccctatcaccgaataccgcaaaagccgtgctcgagctgcagaaacgctgccgagctgataagttggcctgcctgagcctaactcgcgtcacctacctcagcatagccaatgatctgcaggaagtcgaggagccggatcgggccagcatattgcacgatacggatcttttggtagcacccaatagcccggcggaaagttcgccggacgaggaactcatggccttgcagctaggcaagaagttggcccaggttttgggcagtggagcgggctcacctttgacccccggcacaatggagccttgtgcagcgggttcgggctcaccgctggcaaatggagagctcttcaacgtctccaaggccaaaaaggtagagctacagaacctttcgtctcgattcacagccgccgtcacccaaacaccgccaggtgtcacgtcatccactcccaatgaatcaggtaaggattggtcaagtcaacctatgctcaagaggaactattaatctattaaaatagcatgctactgctatagcaatagcatttttgattagtaaaaaaaaaaaaccgaaaatgaaattattcaaatttaatatttctattgaaacaaaacagtgacgatgagtaaacaacaagttaaactaattgctttaaactaagctcttattaaagcttcttgtttgtcatatgttttttggcccgaggacatcagttaattaaattttaacgaccacgcagcaggcaaataaaaactattttagacaaaagatgtcattttaaactattgatagaatatgcaaagtgtttaaaaccatttaaagatttcggataatgcccattgttttgtgaaatctgataaaacaatagtgcatcgagttggcataaagcacttatgcgttaatgaacaaaatgcaaaaatcgcattgccaagggaatagaagtgcaaaaattaagtttaaataaagtccaccacatttaccctttaaaattgccaatctacacgttttgttggcccccacttgtagccatatgtgtgctccagaaagtggtccttcagcccaaaaaaaaaaaaaggaaaaaaacggaacagggagacctgtctaaaagcttgtccctttttttggtggagattgttgcttattccggctctgcgccaatttcaaaggtaaacacgaggcgcacataagtgcttgtcaaactgtagttttgagtgtttgttgctcctctcgaaattgaagtaccctttgccccttgggaggtgatagcaaatgaaaaaggacctacgcctaaacacttctttaaaataaaaaaaatttcaaatttaaacaaagtgtttgatttgtacaattaaacaaaatataaagtaattgtatgaaatgcgactcttacttctttagaacaaactcatttgagcaaagacagccgctaggagaaaaggtgttgcccttggacatgaatgcaaagttttttaattaactcatgtagcagccattccattttccccttttccgcaagcaactctttgttttccgaactgatccgatcagcgacgcttttgaaaacacaaaaaaaaaacgcgagaaaatgcttcgaaaaaaaaaagattgaataaaaaagaagcagggacccgaaagtaattattggcacatttatgcaaggactcgttttcctctgctcccacatgatattttaaatacataattgcccccgaaactcccagtactttccgtccctgcccaacaaaatcacctaattgcgttggcccaactcgctcagctcgataaacaaaaaataaacaaaagcgagcatggttcgctgctttttccggccttctggccctctctgccacatcgtacccatgtactccatatagcccggaaaaaaaacactacgtaccaacacgaaaaaacatttgtaaaaacttaaaaatttcaaacacgtcttcattgtttacaaaatgttggccggaagctggcgcttcaggctcagcttcagtttccttttccccgacttctttactttttttttgttttttttttttttttgattccccattgtggctccgcagggaggcaccgaaaatcccaaaaaaaagcaagtttaaattttaattaaatcatgttatatagaatgatgcacgcgggacttatccgccaaatcgaagagcgggcggcaaatggaggcagtcggcccaacccacttgggtgcacagtcaatgatgatgggccgtgataaaggctccacagggtctactcaatccgagtggagggaccataaaaatttgctacacaaaatcaaggataccggcgaagatttaatgcactagaaaaattatatgcttactttttgggggggtgtacgcaattttttatgaagctacgaacatgaatttcgatttaatgaatgtaaatcatttgtatattggcatgatgctggggatatttcagagctggatgattcttaatgaaagcaagaaacagaaaacccttatatacataactcatttgaaaaggcttaattagtaattaggtattaagtataccagattaaatttaattttcaatgggttgagtctgcctagcacagcttacataaatttcattacaataagtgttgagcacttaaatttaaaatgtgaatacaggcactctttaagctttgcattcttgttttttaataccaaaaccactcggagtttccatcgatttacccgcaccgccagcgagaatgataaatgtttggcaaatgtttgccgaacattctataatttaaccagtaattatgggaagtgacttatgcgctggcaggaatacatttatcctcaatttttcactgatttaagcagcacgggaattttctatacaaatttatccagctaatgccattgcctcgtcattcattcattcattctttcgttcgttttgcaggagtcacaggacctgcaggacctttgggggctacaacatcctcgccgtcgctggaaacgcaatcaactgttataatttcgtttaaatcatctcaaacacctgtgcagtctcaaacgaattctgcagcctccgaaaatgttgaggatgacacagcgcccctgccacttccaccgccgccccccggcttcggtacgcccaccacgccccttttgtcaagcaatgtgctgaagaaggtcgccagcttcacggtcgagaagtcttcggcgggcaataatagctcgaatcctccgaatttgtgccccaccagtgacgagaccaccctcttggccacaccatgttcttcatcgctgacggtggcaaccctgccgcccgaaatcgccgtgggcgcagcggcggggggcgtggccgggggtgctggttcgcgacgcggctcatcttatgtaccggaaaagttaagcttcgctgcatatgaaaagttcgaaggtaagtttgccaaaatattcgtgcttaaatactctgaagttgagagtttctaagatttttaaacatatattgtaattttgtgagagtggataacatgtctacaattagatatatctagagattttaatataaatgcttgaaatagtcggctacatggcaaaaaatataagttttttcatagccaaaaccttcttcaatttgcgcaattcaatttgtagttgatgctgcttttcatttcgttcgcgggaaaatcttttagagtattaacccagaactctcgatttttgagctgagctttatgcttcaatctgggacttcagtgaagcgatgccaaaggcaggaatatcgaggaaaactaaaaataaagggtgggaaacggatttcggcgggggaaatataaaggtaacccctgcgatttctgcgcatttactgtttgccttttgtgtcgtttctcgggaaacatttaattttatttccctttccgtttttctttcctttcagcatttttttttattctgccggtgtgctccacgtttgattgcgtttgttgtttgcttaaagttaacaattaatttgcctgcttcagctccagcagacttttcgccccgcaccgcaccgcatccaattttccctcggaaaatcagtcaagaaaagcaagccaaatcaagttgaatgattgcataattgggaaattttgtatgtaaatagaggagagggcgaaacttgccaggttaacattttcgcaagtgtttgaagtgcctacgcatatagattctatattcgattctagtttcaccgcctcacagcccgaaaatgtgtggcatattttcgaggaatgtctttaaattcgtctcccaagactgaaaatctgtggaatttttgcacatgtaaggaaatctgtctatacagtagtcgctcagtaattaaacttaattttaaaaattaatatatcgcactgattatcttctaagagttctcaatattgtttaatttactgtgcaaagtcgtttccatcgaatgcacactgtaattaacataactctcgcctaaaagttcctaatttcgtatatttactgtgaataatattcctcttgtctcacattgttgcgagtttgagaattccggctgcgaattttcagcgctcggtcgaaactatttccaaaaatcatccgcacacccaaaaatggcaaagtgaaaagcctgcaaacttttcgcttcaaacacatcgcgggcattttggaggcgcagtttttgacacatgccacgcccatcgatgtgcgcgcgtgagatggtgatggagagaggaggggtgtcggtgggtgttgtgtggcacaaaaggcgctaattggtaagctcatcgttgtcagccttcccgcttttcgccacccggagatcctgatcctccgccatcatcatcatcctcatcctcatccacatccacaacgcccgttgtcgtctgcggcaaattaatgcaaacaaacattttaacgcctcgctgggcaaacaagcgaagaagaagtgaagctgcagcatcagggggcttggaaaaaacgagtggggctggtcacgcaatttgctgcacagcgagaaattatggcaagcaatttttagaaaatactttatatcaaaatactttgcttgattcatatttttcaagaatttattcccaaatgaaatcttttgcttaattgcagacacttgttttcttttcaaactgaatttatctctttggaagtttaaaaaatttttctctgtgcacctcttgctttttcgcgttttcagcgtcgacgtcattgtctctgaagtggccatcaattcttcgtggcttttcggaaagatgggatggactgggaaaattcgggatggacggcagataactgctgaagctgtttgtcgcgacttttcatcaggcaacgtccgtcgccgctcttggtccaaaaatctgatttatatgcccgacaacatcacgttcgccagcttcgctcggatgaagtgattctggccgggatgggggccatcactaggatggcagaaaggggcgactttaaggagctttcctgccacctagttatggacaacaatgttttcgcccaaagcgttatgaaataatattttcagcttctatattgctcaattcctttacgctaaaaacctagtaataaccggaatatttgtagtgaaaagtttaaatactgctaatattaccttaacacttgtactagccactacttttgaacttgagaatttactagctagttatagaaatcgaagctgaaagtcgttgctcagatggttaacttctacgtttgttctaacaattaatttgaatttttaaccatgccctaactaatgctatacctgggtatctttggagtcgctttaacccactccatgcggcatcctcaatgcttcatttcgcgttctgccctgtggttttctggcatcgttacgttctcatccgttttgtttgtcggaatgaagaagcgagcgccactctgccgttgatgaatgcaacgcatgcatgcgtgaggcgccaaaaaccgctgctacccatcgtgccacccacttctaacccgccccaagcttccaccagcaccttacaccgaaaaaaatgcgaatctttttcagaaaatacatattatttatgcaataattcttctgaaaaaaagtagagttccacgtgcaactaagaagtattttccgcaaaaaaaatggtttaaaaaaaaaccaactaaattgttttttcggtgtacgtttgttgcattcgcctggcaagcagttatgcaaatttgttgtgcatcgtcggtggcgcagttttcatcaaaactcgaaacccgtttgccacaacgccgctatggtgccagcaataaaggccaagctcaacaacaatagaaaacaacgacatttagagcaggagcaacaaaaacggccaccacacaaacacagacagctacctcctgctgatgaggatgaggatgtggagcagatccagctccggtggccagctaatctggcatttcctcctgctttgccccacaggacgatgccatcccatcatctacatcgaaatgacgaaatcccctgcatcaacttggcatgtggtgtatcttaacttgtaaataaggtgctatcatcgtatggatctaattgtcaagtaaacatttgaggttgattgattttcacgtgcgtcacataattctatcattgcgttctatttaatcgatttgattttttaactattcacatcaagtttgcagaccttatcagtcggcttttatttgctatcaactaaagaagcacttcagcaagcggtaagagctattaaaagatagagcccttgaaaaaccaaaacatatacaaatgtaaagcacttgtttgaatcagtttagtttttgtggaaattataccccgatgattaaccaaaataatgactacgtcgaattggtgcaaaatgtcatgcttctcagtttgcgaaatgcgtaaatttagacacaatgattcaattgaaatcgttttaagtttataaaaaagacaccctatctaaaaaattaaccatgactgattaaaccagcgaccttctcagggccgaatagtattacattatttgtctagtgttctctctatagaactgcagtcttatcgatacactgaaaatattgaagtagacttaagaagtcagtttacttttgccaaaaatatgtacatatatgataatcaatagcttcgcctattaattgatttcaaaattgaagcaaaatttattaaacaaattaatgttgatatcatttttaatttctatttttagtttgctctgccatgtatatttatagtctgtattcagtgtgctgattgctgagagtgtcgcagttgtcatgttcaaggcgttgataatgttgataagttctaacaacctttcaattttttttttgcgctaatcacacaaaacacagccgtgaattcgcgcaggcagtttaagtttgattttagacgaagaaagttgtgctagctattttgttgtgaaagacaatatatatatgtacatatatgtccagtgctttgagcaacgtttggtgttccctgctggccaggcagccatcgaaagagtgtgaatttgcatcggaaagactatggcattcgcaggaggatgttgccaatctctcgccttattatcttcagctaatgtcattggccgcccggcgggcgcagaaaactcgattttcccggggaaaagcggagcgggaggatgtcgcacctgatgtcgcagaaattagcctacgcatccaatggatgcgcgttgacccgaccgtgatcccgacctctgacccaaaacatctgctcctgctgctcctgcaaactgttacccactcacacgctgacagccagcgtaagttttattttgttgtttggcctcagaaagtttgtttggttgagtggaatgggggtggggtttccttttgttatgccaaaatctatgagacacttaaatattttacacatcttatgttcttaacagctgaaccgttattaaacaataaccaaatgcatcacttgaaagttaattctttttgcgacacttatcttatcgcggcgttagtcacacgactttataacttttggtcaagacagacagatgattaaattgattttgagatatcaaagttacaaaataagatattttttttggcaagcaaattcgtagagtatctgtttggtgtgtccacgtcgatagggattattttccggccagtttgctgtctggcattttcaccagaaaattatttattccacattttttgggcttctccgcttgggagttacttcaacccaaagcgtcgcctacccataaatctcatcggttgcggggctccaagttttcttttataagagaaaaacgagtgagtaagtgggaccagctgtgatcaaagttatttcattcagttacaactgttctttttctctacttttcaggtcaaatgctaataaaatggctaatctcaacgatgcaaagcaatccgaagagttccagcggtgatgctaatcaggaattatttaatacactggcgttgcagttctgcaataatctcaaatatgtcggcgtccttaagcagatctccaatgagcacttggattgcggatttagcgtgagttcaatgcacttttattccccggaaattggtcatctctctcaggggggggagggggtgggtaagggcacctagttcctaactaaagggtgctaacagggcggaagttgccacggcttggccggaaatgatgactgcgcgttggacagcgggtttggacggggcaaaaggatggataatctggttgaagggtttgcagatcaagggtgcggctaaactaactttcaagtcattagcgtttcaggaaaaactattgataatgactgtcgctgtgacactgtaagaaaaatcattcaaaccggatatttaaaatgctagaatgcaccataccatttatgcttgataaatggcttatttggacagtattacttcaacacgaatctctgtagaatttaaagttttttgtaatctgacagcctaaaagtggctaattctgtcagtgctctgatggttccaaaattggcccgaggcctgttgggcgctggagcccttcaacttatggcctttatgcataatgttactcatacgcagcgttgtccaactcgtcgttggctcgtcgaagttactgcgaaaagttgtgctaaactgaaccgcaaagttgtgcccggaaattagcaattccattgcaaaaaaaagaaaaaaaacaagagagaaagaaataaaataaaaggccagacccggccgtcgttgcattttcatttaaccgagctacagcggttgtccatctaaccctgtcccggccacgcccccaatgcgccctcgcctgcaagtgtcagaacttgttaaaactttacagtcggcagccgtcaactatcaaaagccaagttctctttgctagcattaacaattttacgctttcgctgttgattttgttgttttgctgcatgcgaaattatgaaaccaaaactggacactgcgagaaaatgctgcgctcggtatggagatagttcagtatttggcttaaaatgtttgcgaccttttttcttttgcagtgtattgtgaaatgcgagccctctaatatcacgctggtggaataccaacttcctttttatccactcgttctttgtccaactctttggcaaccatctggcgatggtcatcttcatctgccgggcctaatggactccataatagttggctatatcatcgggcatagtttagccggccatttaccatttaccatttaccatttagcatttagtactgctcttgaccagaaagctaaataaacaagcagtttgggaaaaaggcggaaggctttaattgcccaacagcagaaagaggcccaagaagctggtggccccatttccatttcgagggctgtaaaccgagacccagttaagtgttattagacaagcgacagcaggaacaacacaagcgacagaaacaacacaaatgacagaaacaacgacaacaaccggcgaacaagcaagtaacaaccaagagcgtacaacaaccaaaaagccaccgcaaataatgaagcactagatatagccctcaaattagtttaggccaaaagttttagccacagcagcttaacctcaaatcccagagaggcccaaacacaagatagcacacaaacatatacatatatagccaaaaatgtgggcgggaaaatcgagaatggggggcggcagacgacaccgttaagtgattttctatgtgatgatacttgagctcaagattatgatatcacgaattttcttcaactggctgccaagtagatatatttatatatatatatctgtagtatatttgtatgtccaacgacgtctccgatgtctctggaatttgttcgaactttttgggcaataggccagctcaccagggagcaaaagtggggtaaaggctgtgtcaaaggttcggtgttcgactttaactttggctgggatttcactttgtacagtacttagtcgctatgtgggcttagaacctgttgtttcattcactgataagaatattcagagaatcagagaatcgactgctactgcatacttttagatacacttatacatagtttcctaatcctttgcccatttggttattttccctgtgcttactgtacccttagatacaatttttctttttaccacagtcccttctgttttcccgtattattattgttgctgcagctcattgaaagtttgtgcgtttttattactcgcagtcgaaagtttttcccattccaatcgactggtattattctttaggttcagccggaacaaaccaaactttgatgcagaaatgagcaaactggatttgaatgtgcaatgtgtaactactaagagtttgtgtctattgccttgttagtttgcgtgtgtgtgcgtacgcgtgttggattgtttatacatacattgtattttagatatatccatatatatgccagatgtatagagtggctgatgggattagagtgaatggaatcgatgatgatgttgctggtaattaagtgggaattgggaaacaaccaaactgtatcacaggccgaaattgtgttttaatctcttattaagtggtaaaaccaaataaataacttcctattgttatttggtgtaatcctcttcaaactgtagcatgattttgttgcttatttcatgtggcaaacagagcaaatcctttagctattgggcacagttttttaccaactcgaccaactactaataccaaaaacaaaacaaatactcagcactttgcgtactttttcgcacattttcatgtgggttcttatggttaggttttggtttattttttcattttttagttttggagatgttgggttgcactcctccagctggcttgtgggtttcttgggttactcggttctttaaaatgtgcaaacaacatgcaaatcgctggcaaacacttgggcacaaatggtgtaaagtgcgataaacttgactctgaccgagccactccttaaggataaactccttactgggtatattggatatggtgtcgggacaggatgttgcacaccatttgcatttgtcaagttcttagatctctgattgattaacaaaacgtaactgcctgaacgtgtaagtgcgtatctatgagttttattaagcataattaaactgctattttcattttactcgtttccaatggagttgggagtctttcagagattattaaaacataatttcaaaatgcactttccatatattttacccgctgtgcaatgtattacaagttgctatactaatgttgacaccattttccttcaagacttgacaacaagaaaagacaattcccgcagtgggactaaaaagtcgccatcaaaatcaaaggagttttgccatgcacagaaagtacaggaacatggcagaaaataaagcgaacttaggccaacttaggtgcttttaagtttactcgcttgtcgcacactcgagaccacttgccgtctctttctccgcgctagcagctgtctctttcccttacttactgtcccccttgactggcaattagaaattattggatgtatatgtggggaattggaagtaaaatataaaattgatattatctaaatcaaaagggtctcatttgggttgcttagtattaataaagtgttttcttcttcaatattcagccctatgaaatgtaccaatggacgcacacggagcagccaaccacctcattgcccctgacccctggcaagctggacaaggtggcggcttggccattttccagcacaccatccggtattcgagcgctggagtccgcatcgctggcgtccttgggagcaggtggggtggcgggttctttggcaaccattgccaccgcatccacagcctcatcggacaatcagaaaaccctgcagcagatcctcaagaagcgtctactcaactgcacgaccttggccgaagttcatgcggtggtaaacgagctgctgagcagcgtggatgaaccaccgcgtcgtccatcgaagagatgtgtgaatctcacggagctgctgaacgccagtgaggctaccgtttatgaatacaacaagactggagcggagggctgtgtgaagagctttacggatgcggaaacccaaacggaaagcgaggattgcgagggcacctgcaagtgcggccaatcctcgacgaaagtgtccgataacgaaagtgcaaaggaagatggggaaaagccccacgccgttgccccgccgcctccgccacctcctccgccgctgcacgcctttgttgcgccgcctcctcctcctccaccaccaccaccacctcctccgccactggccaactatggagcaccaccaccgccgccacctccgcctccgggcagtggtagtgccccgccgccacctccacccgcacccattgaaggcggcggcggcataccgcctccaccaccgcccatgagtgcatccccctccaagacgacaatctcacccgctccactgcccgatcccgccgagggcaattggttccatcgcacaaatagtgagtgagccgaaaaatataactacagtcgtataataactaatatttttctagccatgcgcaagagtgcagttaacccgccgaagccaatgcgtcctttatattggacacggatagtgacgagtgcgccgcctgcgccacgccccccatcggtggccaattccacggacagcacggagaacagcgggagctcacccgatgagcctccggctgcgaatggtgcagatgctccgcccacagcgccaccggccaccaaggagatctggacggagatcgaggaaacgccattggataatatcgatgagttcacggaactcttttcccgccaagccattgcgcccgttagcaagcccaaggagctgaaggtcaagcgagccaagtccatcaaggtactcgatccggagagatcgcgaaatgtgggcataatctggcggagtttacatgtgccgtccagcgaaatcgagcatgctatctaccacatagacacatcggtggtcagtttggaggcgctgcagcacatgagcaacattcaggcgacagaggatgagctgcagagaatcaaggaggcagccggcggcgatattccgctcgatcatcccgaacagttcctgctggacatatccctaatttccatggccagcgagaggatttcctgcattgtctttcaggcggaattcgaggagtccgtaacgctgttgtttcgaaagctggaaacggtgtcccagctatcgcagcaattgatcgagagcgaggatttgaagctggtcttctccatcatccttacgctgggcaactatatgaacggtggcaaccggcagcgcggacaagcggatggcttcaatctggatattctgggcaagcttaaggatgtcaagtccaaggaatcgcacaccaccttgctccatttcattgtgcgcacctacattgcgcagcggcgaaaggagggagtgcatcccctggagatccgcttgcccatcccagagccagccgatgtggagagagccgcacaaatggacttcgaggaggtgcagcagcagatcttcgatctcaacaagaagttcttgggtcagtttagagcgatcatttccattgccatcacttagctaatccatgatattgctcttcaggttgcaagagaacgacggccaaagttttggccgcctcgcgtcccgagatcatggagcccttcaagtccaaaatggaggagtttgtggagggggcggacaaatcgatggccaagctgcatcaatcccttgacgagtgtcgcgatctctttttggagaccatgcgcttctaccacttctcacccaaagcctgcaccctaacgttggcccagtgcacgcccgaccagttcttcgagtactggacgaatttcaccaatgatttcaaggacatttggaagaaggagatcaccagtctcctgaatgaattgtaagcaatagcagcagtcaacttaccacttacccagcgggattacccagtttttttttacacattttcagaatgaagaaatcgaagcaggcccaaatcgaatcgcgtcgcaacgtatccaccaaggtggagaagtccggacggatttcgctgaaggagcgcatgctgatgaggcgtagcaagaactagttgcctcaattgaatatattttgtatttatagttgctttttattacaccattgctcagcaaacttctcgttacatggatgtagtctccactaattgttaagtcaccaatttgtataaactccttaaatgcaggcgctgtggctctacaaataaaatgtgctcttgctattaacattgcgcgtttactcggacgagtgttcttttagtgttcgaatcgtttcgcgacggttataattcacaaacttttggcactttattcaaaaatagaatttatcactttgcctagggattgtacaacactgcttgctagtgctgtgtgtggcatggcttgagacctatcgctaagcatttttatagagtgctatcgatagtgacacgacttgtgctgcctcacatcactagcccaacagctgtttgtacacaaaacaagtcaaaagttgagcaattttaatttaattggcaatttgcacagaaatcatattgaaagctgcacaatgcaccgatcacacccgagtatcagtcgtcgcaagcatctcatgaaggagatgatggaggacgactacgcgctgcccacagaaactcagcagattgcgcgggtcatcagcagtcggggcaacaatctccacgaggtggagaccgtggacgaaacgttccttggtgagtggatgaataaagtcgaggaaaactccatggttagttaattttgaactagctattgccgggtatactagattttttgaaaagtatgtcacaggcagaaggaagcgatggaaccataccaagcatatatattcttgaacaggatcaatatcccaatcgatctggccatgtccttccgttcgtccgtatatcttcgtccgtccgtctgaacgtctcgataaagacatgttgagatagcccatcccaactcatttcatgttgatacttaataatgaatttgtatccttctgacccttttagtttcgatgcccaacaaattccgcaagagcatgtgggtgaaacgtggcgactttctgctggtcgaaccgattgaggagggcgataaagtcaaagccgagatttgcaaaatactcacacccgaacatataaaggaatacacaaaagctgcaatttggccggataaattcacaaagaaacctgtacaggaggaagccaccagccaaaacaaagac

SEQ ID NO: 6386 - DNA, 3863 bp, DROSOPHILA
ctcgcttccgcgcagatcggtccatgttgaaatcgaaaaacgctctggaaaatagaaaagttgaatgtaaaacaaatagaacagaagggcaattgcgagtgcagtgtgaaaaagtgtgaaaagtgtctgtttttgaggaaaagttccttgccaatgaccggattagcaatctacagatcccgtggacgaactgatcatatcgaagcactatctaaatacagcagcgaaggaacataataatccgaaagccaaacgcgatcgtccactgagcgaaatcagtgtgacgtcggtggacaccctatcaccgaataccgcaaaagccgtgctcgagctgcagaaacgctgccgagctgataagttggcctgcctgagcctaactcgcgtcacctacctcagcatagccaatgatctgcaggaagtcgaggagccggatcgggccagcatattgcacgatacggatcttttggtagcacccaatagcccggcggaaagttcgccggacgaggaactcatggccttgcagctaggcaagaagttggcccaggttttgggcagtggagcgggctcacctttgacccccggcacaatggagccttgtgcagcgggttcgggctcaccgctggcaaatggagagctcttcaacgtctccaaggccaaaaaggtagagctacagaacctttcgtctcgattcacagccgccgtcacccaaacaccgccaggtgtcacgtcatccactcccaatgaatcaggagtcacaggacctgcaggacctttgggggctacaacatcctcgccgtcgctggaaacgcaatcaactgttataatttcgtttaaatcatctcaaacacctgtgcagtctcaaacgaattctgcagcctccgaaaatgttgaggatgacacagcgcccctgccacttccaccgccgccccccggcttcggtacgcccaccacgccccttttgtcaagcaatgtgctgaagaaggtcgccagcttcacggtcgagaagtcttcggcgggcaataatagctcgaatcctccgaatttgtgccccaccagtgacgagaccaccctcttggccacaccatgttcttcatcgctgacggtggcaaccctgccgcccgaaatcgccgtgggcgcagcggcggggggcgtggccgggggtgctggttcgcgacgcggctcatcttatgtaccggaaaagttaagcttcgctgcatatgaaaagttcgaaggtcaaatgctaataaaatggctaatctcaacgatgcaaagcaatccgaagagttccagcggtgatgctaatcaggaattatttaatacactggcgttgcagttctgcaataatctcaaatatgtcggcgtccttaagcagatctccaatgagcacttggattgcggatttagcccctatgaaatgtaccaatggacgcacacggagcagccaaccacctcattgcccctgacccctggcaagctggacaaggtggcggcttggccattttccagcacaccatccggtattcgagcgctggagtccgcatcgctggcgtccttgggagcaggtggggtggcgggttctttggcaaccattgccaccgcatccacagcctcatcggacaatcagaaaaccctgcagcagatcctcaagaagcgtctactcaactgcacgaccttggccgaagttcatgcggtggtaaacgagctgctgagcagcgtggatgaaccaccgcgtcgtccatcgaagagatgtgtgaatctcacggagctgctgaacgccagtgaggctaccgtttatgaatacaacaagactggagcggagggctgtgtgaagagctttacggatgcggaaacccaaacggaaagcgaggattgcgagggcacctgcaagtgcggccaatcctcgacgaaagtgtccgataacgaaagtgcaaaggaagatggggaaaagccccacgccgttgccccgccgcctccgccacctcctccgccgctgcacgcctttgttgcgccgcctcctcctcctccaccaccaccaccacctcctccgccactggccaactatggagcaccaccaccgccgccacctccgcctccgggcagtggtagtgccccgccgccacctccacccgcacccattgaaggcggcggcggcataccgcctccaccaccgcccatgagtgcatccccctccaagacgacaatctcacccgctccactgcccgatcccgccgagggcaattggttccatcgcacaaataccatgcgcaagagtgcagttaacccgccgaagccaatgcgtcctttatattggacacggatagtgacgagtgcgccgcctgcgccacgccccccatcggtggccaattccacggacagcacggagaacagcgggagctcacccgatgagcctccggctgcgaatggtgcagatgctccgcccacagcgccaccggccaccaaggagatctggacggagatcgaggaaacgccattggataatatcgatgagttcacggaactcttttcccgccaagccattgcgcccgttagcaagcccaaggagctgaaggtcaagcgagccaagtccatcaaggtactcgatccggagagatcgcgaaatgtgggcataatctggcggagtttacatgtgccgtccagcgaaatcgagcatgctatctaccacatagacacatcggtggtcagtttggaggcgctgcagcacatgagcaacattcaggcgacagaggatgagctgcagagaatcaaggaggcagccggcggcgatattccgctcgatcatcccgaacagttcctgctggacatatccctaatttccatggccagcgagaggatttcctgcattgtctttcaggcggaattcgaggagtccgtaacgctgttgtttcgaaagctggaaacggtgtcccagctatcgcagcaattgatcgagagcgaggatttgaagctggtcttctccatcatccttacgctgggcaactatatgaacggtggcaaccggcagcgcggacaagcggatggcttcaatctggatattctgggcaagcttaaggatgtcaagtccaaggaatcgcacaccaccttgctccatttcattgtgcgcacctacattgcgcagcggcgaaaggagggagtgcatcccctggagatccgcttgcccatcccagagccagccgatgtggagagagccgcacaaatggacttcgaggaggtgcagcagcagatcttcgatctcaacaagaagttcttgggttgcaagagaacgacggccaaagttttggccgcctcgcgtcccgagatcatggagcccttcaagtccaaaatggaggagtttgtggagggggcggacaaatcgatggccaagctgcatcaatcccttgacgagtgtcgcgatctctttttggagaccatgcgcttctaccacttctcacccaaagcctgcaccctaacgttggcccagtgcacgcccgaccagttcttcgagtactggacgaatttcaccaatgatttcaaggacatttggaagaaggagatcaccagtctcctgaatgaattaatgaagaaatcgaagcaggcccaaatcgaatcgcgtcgcaacgtatccaccaaggtggagaagtccggacggatttcgctgaaggagcgcatgctgatgaggcgtagcaagaactagttgcctcaattgaatatattttgtatttatagttgctttttattacaccattgctcagcaaacttctcgttacatggatgtagtctccactaattgttaagtcaccaatttgtataaactccttaaatgcaggcgctgtggctctacaaataaaatgtgctcttgctattaa

SEQ ID NO: 6387 - protein, 1059 aa, DROSOPHILA
MALQLGKKLAQVLGSGAGSPLTPGTMEPCAAGSGSPLANGELFNVSKAKKVELQNLSSRFTAAVTQTPPGVTSSTPNESGVTGPAGPLGATTSSPSLETQSTVIISFKSSQTPVQSQTNSAASENVEDDTAPLPLPPPPPGFGTPTTPLLSSNVLKKVASFTVEKSSAGNNSSNPPNLCPTSDETTLLATPCSSSLTVATLPPEIAVGAAAGGVAGGAGSRRGSSYVPEKLSFAAYEKFEGQMLIKWLISTMQSNPKSSSGDANQELFNTLALQFCNNLKYVGVLKQISNEHLDCGFSPYEMYQWTHTEQPTTSLPLTPGKLDKVAAWPFSSTPSGIRALESASLASLGAGGVAGSLATIATASTASSDNQKTLQQILKKRLLNCTTLAEVHAVVNELLSSVDEPPRRPSKRCVNLTELLNASEATVYEYNKTGAEGCVKSFTDAETQTESEDCEGTCKCGQSSTKVSDNESAKEDGEKPHAVAPPPPPPPPPLHAFVAPPPPPPPPPPPPPPLANYGAPPPPPPPPPGSGSAPPPPPPAPIEGGGGIPPPPPPMSASPSKTTISPAPLPDPAEGNWFHRTNTMRKSAVNPPKPMRPLYWTRIVTSAPPAPRPPSVANSTDSTENSGSSPDEPPAANGADAPPTAPPATKEIWTEIEETPLDNIDEFTELFSRQAIAPVSKPKELKVKRAKSIKVLDPERSRNVGIIWRSLHVPSSEIEHAIYHIDTSVVSLEALQHMSNIQATEDELQRIKEAAGGDIPLDHPEQFLLDISLISMASERISCIVFQAEFEESVTLLFRKLETVSQLSQQLIESEDLKLVFSIILTLGNYMNGGNRQRGQADGFNLDILGKLKDVKSKESHTTLLHFIVRTYIAQRRKEGVHPLEIRLPIPEPADVERAAQMDFEEVQQQIFDLNKKFLGCKRTTAKVLAASRPEIMEPFKSKMEEFVEGADKSMAKLHQSLDECRDLFLETMRFYHFSPKACTLTLAQCTPDQFFEYWTNFTNDFKDIWKKEITSLLNELMKKSKQAQIESRRNVSTKVEKSGRISLKERMLMRRSKN

SEQ ID NO: 6388 - DNA, 2747 bp, DROSOPHILA
gggtatgccaacaagtagagctgtatatcgccacgttcctgccgctccgcaagttcctgagttactacgcctgataatggctcaggtagcaatttctatttgcctctagttgtgtatatttctttccaaatttcgtgtagtattcgctcacttcgatgtgtgcaagtgtgcgtatgtaatccaaagtactttgtaattaaaaaggcttttcgctgttgtcatgtaattttgtgaccgtcatttacgcgtttggtgaccgctggcatcattgacgcgtgccaattggcgcaatcacgtaattaaggtcaccgacaaggtggcactgggagattacacttggcattaggtaaaataaacacacaactgcatcaaccatttgtcagatcttaatcaaaaatggcataatcacattaagctgaccaaagttacaagaagacgtctaactcgcacatttatttagcaaacatttattcaaatgcaatataacattaaaaactcaattttaaacttaagtgatgcgccttcttcgcacatatctgcacagttaaagtcatttatcacaagtatgtactatgaatgtatgtttctttcaacaactctgcgttcggctgctgcttctgtttggttttggaatggtctgcacgtataaaagtacaaaattgtttatattcgagcctgttgtttctgggagtgtttgtttgtatcggtatttggcaatctgttttacacttaggagcttggcgattcgttcaacaagtgatggagaggcaaagaaatcgaattcaacaagaagcattactaggtgctacatttacgtctggctacatgtgtgtgcgatatgcatacgtaatgaattaatatgtataatatggtagttctaagtattcgcataggttgcaggaggcaaagagatccgtagcccagaggggcggtggaggggatagtttaaatgccgcttaaatactgctgtagtctgtggagaccctgctccgagcaccacttatgtggaggtcacgcccttgcgggccaccagcatgttgagtatcgggtttttccggatgtagctcacggcctttttgtgggtgaccatggtgaagtcgtagccgttgcactgcaggatcttgtcgtggatccgcagacctgctcgggcggcgggactgccctcgtgcacctcggtcacatagatgccctattttcaaaggggaaaacgtaacattgtaacattgaaactgctcttaagataccgaactaaaactaaattccccgactttcaaggagagctataattattagctttaagattgaagctctcttttatgcccggaattaggttctagtgtttcccaagtttctcacataatccgtgtatccctgagggcttttcttgtagtcctggtcgattccgccgccgatcttgaagccgcacttgaggatctcgcgcccctcctggtcgtagtccttctccttgtgcagcgtgatgggaatctgggaattgtgagtcacatttcatcaatcactcgaatttgaaagtggcttgtcttttttgctccagcgacccaatttcacctatacacacacaggcgactgtgcgtgtgagccaggtttagttcgttcgcaacttacgctcaagcactccatcgccgtgccggcctggtgctggaatgccattttcgccatgtctaccgatgctttgactaactttaatttgctagattagctaagattccgctggtaaattcgtcttaagattgtcgcccacaacaaactctgcttcttcctcgcaatcatttatcgatggcgaaaaatcgataggttgcagcaataatgcgattgttgccagcgactgccgctgactttaaatatatacttttcatataaaataaaaacatgaaggtctttacgattgctgtttggcaatgtttcttagttttatttatactatattatacatctagagtccctatgcctatgagcgccgcatggccagcatggtgttgatctcccagatgatgatgcgtgtccgatcgatgatctcgcgtagctgcctgttcttcagcttgacggtctctatgagttcatggttctcctgcaggactttccggtactcatcgcacagcgagggctcgattctcggttccggctcatcgcggtagggaatcagactctcggcgctcatgtaatccattccggcgtcgttgcacttctcgtagatgatgcgcaccctcttgaagagcagccggatggtgcggaagtactcctgcaccttcttctcggagctgttttccctgtgcgaggtgggctggatgcccttgagggaggcgaagacctcctggaagcgcgaggcgatatcctgcaccgtttcctgaccgagacgggacagctgcacaatgttaatctccttgtgaggattttgctgcgagatagccagcatattgttgctgcccccggctccaccgggtggaattcctgcgaccggattgagttgctgttgctgttggggaatgttctgctggggcatgttttgttggggctgctgttgctgctgctgtggaaccactccccctccgcccattcccacaccaccgcccattcccactccgacgcccactccttgttggggcaccatcatttgctgctgcatcatctgctgctgctgctgttgctgcatctggtgctgcggagacatgccgggcatcaggccgccaggacctccaggtccttggggattcatctgcatgctacccggg

SEQ ID NO: 6389 - DNA, 442 bp, DROSOPHILA
cttaagacgaatttaccagcggaatcttagctaatctagcaaattaaagttagtcaaagcatcggtagacatggcgaaaatggcattccagcaccaggccggcacggcgatggagtgcttgagcattcccatcacgctgcacaaggagaaggactacgaccaggaggggcgcgagatcctcaagtgcggcttcaagatcggcggcggaatcgaccaggactacaagaaaagccctcagggatacacggattatggcatctatgtgaccgaggtgcacgagggcagtcccgccgcccgagcaggtctgcggatccacgacaagatcctgcagtgcaacggctacgacttcaccatggtcacccacaaaaaggccgtgagctacatccggaaaaacccgatactcaacatgctggtggcccgcaagggcgtgacctccacataa

SEQ ID NO: 6390 - protein, 123 aa, DROSOPHILA
MAKMAFQHQAGTAMECLSIPITLHKEKDYDQEGREILKCGFKIGGGIDQDYKKSPQGYTDYGIYVTEVHEGSPAARAGLRIHDKILQCNGYDFTMVTHKKAVSYIRKNPILNMLVARKGVTST

SEQ ID NO: 6391 - DNA, 3874 bp, DROSOPHILA
tggacaggcgacaacatcgtcgccaggctctctcagatataaactctgttctgttcagtaagaccacttgggagtcgaacaggcgccaatgcttgtaccgactctcaacgtctgtagattgcgcatgtgactccgttcacaccaatcgaaaatgcaaaatgcccgcctagcgtaagttgcactgaacgttttttgttgaacccaacatacatagcagccaccattccgatggttatcataaagcagagcttaactaatccaaatatggtgttcttcttccgtttgttttcacagtgtccgcaagcaggtggtcaacatcccgtcgttcgtcgtgcgcctggactcccagaagcacatcgacttctccctgaagtcgcccttcggcggcggccgtcccggtcgcgtcaagaggaagaacctgaagaagaaccagggcggtggcggtggagctgctgaagaggaggaggactaagcagtggtagccagctgtagccaagacaaatacatggcgcagacttgataaaaatccgtttgctttacacaaataaatgtaaaaatacacgaagttgaatgtgtttcaatgcgcatgtttgtttatagaatgggttaagccgaagatgatatcgaaatatatgcaaataagacattgaagttttaaacaaaaacaaaaaaagttatatggttaatgtaaagattattttcttttttaatattgctgaaataaaaaaaagcagtatttatcgatacccggtcagagctgcaattccagataaggctccagtgtgcccagagaagtaatctaacgaaatgctgccgttatcaacttagtactcgttatttcccgagctttcgtgtgcttcgccagcaaaattgccattctcacaaaacgaacgtttgaaaatcacttgagattcgggtaaacacaaactccaagtgacgaggaagaacagcagccggaataaatcgcgtataaatagtgtgataagcaagtgtcgccgaaatgccgaaacccggtgacaaggcgaaggtgaaggtgaacgtcaaggagcgggtggtggacgaaacctgcgacttgagtctctccgaactgagcgaaataccggtgcgggagatcgtaagtacaagctgaaatacaagtaattagcatcagctcccatcacccctctcgcttcctcttgggtccacgtttgttgtctggcgaatgtctagtcactgtctgtctcacttgcacaagtgccgtgtggtggggggtgcggtttggcatggataaagagagatccgcatactcttgttgtagttgttgttgttgttgctttgccggctggcttgcaattaacgctgacgtcgacttccacacaccccttaacccttgtgtgccggcgaatgcagttgaattcgctcgagggggttgatttttggtctttgccacccctcaaaaactcagatggttgccaaaaaagaaaaacaagtatggtagcttaagtgtagagtgtcgcgaccaccagataccgagtactaattattaaaaaagaatataaaaaataatagatatatatttgatgttttttccttataactggaaaataagcaatatccagcttagattacaaaaaagaaacaaaacttagtgaaacaaaagaacatactaataataaatgacctataacagagattaaatgatcaacagaataccccaaattttgtcaataactaaggggtgtaaattgaaagaaagggactttcaaagcacttacgtatttcgggggtttcttttttcggtcatgttttgccactggttctcagttcggtttgtccttgtgctttgcaggcttcgttcaagcgcgtcaccgttttggatctctccagcaatcgtctggtcaacttgggagtaagtagccgcaccacatctagccacctagcacacgacctaaatgccactttttcggacatccccatcttgccttagaaaaacttttcgattctcacacgcttggtgcgcctggacctaagcaagaaccaaataaaattcctgcccgaggactttggccagctggagcagttgcgccacttggacttgtacaacaattgcttggagcacctgcccattagcttcggtcagctgcgtcgtttgcggtacttagacctgaaggggaatccactgacgcccgcctgggagaagattgtgggctgctgctccacgcaaaaggactgccagcaggcggccaagaatacagtaagtggccctcgacttgagtggccctcgagtgacacagtgtcgggctccatctaacatttttccggtttttctccattttccaggtcagcatctgcgccaactacaagccggaattcattgaacgcgaacgtttggccgcccaagagagccagaaaatggccggagccggggattccagtgccaacgccgttcaaacgaatggcggcgcagctggtggaaagaagtcgacgaaaccgaataataagaaagccaaagctaaaaaactcgccggtgggggagacaatgagctgacaatcaaaccagtaaatgcagtgggatcaggaggatcaggagcaatcgcactgggatccaaatcaactcaaaagaacaatcaaaagaaaaagaactcgaaaggcgattcctggttgaatctactgtcgagagctgccctatcgtcgctggtcagctttctggttctctttatcatcaacttgttaatcatttacatgatcatgttcaagaatccggacatcgccgacaagctggtggagtatataccacaccagtatcgcgattggatcctgaccaaaacggagatctttcggctgcgtgttaccgactggatctcggaattccgaacaccaccggaggaacactgacggttcatttatttgaagccttagagcgctgggcttcaaatggaataaatcgctaaaaaaaaatctcggatgcattgcgcgtgtgtggaggcaaaattcaaaatgagatacgtgttgaccacctgaacgagttatacgactgctactttgatataccattatctgtaatttactgccatttattttgatagacactaagcccactacgtccattgaagggagattttaaaataaaaaaaaaacacacgtactccgcaacttaagaggccactttaaagacaccgaactacactcaatcactcagctcaatcgaactcagatgaatctacagctaacctaaccatagctcaagctcaactccatagtaactgaatggcagttccaaactagccaaagcatagaaactacagacacagtcagaccagacatcctcgtattattcacatctatcaggtcaaatcagatataatcgaatcgattcgaatcaactcacctacaaataaagtactataaccgtgtgcaattcccatcttatttctaattcttgctcaaattgtattcatgttagcccgaccattttacatttgtagattttaaatcgcataggttttattgcaaaggaaatgtataccatcatgagtggaatttgcagataatcaaaatgaaattcaagcggtttcatatgatttatgcgaaatcgaaataattgaagcgtaacaaaatatttgcaagattctttgaataaaaacgtacattttaacaaatttgttgaagttttcttattcttatttaatacttgaactaattttattctgtgacttaacagtttgcgcccaaaatctaacaattcaaattaattttatgtcccaggaaattgttaataaaaataatttcaattgagattgtgggaaatttatgcttatctattcacttggtcaccatgctatctataataatatttatagccccattcggcacgcgagtttatgttaaatataag

SEQ ID NO: 6392 - DNA, 996 bp, DROSOPHILA
atgccgaaacccggtgacaaggcgaaggtgaaggtgaacgtcaaggagcgggtggtggacgaaacctgcgacttgagtctctccgaactgagcgaaataccggtgcgggagatcgcttcgttcaagcgcgtcaccgttttggatctctccagcaatcgtctggtcaacttgggaaaaaacttttcgattctcacacgcttggtgcgcctggacctaagcaagaaccaaataaaattcctgcccgaggactttggccagctggagcagttgcgccacttggacttgtacaacaattgcttggagcacctgcccattagcttcggtcagctgcgtcgtttgcggtacttagacctgaaggggaatccactgacgcccgcctgggagaagattgtgggctgctgctccacgcaaaaggactgccagcaggcggccaagaatacagtcagcatctgcgccaactacaagccggaattcattgaacgcgaacgtttggccgcccaagagagccagaaaatggccggagccggggattccagtgccaacgccgttcaaacgaatggcggcgcagctggtggaaagaagtcgacgaaaccgaataataagaaagccaaagctaaaaaactcgccggtgggggagacaatgagctgacaatcaaaccagtaaatgcagtgggatcaggaggatcaggagcaatcgcactgggatccaaatcaactcaaaagaacaatcaaaagaaaaagaactcgaaaggcgattcctggttgaatctactgtcgagagctgccctatcgtcgctggtcagctttctggttctctttatcatcaacttgttaatcatttacatgatcatgttcaagaatccggacatcgccgacaagctggtggagtatataccacaccagtatcgcgattggatcctgaccaaaacggagatctttcggctgcgtgttaccgactggatctcggaattccgaacaccaccggaggaacactga

SEQ ID NO: 6393 - protein, 331 aa, DROSOPHILA
MPKPGDKAKVKVNVKERVVDETCDLSLSELSEIPVREIASFKRVTVLDLSSNRLVNLGKNFSILTRLVRLDLSKNQIKFLPEDFGQLEQLRHLDLYNNCLEHLPISFGQLRRLRYLDLKGNPLTPAWEKIVGCCSTQKDCQQAAKNTVSICANYKPEFIERERLAAQESQKMAGAGDSSANAVQTNGGAAGGKKSTKPNNKKAKAKKLAGGGDNELTIKPVNAVGSGGSGAIALGSKSTQKNNQKKKNSKGDSWLNLLSRAALSSLVSFLVLFIINLLIIYMIMFKNPDIADKLVEYIPHQYRDWILTKTEIFRLRVTDWISEFRTPPEEH

SEQ ID NO: 6394 - DNA, 35048 bp, DROSOPHILA
cgaagtcgaaacaaagttaggcgtattttttttaccagaaacacttaaacaatttttacaaaaaacggatattaatgcaatcagttcgagacaagcagacagcaagcggaagacttaaggagataacaacttatagaggccataatcaaaggaataaagcaccatcagccagcgatgagaaggaacgtcttcaatgataaaccttcgaaaacttttagaaaatagcaaacatcccaataaaccacaacaattataaaacgcgagaaaggatttggtaaatcatctaaaaccagttcaacaaacaacacatatagtaaacattaaatattaaatcacaagttttagaaggcaaacaaagataaaaactcttaacaccagttaaataaaatatactaaaagaactgcaaccaaaaaataacatacaattaaatgaaattaaaagccataaagaaacttaaagccattggaaacaagccataaaagcggtccagaacctaaatattaaacacaaaccaaaattcaaattccgcgccaaacgaccacactgcgcaacacacgagcgctgcatccctggacttcagccgcattccaacactgcaggactgtcagctgtcagttttcctgtgtgtgtgcgcgcgtaagtgtgtgcgtgcacttaagaaacttaaattcgcgttcttggccaaaaaaaacccgggtttttaataagttatagcgttttcctcgactgagaacttggcccccaggcagacgggcacaaaaaccgccccagaaacgcgcccgccgccgccaaaaaggccgaaaacgccagcgaaacgcgcgcgttgagtgttttctgtgtggttttatttttggaatataaagcgatctgatctgaaaagtgtgccgcggccggattctagatattcagattcccagcacccgaaacccaaacgcaataatagacgcgcgcggtgccttggatctctacggctccacggtggagaacttttacctcagaatggatccgacgcgaggtgactcgcggtacaatctcaactactcgatgagtagcatagggctgagcctggcggatccggcggacatgtacggcaacccggccctgggggcgggccgcccgccctccggtggcctgctccagaacatgggcggcgttccgccgatgcagcgccccaatcccgcggcaggagcaccccctgccccgcagtgccaaacgctccacagcccacagcacgcctcccagcagcagcagcagcaacaacagcagcagcagcaacaccagcagcagcaacaacagcagcagcagcatccccagcagcaacgcggccttaagcgctccggcagcgactgctacgaggatcaccaccgctcgtccggcggactcaccctccaaggactggacaacgtggccagcggagccgtcgacgacagcgtagacaactacaacccgctgcccaacaagaagtctccgcctgccaacggcaaaaagacaaagggacgtgtcaaaatcaaaatggaatacatcgacaataagctgcgtcgctacacgaccttctccaagcgcaagacgggcataatgaagaaggtaagatcgctggagcacccctacgccatccccatccccaacgatattttcaacccaaccccgaaaccgaaatcgatccccatcccaatccccattccagccacgattggcgctgcaattgggatgttgacatcgggccacgtttccagcgcatgtgcaattaataaatgcttcagggattcagttgcgacggaatccagcagttcccccacatctctggcattgttctgcctccggaaagagcgaggatttattgtcaattggccatcggcacagtggtcgggatagctggcgcacaataggagaaccatctcggaatatcaagtacccaatggatatatccaacagttagaccatttgtgtacattactcgtcagttcaaatattcaaatctttctcttgtgtccattaccaattattagttccacttggaagtatgtttattggaccaatacaaattctgcttggaaattgcttataggccaccttatgttgggatcccaaacctaatgctaaacaatttgatttaagactcaaaaacccgaaccactgtgcccgcgaagtacctctgctcatctctagaacagtagccgcagatcctctgcttttggccagatcgcgtctgtttggccaactgttggccgctttggcggcgttgtgtaagcgcggtagcccacgattccgcgttgcctttgttttcggcttcataaaatgttaatttgccgccgcaattgcattcaaaggaggctcctgcccacggagcactcctcccccgaaacaattgatgcgtgctccttgtggatggtggcccacaagtcgctgcaactggcaacgttgccttggcattttcaaatgaccaattttcacacgcaaacttacataatgccactgcattagctcctgctgctttccatcgatctgggggccgtatatgaaatttttcacatttctgaaatagacttccctggccactagctgaaccaagccccgatcaaaatcagacaaaaagcatcaacatcgcggcgctaaatcacgatctcagcacgatctttgcccaagacacaaaatcttatgaaatatttgacccaagcagaccaaaaacaaagacgttggagcacttaaatttaaaaggggagatttgggaaaacgtttagcttgttgtacgctagaatggcaataaaatgtcaagtataaactaaatgtttaataagtttaatttatttactgaagtttatttactttcattattaagtcgcaaagtaacttatgattcttgaattagaggaagtgagcaacccaaacctgttaaactgttcctctttacccaatctcagttgatcccgaaatggtgtttccttatcggtgagggtatccaaaacatttgacccctgggacgtggattctcggggccgagcttatgacaggcgcacgcccgggacaaaaggccgcttccataatatgcgttccaaaaaaatatcgttttggtgactttgatgcggtccctcatcgatgtccagccggcggacagttgacaggcagacaatgggattttgacttggcgctaccagcggtagcagcaaaaagcgcagaggcaatctgcaatccgccatcccaatcccaattcgaatccctagcagccaaccaacaaattgcggccaatgaacttggcccagagagttgtcgcgccaacctgctggcatgctttccactggccaattttggtcatttcgatctggccgagagccggggctcttttggcgtgggtggcggtggtcaaaaggccaaaaaaggcgacgagagtgaaaagtgagctaatgtccagaagtgatctcatttgctggccagcctaattgcgtgggccgcatcatcgatggattcgcagctttcgcttctggcttctgcataatgcacggccatcgaacaagaagccatcgacaagttcccaacaattggccatggctaaaagggcagccgggcgcaaaatgccgccaaaaggtgttaaattgaaatcacgaggcctgggattgggattggggattggggattgggcttgggaattgtttgtttcggggccagcttgcagcacggaagcttaggccgcagcctcgtcggcagattgtgcccagataagacccagaaagccgggccaagaggctccacgtcggctcgccttttggccacatgcaacaggctgtggcctctgccacatacggggaaaacaggcaacaatcggcttctaacaaatgactctccatctggacggagcggtcgcggtctctggggctgccttcttgtcctgtcaacgcgctcgtaccccaatcctcgcccgaatccgagtcgtgtccttttgtctttgttcgaaattcaaattgacatgaattgttggcctgctcgcggtgcccaagtagccttccttcctagccgcacaatcgacacctactcagaaccagcatctgaatcagaatccgaatgcgatttcgaatcggaatcagaacgagaataatcggaatccgattcagattccgctttcggaccgtgtcaattgtttgcatttacacatgttacacataaaattggcagccaatcgatgtctggcagggatggggtagcccaatccaatccgatcctatccgatacgatacgatgcggtgcgatgcgatccccggtatccaatacccaatacccaatccccatcgcaattcagccaacaatgtgtacaacaatttcattaatattaataaatgttctcgaagcgtttgcttctcggtcggtcggccagttatttatgcgctgtgtttttcgactcacggcagcaaaagtggcggaaagcagcagaaactgtttccagccagactgactcgactttatcgcttttatagtaattacgagctgttgataggcagcttaggctaccgtctaatgtgcagtaacacggtctgtggcccggggaactatccacgtccaccatggagctccatcgcgatgcttgcgtgactttcgggtcttttgcgtgggcgtcctgtgagaaaaacaggggaaagaagggcctgacttggcgatttctctggcatagaggttcgaaataggttggccgtgatcattgaggattaaagatgttttacaaaacgtaaacgattgcttgggtgacaccatacagtgatatgggtacctaggcagttaagtagtgcaatagataaacactcagattttaataataaagattattacaaattaaacttacctcgggcttacttctagccagaatttctaaatactatagttcggtttcaagtttaggtgactaactcaagcttcccaactcacgctgccatctctggtaatttaaagtccggcacattcgggatcccgcttaacgcaccttatcgctgcaacataatcgcatagtttggtggggaaatttatgtgccgctcgggcaacagaggcacacacgcttctccagtccgcagataggcgatacagactcagatagcatcgagtacttaccacgatcctctgctctctccctccactttcaggcctacgagctgtccacgctgaccgggacgcaggtgatgctgctggtggccagcgagacgggccacgtgtacacatttgccacgcgcaagctgcagccgatgatcacctcggaggcgggaaagcagctcatccagacctgcctcaactcgccggatccgcccagtgtgggcggcggcgaccaacggatgtcggccaccgggttcgaggagacggagctcagctacaacatcgccgacgaggactcgaaagtaagacaattgatatacggtcaccacgggcacgctcatctaggtcacccgccggcgccgccctcgcactacagcctcgagcagagcctgatgcagtcgggctacagcggcggccaggcctcgccgctttcccacgcccagtacggcggacacgggcaccacgcccacgtgccgcacgtgccgccgccgcattcgacgcactcgcacatgtcccacacgcatgcgcagcgctaggcttctggctaggattcctaggcaatatccgggacttggtttgttgtgcggtgagagcggaaggggtgtggggtgatcctgttcaggctaaagctttctttatcagttcctttaagataggcttttaggatgctatgatccactgggcttcgccttctggcttttacttgccactagcgtaaagtacaggctagttaacgaagttccatagaccacaccaaaatgaatggaccacttaaaaattgtgtattgctttaaagtctaaaaagaccgctcctcgacgttttcccgctcaaataccaagtccggttagttagacagcagttgatatgtttagcagatccaaagtgcagcaaatggcttgatggcaacttcgatacgcgtactccgtagttcgtatttcggatccatggccaatacgatctcgccgctcgttttgttcttgtttaccgcagatagcagtgtttgtgtttattaatttacattacatgtatttacgttttttgtatactagtcaagactctacttaaaggcgactgtgccatagcaagctacagcccctccccagtacatcgtacttcccatagcaatagacccagtgcccccagctgcagcttccaacccagtgccattctaccgaaccactagataactagaccactagagacacatcgagacacattgagacacagccgagactgcttagttagtccttaaagttaagccgcaagtgcaataccacacacaacttagcagaagtagcagaagcaggatactttccgcaagtatttgctgtacagagtctagagtgtaaacagctactgtgcgtttacgaaacttagttaaaacaagttgatagcaaataatataaagcaataaacgtcgaaggcgccggcggccgttttcctgagtgtgagtgaatgcgtgtgtgatgagcgtgctccgtaaagttaagcgtactttccagattcgttagcctaatgttagttgtattatgtttattcgatcgatccgattggcttttactgacccctactaactggagtgttgcatgaggaatcgctcagaaagaatccagttccaaatcgctgcgtgcaacatggccactttctactcacatttgagctgtttgcttttcgcctttctactaatatttattgtacccatacttgaacctaaatacctaaataccaaattaaaacagctcaaagcaagttctctcgtatccattttaattttatttataacttaatgtttacttcgttagagaaaatactcaagagcacgtaatttaaaaaatgaaacacacttttctgtcaaacagaaagccgagtaatttcttacatactagttaaatttattatttaaagatcgtgaaaacgacgcaaatccaataaccctaaagcaatttacccagtaagccatcaacaacatatgtttaaaacaccacaaaatagtatctacatatcagaaacataaatatatatatatattatttagcgcaatattacgaaataataaacataaaacgaacaaaaccggagaacccaagcatatttccagctgtttcaagagcaaggttaagagcaccgcgataagactgaacccagacccaacgtttccagttgctagcctacccacatctcaatcccatctagcagtaatcccactggcgagtgggtcggctctccatgaatgaatttctgatttcgatacgttcgtttctattttccttcgatgttgcaaagagcttccgcttcttccactagagaccccaataaaagagttttggctgcgggggctctgtgacgtcatgacaaccatgctggcgacgagttcataaatcgatcagagccaccactggctcgtcatgcaccaccggccaagtcagtcggtcccctcactttcctcccggcttggcatgcaaatcgcgtttctggctcgtacttttcaatgccaaaagcttggcgtaggccccactggcctcttggctgccccgatgacgtgtgccacgatccgagccgcagcccctcgctgcttctccccatccgaaaccaagccaagccaagccaacccagctcaactcaactcaactcaactcagctcggctcggctcagtttttccattcagcatgggccgatgaatgaaagccaaatgttgtgggtgtgacaccaacgccggctcaggtcatcagttgttgcgctacacacaaagaaatggttgcgttcacaccgaaagtgaagggaaatcgtttaactaagcccttttcacatttaatggctcttttgagcgtggtcagtacacattagtttagcacttaagatacaatctcgaccgagtgaatacacgaagtatcgctgagctggccccgaattctttctgtgtagccgttggtagctgcctgccagctgactgataaaataaaatccataactcgtaccgctgctgctgtaggtcgttctgccgccgccaactctttgtccagccaaggttaattgccgacttgcagtgggctgctcactagatagatagatacatatatacatgctcatgtagctgtgtgtttctggctccgatcgagagtgcgatccatcagtctgcgcgggtgtcttggctacacggatcgccttctatggtcgctcacctgcgcatcatcatcccagccgcccacgaagcccgaccagtaaaaactgcgagtttgttggcttctgcgattcgtatttatttcaaaattttattcaagatgttatgcttcaaagttatcaactatataaatgctcttttaaatgattgttgcatgtgtgtatgtactaatagccgaatgaaattactgtagcttggcaatgactatcttttagtactgtactgaacaccttgtctttgtcatctttccctggcaaatctagtgctgtgaactctacccccagttcctcatcattacgttttctaccgaattagctggaatagaaaacccgaggcagaaacaaagaccaaacctctggccccggcttcctcctcggcggtgggagcacgggtgcatatcagtttgagaaattaaaagcattttgcggtttcgctgactatcgacgctgcgtgccgctcgagcctctaacgacatttcaatgatttgctgcttggctctggctgcagttgctgttgctgcggctgctgctgctgctgcgcctgtaacatggccacgtgcgcagcacaagacgcaggcggaggacacaagcatttgcaatgctcgtcgattacgtacgagggcgacctctgtcaggcagcgtccagctgtccgaaagccaccaacaacgcagccacgcaaggaatctcctccgcggattttgtgtttaagccgccgctgcgagttctaaccgcatgccgccacaatgtcctcttaatttcctagcccgcgctcaccacgcgatgatatcgccggcgatccactggagggaccccgtctccccgtctccccattcccatccccatcccaatccacagccacaaccccagtccccaatccgaatcccatccagacgtcgtcctctgtctgtgcgctcgttttttaattcaactgattgtactgcagcttctggaattcggcatttcttaaagcctttgcgcacacacattgtgagtcggcaacttctggcgatccaagtcgctgggtacttggtacttggccacttggccatcgacaacctccaactcctgaagccgctgctcctgctcctgctgctgctgctgctcctgcgccgccgccttcgcaatctgaaaaggttaagaaatgacaatttgtgagcgttttttcttttctttcgtttcgtttcgattcgttttgtatttctgtgtattgttttggttttgtcgtttcttcgtttttgccagttggccagttgtggctgtcttgcttttggccctgttgctttcattgtgattatttaaaagccagactgaggccttaacgaggcgcttttggcctttcagcaggactcacatttagttaagcaattattgggccgcaatgcaaacaaataatgcgtacattgtgtgcctcagagtctatctgcctcggtggtttcccgcccgccagtccgacccgacttactccactgattttccaagttaatcaaaattcttggctatccacgtcgaaatctctgcgaccttccccgcccgcccagtcccctcttccatggctcttctagcgccgccgagccacgcccatgcaacgccccttcagtggagcgtggcggaggcagcgatttggaggaaacttatggctttccgccgtaccgctcccgcctgggatacttatataggcacaggcagctccgcttcactgaccaatttatggctgggaatatttctttttacaagtctggttgccacatagtgtggatttttcaacggagatgcttgcctaattgtgccgggaaatgttgggatgaaatagctacaagttaccatttaaacaacgtggattcgtagttaagctacgacttaaattatctgtgtaagatacaatcaatgtctaatggccagatattactaaatcgaaatttataccaaatgttttagaaatagctaagaaaattacttagatttccgcttctagttgtttgtttaattaatggctttcaatgagcttcgaaataacaagcttggctcataaagtgttgacaaatattgttgaaacttttcccgctgactagaaagtttccgccattcaagggtgtatctataaatttgtatcaagttcgagctgaactccaggcaaactgtactttatgttcacacatgaacacgaatatatttaaagacttacaattttgggctccgttcatatcttatgtaaatgaatcgagagcgataaattatatttaggattttgttatctaaggcgacatgggtgcattgctcaaaaacatgtaatttaagtgcacactacatgagtcagtcacttgagatcgttccccgcctcctaaaatagtcccttagtgggagaccacagataaggtcctcgccgctcaagataggcagatgtgcccgagcgtgggacctcgataaggcggggactatttacttaggcctctgcgtaggccatttactttaagatgcgattctcatgtcacctatttaaaccgaagatatttccaaataaaatcagttttcttacaaaaactcaaccgagtaaagtcttcttatttgggattttacatttggtcaatcaagcctttaatcgactctgcagtttccccctaccaaaggtaaggaactcagagaaaggccagctcctttaagcatcttacagctaaaggagcaaaaataagtgactcttgtttccccctaccaaaggtaaggaacagagtataaatataaaagcaaaaagatacaaaagaatcttttatgttttaaaacaagcaccttatagtctatagctaaaggttgctttgtgtaccattataaattgtggtaaggcgtgcttgaggccatacatcagcaattgtgaaattaaaaaggtgcataacaaaagtgccttataaatgctctaatagcattaaatcagctcataaatagagtgcagtgtatatgccataagagcataaattaaataaaaagtgcctgaaaacagtgccttataaatgctctaatagcattaaatcagctcataaaatagagtgcagtggtatatgccaaaagagcataaatgccgaaataaatggctaaaaaacaaaaaatctgactgggactacaaaaataataaaacggtgccaaaaaaaaaaaaaaaatcatctttaaacatcgacggagccttaaagaagagaaggaagtcaaattcaaaggagcctctaccagcagcagaagcagcaacaacagcagcagcagaagcagcaacagcagtagcaacagcagcaacaacagcagcaacagcagcagcaacaacaacgacatcagctaagtcaaaacaagaattttctgtttatccaaacacaccatatatatataaatacatataaaatacatataccaccgtactatatatattaagaaattcaaaaaatttttcaaaatgatgtcagaaagactattcaattccttaagaagcagtccgaaattattttggaaattagaaagttggaagtaaaaccaacattacagatgtagaaattctaaaattaaatgagcttcaaaaaatgtttcattggtaatcatagcaatttgttaaagatcggcgtgtcgatcatgaatattttaacgcgaagcagtatgatttaataatgatggtgtagaaaaaattaaaaataaaaatgaaaaaattaaggggcgagtcggtagaaaacactttccctaaatcaaacactgtccctaaatcaaaccctccccctacattaaaccttgaaatgcgtggtcaccctgaaaaagagggtatagcacaaaacaacgctttaaaagtagagcaggcatttcgtaataatgttggccatttcgagtatatctagaagatacgtctaaactaatagacagtagtccagatttccttaaaataaggaaaaataaaattgaatttttatggcataaaatagataacctgatgaacaggtgaatagtcattttgagagttcgctattcgaagaagaaattagcgaacttgaatttgacaaacaaaatattcttacagccattaatagtcgactcagtggcacaataaataaagtgaaatgtcgcggttgttaaggcggaggagttaccaaccctgcctaaaatacagattcccaccttctttggtgattccaaagaatggggatctttttaatgaactctttacagagctcatacatgtgagagaggatctcagtccttctctcaaatttaattatctaaagtcagcattaaaaggagaagccagaaatgtggttactcatttactgctcggctctggagaaaattatgaagccacttgggagtttttgaccaagcgatatgagaataaaagaaacatattctcagatcatatgaataggcttatggatatgccaaatttaaatttagaatccaataagcaaataaagacatttattgacccgattaaccgagtcaatttatattataaaattaaaggcacaattaccagaagatgtggatgcaattttcgctcacataattcttcggaaattcaataaagaatcactcaatttatatgaaagccatggtaaaagacaaagaaatcaggcactttctgatgtcatggactttttagagcaaaggctcaattctatatcatcattctacaggaagtaaaacctgtaaagaaaatgattaataataacaagaataaaaattatagtgacaattgtgcatattgcaaactaccagggcattatttaattcaatgccataaatttaaaataatgaatccagcagacggtctgactgggtaagaaaaaatgggatttgcctaagatgtctgaggcatccgtttggtaaaaaatgtataagcgagcagctttgttcgacttgtcgtaaacctcaccacacagttacttcactttgcaggtcataatccagaaaaagtgaataccgtgtagaacaacaggtcaagccttgttggccacggccttgattcaagtaaagtcgaggtatggaggctttgaacaattaagagcattgattgatagtggctctcaaagcacaattatttcagaagagtctgcacagattctaaaattggaaaaaatttcggtctcatactgaaataagtggagtatcttccacagggaacgtgcatctccaagcacaaagcggttatttcgataagaaattctccgaaaaatttagaaattgaagcaattattctcccaaaacttatgaaggcaccttccagtcaacacgattaatgttgatcagaaaaaatggaagaactttaaattagccgaccacgattttaataaaccgggtcgcattgatttaatcattggagcagacggtatatactcacattctgcaaaatggagttataaaaatagacggtctccttgggcaaaaaactgatttcgggtggatagtttctggatgtaaaaaatccaaaggaaaagaaaccattgtagccacaacaatagaaataaaagagttagatcgctactggggaagtggaagaagaagaaaaagatgatatccgagtctgaaatctgtgaaaataaatttatcaaaaccgacaaaaaaagattcagatgggcgatacattgtgtcaattccattcaaggaggatgtcaccttaggagattcaaagaaacaagcgatagctcgttacatgaatctggagaaaaaactaaaaagaaatgaaaaacttaaggttgactacactaaattcatgaatgaatacatggatttaggacacatgattgaagtgagtgatgaaggcaaatattttttaccgcaccaggcagtgattagagattcaagccttacgaccaaattgagagtagtttttgatgcttcagcaaaaactacgaataacaaaagttttgaacgacataatggtgggttgggccacgagttcaaaaagatatttttgacattattattaaatggagaaaatgggaatttgttgtttcggcagacattgaaaagatgtaccgacaaattaaaatagataataatgatcaaaaatatcaatatattttatggagaaattctccaaaagaaaaaattaaaacatataaattaaccacagtcacttacggaactgcatctgcaccatatttggctaccagggttctggtagatattgcagataaatgtaaaaaccaagttattagtgcaataattaggaatgatttctatatggatgacctaatgactgggagctgattcggtagaagaagctaataaattaataacattaattccccatgaattgcagaaagttggattcaacttaaggaaatggatttccaacaattccaaaatattaaccactgtggaggacacaggggacaataaggttctcaatattatcgaaaatgaatgtgttaaaactttaggactaaaatgggaacctcaaaaggatttatttaagttcagcgtaaattgtaatgatgaatcaaaaaatataaataagcgcgttgtgttatcaacgctagcaaaaatatttgatccgttaggatggttggcaccagtcacggtttcaggaaaactttttattcaaaaactttggataaataaaagtgaatgggatcaggaattatccatagaagataaaaattattgggaaaaatataaagaaaatttattattggtagagaatattcgaatcccaaggtggattaattcaaacagttcttcagtcattcagattcacggatttgcgggacgcctccgaaaaagcatatgctgcagtagtctatgctaagtagaccctcatgttaatataatagctagcaaaagtagagtcaaccctataaaaaataggaagacaattcccaaactcgaggctgtgtgcagctcacctgcttagtgaataatccaaagactaaaaggatcaattgacaatataatgggagatctatgcttgggagtgattccacgattaccttagcatggattaacagtggtcaaagtaagatcaaatttataaaaagaagaacggatgacattcggaaattaaaaaatactgatggatcatgttaagtcagaggataatccagcagatttagcatccaggggagtggattctaaccagttgatcaactgtgatttttggtggaaaggtccgaaatggctagcagacccaaaagaactttggcctcggcagcagtctgtagaagaacctgtcttaataaatacggtattaaatgacaaaatagatgatcctatttacgaattaatagaaaggtattccagtatagaaaaacttatacgtataatagcatacataaatagattcgtgcagatagaaacaagaaataagcctattcatcaattattttcagtaaaggagataagaatagcggaaacagtttgttattaagaaacaacaagaataccagtttaggcaagagataaagtgccttaaaatcaaaaaggaaatcaagacaaataataaaatattggcattgaatccatttttggacaaggatggggttctaagagttggaggaagattgcaaaattccaatgcagaatttaatgttaaacatccaatcattttagaaaaatgccacctaacaagcttattaataaaaaatgctcataaggaaacattgcatggagggataaacctaatgcgaaactatatccaaagaaagtattggattttcgggttgaaaattcgttaaaaagtatttaagagaatgtgtaaccgtgtgcaaggtataaacaaaatacagctcagcaaataatgggtaaccttgccaaaatatagagtgaccgatgacattcccgtttcttaatactggaatagattaccgcaggtccttattatgttaaatgttcaaaaaatcgtggccaaaaaacatttaaaggatacgttgctgtattcgtttgcatggccaccaaagccatacacttagaaatggtaagcgatctaacttcagacgcatttttagcagcactcagaagatttattgctagacggggaaaatgttccaatatctattcagacaacggaacaaattttgtaggagctgcaagaaaattagatcaagagttatttaatgcaatacaagaaaatataacgattgcagcgcagcttgaaaaggacaggattgattggcattttattcccccggcaggacctcacttcggaggtatttgggaagctggagttaagtcaatgaaataccatttaaagcgtataatcggcgacactattttgacttatgaagaaatgtcaactcttttatgtcaaatagaagcatgcttaaattcaaggccattatacactatagttagtgagaaggaccaccaagaagttttaacaccaggtcattttttaattggaagaccacctttagaaatagtcgaaccaatggaagatgaaaaaatcggaaatttggataggtggagacttatccaaaaaatgaagaaagatttctgggttaagtggaaaagtgaatatttgcataccgctccagcaaaggaataaatggaaaaaggaaattcctaatatagaagaagggcaaatagttttattaaaggatgagaattgtcatcctgcaagatggcctttaggaaaggtggaaaaggtgcataaggggaatgatgataaggtccgagtggctaaagtaaagatgcaggaaggatatatcacctagacccattactaaaatttgtcccttggaaggaataaagtctgttgacaaaaatgaggctgaccaagagccaaaaagacgaactagagcgacatcgggaatgtccaagatcggaatcattatggcaatgttggtggttgtgttaagttgtcaagtttctagcgcattacctaaagatatagcaccaagatattctatagacaaaaataaataaaacctcagcaatatatctagacccgctaggagatgttgagattgtgagtacttcttggaatttggttatctattataaaatggatccatattttaaaatgttaacaaagggtaatgcgcttatacaaagtatgaggaaagtttgcgaaagacttcatagctttgaagagcaatgtagtctagtcttagataatatgcaaagtcagttatcggaacttgaagaaaacaataaattgtttatgatacagtctagatctagaagcaagccgtgctcctttcgaatttatgggttccttgtatcatattttatttggtataatggatgaagatgatagagagcaattagaagaaaatatgaagaatttgttagataaccagaacaaccttgataaactaattcaaaaacaaacatctgtggttgattcaacttctaatctattaaagagaacaacagaagatgttaactccaattttagaagtatgcaaataagaattgagaacatgacagaagttcttaaagaaaattattatgtttataaggaatcaataaaattctttatgattacgaaacagctacactcattgattgaagaaggcgaaaaaattcaagcaggcattataagcctgttgattgatattaatcacgggaggctaaatacaaatattctcaggccaaatcagcttaaaaaagaaattgccaaaattcagcagagtctttcggagaacctagtaattccaggaaaacggtcaggtacggaacttaaggaggtgtatacaacgtccgaatatttaatttataattttgagatagattcctatcacataatgacggaagccacattaaatcaatgtcagaaatggcaacctaaataagagaatatgcaaaggaagttggccctggaattcagcgaatgataattgcatgtgagattcagcctctaaagccagataaagcggcgaactgcatctataaaacagtagtcgactctaaaagttactgggtagagttagaaaagaaaagtagttggttgtttaaggttcctgcgaattcaaaagtccgtctgcaatgtactgggctctcaaattgaattgtttgatttgcctcagcaaggagttttaagcattgcgccatattgtacggcaagaaccgacgataaaattctagttgcccaccataacattcagtcccgaaagtgaagaattattatcaacaccttatatagggagaagttagtgaagcgcccgaagattattttgggatccgctgaaactatcaatattaaatcatactgaggaatttgaacgattgaataatgaaattaatttatgaaagagaccatcaaaaattgaaagatttacatttccatcatatttccggacatgctggattaattattgctttaatactaatgatagtttaataatatatttcatacggaaatgtgctgtgcaacaaagaatgcaagcaataacctttgcaggtccggtgccagtactataaatatcaatagtaaataaacaataaaataatataacaaataaaaatatacagtccactatatagaaaatgtacttctacatagaaaaagcaaaatgtttaaaataagttaattgagtacaaattgttgaattaaaaataatataaaccataattgtaatccaataaaattaaaagccagaaaaactaggcccattgaaatcttagttgcaaaataaatgaacatatatcaaataaatacagcccactactgttataaatgcaactaatatactaatgtacatctcagcttgctggccctttggcagaatgttcacacatgaacacgaatatattaaagactacaattttgggctccgttcatatcttatgtaaatgaatcgagagcgataaattatatttaggattttgtatctaaggcgacatgggtgcattgctcaaaaacatgtaatttaagtgccactacatgagtcagtcacttgagatcgttccccgcctcctaaaatagtcccttagtgggagaccacagataaggtcctcgccgctcaagataggcagatgtgcccgagcgtgggacctcgataaggcggggactatttacttaggcctctgcgtaggccatttactttaagatgcgattctcatgtcacctatttaaaccgaagatatttccaaataaaatcagtttcttacaaaaactcaacgagtaaagtcttcttatttgggattttacactttaaaagaaagaaaacatgggtagtaagtagccaaagtttgtaggcaaaactttgagctggcgattgcgattgcgactgtgcccatctcccgaatccgaaaccgattccaattccgattccgatccattatataatgaagcacacgcggacttcccacatggaacgcggcaaaagccgactctacccacagtccacagcacggccaacaaaagttaacaacaatcgatgttcggctgctcagctcatttcctgcccacaatgaaatgttgaaatctgttgagacgtacatatgtgaatagtaattcgcatataacattctctaaaacttaggcttgttggcccagaaccataccgtaataccacgttcccgctcggcgctaatgaaagtgccataaattttcaattaaagcctggccaaaccctctgattggcaacgattaagttatccagcgaggctcacttcgcagcttcgctgcaattatttgcgaattaacatttataacacttgatcctgtgcgtatatccgttgaaagctgggctgacttgacgcttcagcgcatttaaaaagtatttttgtgccactgccaccatctgcagcagcagcaaccaagtggcggagtgcagcggcaagaaatatttgccgcattttaagagtctcggtccgcccgtccgtcccagcgtctgtccgtttgttgtatgtctgttatgcggattcattgcaaccgcagccacttgttgcgagttgctgctgctgctgctgctgctgcagttgcgctgttgctgctgccgttcctgctgctgctgctgttgtgctaaatttcacaccgacaatgagcgcgagccaacaatgaatgaaaattactgggccgaactgaactgaactgagccgaagtgacggactgggatggccaaacggccagcgaccgcaggctaaatcgataccttaattcaaaggcacgccagaccgcatttttggataatatactccagctccatccgctccagtgagctgatgtgctcacttcaactgcaactttagcgctggtggcacgcgtgagatttcctgtctgcagttttgggacatttcatatcggattgcagccaaatttggtgtcctttgtggcacgcggggtcaaagatatacacacataaacatcgattcggcgggcttatcggcctgggaattgtggcaatggcagcggcgaaggctcattgttctggccgtgtgttgccagcgtttgcagcggcttcgccgttgtgcaacgactttaaaaagctgttaacatgcgttgtcatcgctgccatatgttgcacgacaggcgactcctggtcgccaccagcagccgtactccatccaccgccaccgtcattgatcggcgatcgcttttggggcagctgagccaccggcgacggcgacttgtcaaccacctggcacaactgcaccacttttgtggcggttgcatcaacgggctgaacttcaaaccggcggcaggcgttggtttccctcgaaatctacgcgaaagtggaaacgccagcgatttgcgtagcccgcagcgatagttatagcttcctcagctcacatgtgccgtcccttatttggaagcttgtgtgcgaagcgcaacaattatatgtacggcgcggcctgagcggactcacacaggcgagcgagcgcgaaaaaaaccagcacaaccacatcagtgcacttaaaaaaaaaatttgattcatcttagaaattggccatgctgcagacctggcctctggctcttcattagtacgccaagtaaatggcaaggcatttaaacagctgagaataagaatatctcattactatatagtattttctccgagtgtagcgtcggcggccgaaagccgcgtcgcgggttcagactaaagcgtgtgcagcggaaaggagaagtcgtcgccacattggctgacttatgacgaaaataattgctggctattgctatcgctaactggcgatcgcgtcagcgttatcgatgattcgtagaaagcccatcgcagttagcccgttttcattagcccgttgcacgcggcgtatgagtaatcaataataatttgaccgccgtccccactgcgacttttcttcgtcgcttcccgcgatgtcatcgtgtgtgtgtgtggtcccaaatcgattgccataataatttcgcgcagatatagcacggcaaatgcaggcagaaccacttcgactgcgacaatcatcgtactcgtacagtattgtaatttacttaatttcgaatcgttctgaatacgcaaattttgcatttgcaaagcgggaaaaaagtgcaggaaaacattgtccgtgcattagttacatgtctatagtcgcgcttgttttcgcttacttgctgttatgaaaggcgactgcgcggcgtctgtttcgcctgctttttggttgtttttcagcttttctgctgcgtttgatatgcaaattgtgtgcttttacaaagagtcgcagaattatcgtatctgtcgacggtcgttgttgttgttgttgctgctgtcgctgttgtgggagcttcgaagcgggagttccatatggtaattccatatatccagtcgagcaggcacagctcagagaattggatattaagtggctttaaagttcacatttaagtatttataaaattgatcaaactttacttcatcctagccgataaatacaacatttggaagcttctctagatttacttaacgttttccagacttttgcttcctgctgcagggaacacttttaggggaaacctgcgagtgccacacggcgtatgcgcaatatttgcgtaagatctttggaaatcagcaagcagctcggatcggctttggtttgggtttttggtttgggttttggtttggctgccacttacgcgacaacgccttgacatgcccacacgtccggcgacaacaacacccaacaactttgcaacatgccacagcattttggaatgttttgccgctgttgcggcgtgtgagaattcacgagtggatgtccctcagtggatgcgggggaaacccttaataagggagcccaaatttataatgtggcacgcaattaattcactgccaaagctgccaagcgaaggcgcaaaaattatcacaccattcaaatgacgctcacgaatgtttttcgagccggacttgcggagctggtgggattggctggccaccagcgacttgcaacatgcaacaactggtggcaagcaaagtcgacacattttgtttgttccgaaccgttctctttggcggcaaacatttaacaagcatcgcctgtccgctggccgaggatgccacctagaaagctcacgctaggcgtccaattggctggagttgccgccgatcatggtcatgccacatggtgcccaccgtccattgccttgcgcccaatgactggtgactagtgcctagtgccgaatgccaccaagtggacaatgcccgggtcttcggccggtggtcctttgtctcgggagcgctccttgccgcctgtcagtgctaatttgttgctgctcgtgcagtgccactaaaaatatagccataaatgctgatgggcagggaggatggaggagctgctccgctggtcgagggaggagaaatctgcatgtccttaatgccggcaacgtgcgagttttacaaattacgaaatgagcatccaggcagtcgcggtccactctttttcccacgtctcattaaaattgcagtttaaattcaagatgctgcctctgttcttttactttctatcatcgtcatcgagtcaccgagtcaacgaggcagcggtgcagagatgcgaccaagacgacgtcccatcgtcattattgtcaactctcaacgagttgccttgccaatcgtctgtcgtctgtcccggctatctttctgcctgccgtttctagattgatgtctctgcagtcgggcagacagtcagtcagtcggtccacgagtccatctgtcctgagtccatctgtccatctgtccggccgtccgacagtcccgcggaattatgcgaggcggaggtgatcgctgaaggggctggagatgaagttggagctgggggagtgggcagaggacggcttggcacagtttgcgcacttcggcatctcactgcccctggccgagatggaattttcgggaggagattgccccaacttcgagataaggcacacaattttcatttgggagctgaagaatttcgggcactatatgtgatatgcgtcgaaaatgtatttattaaacgtattttgacgcatggcctaaagtatgttttactttgcaaatacaaggaagaaaataatgacattcgaaagtacccgaaactcaaaaaagaaacattagatacattatttcaggcctatcttcttttccaaattcttagtatttatcaaaactgtgttctatgatagatcaagtttctaaataaatgaagtgaaaactctggaacaaaaaggtaaactatctcttggatatatatctattctgaaatctattctaatgtttttgtcagttgataacttctatgtattgtatttcacaagaatgaagttctcatccgatccgcaagttcgttgtaattgtgcaattcttctgtttgatttggccgcttagttgcgacgtacttttagctgtgctgcccacgatgtggataattgtttagctgttattgttgttattggacgttaatatacatttgattctggttatacatataaaaagagaaaaacgtggagtgtgtgtgcgccttaattaaaactgcggccgctgctcgtaggagttaattagactgcggaggtgtacgggcccagttttcagctttcagttttcagttcgcagctcccagtctcagatctgccgatccggcgatcgttcgctttcaagtcaagccccagctattagtcgctcaatattacgcgtttggcggacaacattgttcttactttttgcgctccccgtgttctgtgatcttgacttatcgacggtataggatggatgggatggggatggggatgggggctggcgaatgggggatggtataggggatacgggctgctgctgttcacacgctgctcatcaacaattgctgtcacgaattttccactcggcgctttttgcgcgcgctacttgtttgtattttaaaatttatttatttgtgcagcctccacagcctgcacagtcccagaagctgtggagctctttagctctggatctcagaggcctccacacacatgatggggatcctctcgtggagtgaagtggagtggatcgtcggcgcgtagtgtgtgtgctcctcctggagcgcactgaagaatgcatttgatcagataatgtaattcgcattttaaattgaggcgcattcccagttatacttcttctcacatgcatttacctggccgtcgcaggcatccttcgatttgcgaggcggaggagtacgactgctggactgggctggatggcccagctcctccagctccagctccagctccagcctcatcttctccagaggagccccacgaccattccgaaccaacattgcgggcgttgcattattacgcacaagtaaatcatcgaaagacgtcgctgctgtccaccgtcgaaagccaacggcttgttaagtaatttagttggccttttttgccaactctctcggcgcattttgctttttctatatggcatttggcatatttgtttaaagagcttcttgtgagctgaatttgttattgtctctataaacgtaataaattggcattcaattaggccaaaggtgttttgttctctggtgggtagaagtgctcgctcggctctcgacagttgatcaagagatatgatcgggtgaaattatgggaggattttatgcgaacattatgtattgtctaagaaattcattttctcaaaaaattaaggatcttcctaattatattaaccataatttacggaacagaatcggatttctagcggctgtactataattgcttcttatttatttctctttgtaacttgcgacgccttcacttcgatttcctgatcccgaaatcttttggctacttggccaatcttggttcgaggcaatctggcattagcatatcggtcataagatctataactaaactcggcggacagttgacagctactccgccccgcagacgaatcagattggatcggacggtacgggatcatatgggatccgtcatgcgaagaggctcgtcctgctttctaacgatggcatttttgatatttgtgacacgcagattttccatcagtgtcaacaaggcattgttcggcgaacgtcaacgtggttggtctgggtcctccgacctccggtccaccccgttctcccgatctctcccagacttccaactcctgactcaactgacagactcgatcggccgtccgatcgtcgtcgatttttcagcatcagagcaaaggcaggcaaagtcgggccaatgcaaaaccgaatgcaacgcgtacatttgcatagacacaaaattatatgagaccgaaccgagaccgggcccgaaacgcagcttcctggtctttttgtgtctgaaatttatgtacccacacaatggggtaacaaaacagttggaggagcccgtctccgctgctggggagccgtggggcccgtggtgttggcctaaacaccattctagcggttcgtttagcttgtttattggcatgaaaatctatcaaaaatgcatcatgcattttatatttattgtacgtaagtacaaaaataatgtgcttgacatttgacccggcccaaacgacaacagcgttatggccgtgccacatgttgcccatggtctgttgccaatggccaagttgccaagatgccaagttgccaggttgcctgcaagtcagccagtctgcaagtctaccagtcccgactgattatgaaactggctgctttgtcggtatccggggatatttggttattgtcttcggacttgcattctaacacaaatcaaaacgggcaacagcaatcccaacactcgccacttaaacgctcgtttataatgttgttaaaatacaataaatagccaggactcgcagcaggcggttttcactgcctctccgaccccagcagcccatttccattgctcatgctgatttatgaaatgtggacgccgatgtggcggcccacaaccgcaagcagaacccccaccccggctaaggccagctctcctctggccaggcttagactcagtcctgggtactgggtgctcggtactcgattccaggggcctctaactgggcaaagccggcaggggtgattgtgtgattgtgggccggtgattgagttgtcggcctgctgggctactgtttgcagtttgccgagtggcttatcttgcggtgcatcgcagctgttcgaccagcctgccagttgtctgccgcctccacttatcatggtccaggaggggtcatgggttacgactgcaccgggcacacagcccccatccacccaacgtgcggatcatatgatacagcaggtggtaggagaagagatgtttactgtcttacagagtaatatttgcccaatctatacctaatacctaatgtatccccttaaagaatcccgtactaattgccactccttagatacagttgcaatgtaccaccaagtagcgtcttatcacttagtatgccttactcacccatgactaggtgccagccggtcttgtccagatcttcttcagatctccttcccagcatccgctatcaccccgatcaagtctcaagtattcaagtcaccatcttgctatgtgtccatacaattttcttcacacactttccagccatcactgattgaccacactgttcacgtatttcaatcactgaagcaagaagccgaggatcgttcctcgttcgtcgtgcaggtcacgcagttgctcacagactgaaaacgtaaccccagcggtcgcacctcttgagtctcgagccggagaaacccgaggagaaacccgtttggaggggcttaagagcacgatccgcactgaaggcgatggggatgggtgcgatagggaggcgctatacgttcgatccgcttgcaccttcgagccgctctcttcggtactctcttaagccggctctctctcgctgcctattaggcacaggcacccatattccatattccacataggaggactatgtatgtagcgatgatctgtgggcgggacttgtggctgctcgtgtgcgtattagattttatagacccgcttgcgacttgctcgccaagtccattttgggccgggcctatgtacattggctgcgtggggacggatgggcaaacaaatgagtggtccccggtcgcagcgggcatgaaaattcaatttacaccaacctgctacaaaatgacgtatctctgcatgtatttagtggaatttattcagcatatactcggatatctgcgacgggtactccgttgttgggtgtaaccagttctcgagcaaaaaatatgaaatcagcgatcgaatatttcgtattccgcttgtgggcgtgggcacgctccattcctatagatggtcttggctttgtgtttgatcatttttgtaaaatgacacaattaaattatttccaaacagttctcggcttggtctttgactaatgatgaaagcccctggaactgatttgtcagttagtcttgcagtcgactgtaatggctgtggtcgatcttggtaccgtttacaggggggtttccattttgtcagattggtgtcttatatttgcacttgaatatggcacatatatagggtattctagtttttatcttcacaatactaatgacattatcgtctttgataatgcttagcgctctgtccaattaaaatgagtttcttaaaggacaaaacaagcattttaaaattgatttattcgtccgtaatgaaactatatcaacacgaccatggcacgcattcaatgggcttcccagcatttaatcgctgtcaggggctccagattgttttctcagttacggaccttcttcggcttggctaaatctagccaaacatcgaactcagttggttgggcacccacatcagggaacccctcctccatccttccaatcggaggcactttacatacgccgagttgagatcttgtattcgtataattgcaatttccattcaactgtttgttcgccgccggtctgtgtccgactccgtttcatttgtttggctagttttgcggttgttagtgcccatcataaattgcagaagcggccaggggaacccctcctagtgcctggccatgcggaccggcaggagtggccggaggcagcggcacaggctaatcggtggcgtttcatctgcggcctgctgtcctgttgtcctgttgcctcttgttcgcctgtcggcgcacgcataattaggcctgaggacaatcgttttggccgctgcactgcgagaaattggagcgagctgattaacatatatgtcacaaccaatgctagccttttttctaatcatatttatactgctcctagattgagttgctaagtttggttttcatctcatgtacaatgttccacagcaatctacattttatttggctaagtgcactagtagcaggttacccctcgcaatttggccaaataattggtaaccgaaaacaataagctcgttcctcgtactcccggccaatcgtggcatcctaatgcggcccagacatttaaatagatgctaattcccatcataactggctggagaccccatttcccgttctcgggtccaaatgaactaatgaatttgaacccgccactcgattgtggcagactcacgacgattggaggcgactgccaacttcctgctggccgctttctttgcgcgtgaatccgtgtaaccgcaacccgcaccagagaaaagacacaaaactgtgatttgcccaaaaacagaaagccggccagaaagcctcgctttgcggatataaacgctttaaaactccatattgtggcctggcccggatgcgacgacaattgtgaagacgaccaaatggccaaatccgactccgagtttagctggcaaatgtctacgcagtgttgtcgcttctgccgcttttgttgccctgcgctgttgccagatgccagttggttgttggtagttggtagttgcttgttggttgttcgcttgttgccgcttcgtgtcaactgacttctgcctcagctttcggcttttgtttcgtcgtggcaagccgccccattttgcttagccagccaagccatcccataacattttccccaacgtttcctgctcacaatgtggccactgtcctgtggttctgattgtgtgattcctcctacaaaatcaagggacagtggttcacaatgatgtcttacttgtaatgcagagatgtcacaatgaatagttctttatatgttatgaatatttatgtcagccaataaatatcattcacttttcgataatgttccaaagtttaggttgttatgaatactttaaataaacccaaacttgcaagcaagccactttggtatccaataaacctagtatacatttttcatagagactgggattgtgtttgttgatttcagtgatatgccgtttgggcaataaacaccggaattggagtaacccaaagccatttcatcttgtatgcaagcccctttgtgccacggttatcctttggcctgttccctgggcaattgtgcgttagatttaagtgctttcgtttgccaggcttaatttgcatttttatttttatgttttcattgaaagcgccagcatcaatggagcccgctgccttcggaggctttggaggctccggaggagagcacatttggctattcctttgttttcggcttaaagttatcagtgtcggtagatgtacacggcatcaacggtagcagcaacatgcaaaatgcaaatgtttattggccaaatgctgaacgatctcggccagctgagctgagaacacggtccttctggcttcgcctccgagcggccgggcgattggagcgggtgctgactgccacaaagttgtcgccttttgttgtggcagcaaccattttggtaaaaacaactaatcaattggcaaatgtgccatccgtcaatcacgcagtcagttggcggtggtgtaggtcacacgacaccacacggtggctgctgcggcgcaacttcggttgcaacttgagctgcaactgcaactgcagcggccaccgaattgactcgcattcacttttggggcacataaaatgccaccttggttgtgaatgtcagttagccaatttgaaaattcattcattcagtgctttgacgactcgctgactgactattgccaacatttattattagcctttcccaaactgactatttttggagctgccgatggccacacagcagcagcagccgcagcaacaacaacatgccgcacatatcacagcaagacaaatttctatataattgcatttgtcgcaggctctccgagcctcgaagttcgataccactggcgaggccagatcggccagacaatgccaggcattatttttatataaattgcatgccattggcccggccagttggcattccatccagccaattgtcggtggggagttgtggctcgagagtcgggcgggacagggttttcgctccgattgtgtttttgcctcgcttttagccaggctcaaactctaattgtcatttaatgagacacgctcggcatttgcgcacgacacacgactatcaatttggcaagttgcagttggcagcggcagtagcttcagattcagaatcggaatcagcagtagaagaagccaccgatgaatctgttcgattcgctgacaaccccaacttgtcgcaagttaaatgcgatattgatgaagcgcaagttaaaatggcatttagcatctaaaccagaagataaactatttaacagataagctcgaaagtgcatacgatgaaattaaaaccacctaaatcttctacagagctttttcatcgagtaagcgtattaaatgtttttaataatttggtatttatagtttaagcttcttggcagttgcatgcttactcactcgacattgttgtttttgcagattggtatatgcagcaataaaatgacaaaagaataatttcaaattgtattgtatattataaagtgttcttatgacatcagcccttaaataagatcgtattgttatttgcagagcaagaagtgcttagtagtttaatcggctgataatggatttaacccccatgatgatgtcggatgagaaatctgcacagtgagcaaataagggtcttttttcccggcgagttccaatagcctccgtggcgcaattggttagcgcgttcggctgttaaccgaaaggttggtggttcgagtccacccgggggcgcatctaactttttttttttgtttaaataaatagcttctataatgtttttagttcataaagcttttgcttattgcttttgtgcgacgaatctaaagtgtgcaattagtgaagggaaatcgcacacgctatgggaggtctgcaaatgaattccgtgaacacagaatattttaggcacctacgtatgtagaaagaacgacgacaaacagacgtataatttgatttttattgagcgatagcagagccattaccaggattatttcaagccttatatgtacgtgtgtgctgcagatgcaagcctgggcacaatgtaacctttacatgagcagctccactttcagccgccttctggtgttgtcaccggttttttcgcatctgcttgctgcaactgaaaaccacgagcgtaacaacagttgcacatgcacatgttggtgtcgccagcaacgtggccaagtgtatcatggcaacttggagacagtttgtcgtcgctggttttgctaattaaaatgtcttggtgctgtcactcaaaaggcggtcgcctgatccactggccaagtcgagtcgagtcgagtcgacgagtctctcggttggcagcggacaacgatgatgacgacgcccattttagtcagcagtcggcggcaacaatgcgattttgcctttcgcgaaatgctgccgctgcctctgctgcctgtgctgctgctgctacaatttcattggaagtccgctgatgatgtggcaggggcacgcggcgtatgcgcaatgccactgcgatctccctcgcacaaaatggcgatcgcattgttacagtttgcaattattttgatttattttttgttcgtcccagaggttgagcactaatcaaaattaaaatgacgcattcgctgccatcccatccaaggcgatgcgacggcaacgatgatgatggccccgctccgatcaccctgctcgccgtagagccagaaatcaatattctaaattctttaacgcgtgtgcacatttaaggcaacgccagctcattgagatgcgtgccggcaaacagcctggccagcacttatacgcaatttcgcgccatatttggttcaaacatattggatttttttgtcatctcgacgtctccttgctccctgcacttggctggcatatagaacagcggaccgggtagacagaagatcccagccgatccccactcccagccatcgtgagctgcgcttagcctaagatcagcctgccagactgtttgtctactccactaatcgggtgtctttgcttgtttccttccaggatgaccgatcgcctacctcgtcgggcaacgagtcggatgattcgtcggacgtggagatgccggcggaggctgctgaggtggcaaccaagttgccggccagcaaaacagaggtatcagcgcctccagcagcctcatgctcggcggccaccgcttcctctggccacaaaaccatgccagcattgaactatcagactgacaccaacagcggaccctcaacgtccaccgccgccggaggaggaggctcggcggacagcaagtacgtctactccgctgcctcgattgccaacataccgcagaagatgctgaggcagctcatccagtcaggccacttgcaggtgcacgccgaagagggtaagtagctctgaagtccccaagcaaagtcccaatatctaacagttgcttaacctacagatggcaaccagtatgtgaccataccgctcagctccacagcagccaatctgataaagagcaataagctaacagcctctggatcaggagcctcaggatcgggaacgcccgtcaagaacgatgccagtgccgataagcccttgaccatcaaacaggagttcgattagcccccagctacgcctactgcttatcatgagataactgagaactgcgtttatccacacttgcccacaccatctggaaaaatcatcagcaggagattaccattactcacccactactctcttaaagtctatccaaagttttcacgtcatcaccggggatgacgatcgcctgctaagtctaagtcatactatatctactataccgtatatatactattttttatacctatacaaggagaagtgaaaaaaaacaccctgagctggtacccaagatgccagcggcatatctacatacgtaagttttaaaagttttgcaagttatacaacgtacaggcatctgctgatatcgagattgtatgagaaatggaaaatgaggatgatatggatgttcctaaatcgcagagatcatgttgctttgttactagtttatattgttttattatacaatacataaatacatataaaccactttttttgcataaaaccaagaccacagtgtgtttaactatcaagcagccggcttaatcctttaaattaaaatgcttctggccaatttccaggcaactaagccaggtaattcatggctcaatcaagtgaaatgacacttaagcagctgagagcccgccccaacgattatggacacctacctgctagtatatatactatacgtagtgtgtatctatgagagtgcttggattaagcacactcacaaaaagagcaacggaaaatgccttttggtatttgccgcttgatggatgtgtccgtggtgggtattgtgcaattgattgattgacgacataatcttattgacacttaacctaattaaacgtcgctcattactcgtcggctcaggtagtcgcacttgccgtctagcacctgttaccgcttatgggccacgattggggctaaggagcccaggtccccgtcttcccattgatctctctggccggaggagaggcgcgggtcgagtacttccgcttcggcggaggcactttgcatgcaggaggcccacaaaaggccacaaaaggcgcaacgtgtggcacatactaatggttgccacttaccaattggagtactatggggattgtatacaatatttcttagtaaaataatggtagaacttaatatgtggaatatgagtctttgttcttacgataataactgggaaacgagcactaattgtatactcaccgtgtcttattgtcttagcttaaataaataacactaatttctaaccactctccttacataggctccaaaataattcaaattttttctaaaatatccacttcaagcatttccactgtgcgatggttaagtgtggacaacggacgacctgggcggtggattggcacgcgccgcggtttccgtgggcttcggtttcggtcttggtcttcaacgttgacttggtcttcagccggaagccgttagttgtttgggccatgtgggcttttatggccgagtgttgacggcggagacagaaatcaa

SEQ ID NO: 6395 - DNA, 1835 bp, DROSOPHILA
atggatccgacgcgaggtgactcgcggtacaatctcaactactcgatgagtagcatagggctgagcctggcggatccggcggacatgtacggcaacccggccctgggggcgggccgcccgccctccggtggcctgctccagaacatgggcggcgttccgccgatgcagcgccccaatcccgcggcaggagcaccccctgccccgcagtgccaaacgctccacagcccacagcacgcctcccagcagcagcagcagcaacaacagcagcagcagcaacaccagcagcagcaacaacagcagcagcagcatccccagcagcaacgcggccttaagcgctccggcagcgactgctacgaggatcaccaccgctcgtccggcggactcaccctccaaggactggacaacgtggccagcggagccgtcgacgacagcgtagacaactacaacccgctgcccaacaagaagtctccgcctgccaacggcaaaaagacaaagggacgtgtcaaaatcaaaatggaatacatcgacaataagctgcgtcgctacacgaccttctccaagcgcaagacgggcataatgaagaaggcctacgagctgtccacgctgaccgggacgcaggtgatgctgctggtggccagcgagacgggccacgtgtacacatttgccacgcgcaagctgcagccgatgatcacctcggaggcgggaaagcagctcatccagacctgcctcaactcgccggatccgcccagtgtgggcggcggcgaccaacggatgtcggccaccgggttcgaggagacggagctcagctacaacatcgccgacgaggactcgaaagatgaccgatcgcctacctcgtcgggcaacgagtcggatgattcgtcggacgtggagatgccggcggaggctgctgaggtggcaaccaagttgccggccagcaaaacagaggtatcagcgcctccagcagcctcatgctcggcggccaccgcttcctctggccacaaaaccatgccagcattgaactatcagactgacaccaacagcggaccctcaacgtccaccgccgccggaggaggaggctcggcggacagcaagtacgtctactccgctgcctcgattgccaacataccgcagaagatgctgaggcagctcatccagtcaggccacttgcaggtgcacgccgaagaggatggcaaccagtatgtgaccataccgctcagctccacagcagccaatctgataaagagcaataagctaacagcctctggatcaggagcctcaggatcgggaacgcccgtcaagaacgatgccagtgccgataagcccttgaccatcaaacaggagttcgattagcccccagctacgcctactgcttatcatgagataactgagaactgcgtttatccacacttgcccacaccatctggaaaaatcatcagcaggagattaccattactcacccactactctcttaaagtctatccaaagttttcacgtcatcaccggggatgacgatcgcctgctaagtctaagtcatactatatctactataccgtatatatactattttttatacctatacaaggagaagtgaaaaaaaacaccctgagctggtacccaagatgccagcggcatatctacatacgtaagttttaaaagttttgcaagttatacaacgtacaggcatctgctgatatcgagattgtatgagaaatggaaaatgaggatgatatggatgttcctaaatcgcagagatcatgttgctttgttactagtttatattgttttattatacaatacataaatacatataaaccactttttttgcataaaaccaa

SEQ ID NO: 6396 - protein, 449 aa, DROSOPHILA
MDPTRGDSRYNLNYSMSSIGLSLADPADMYGNPALGAGRPPSGGLLQNMGGVPPMQRPNPAAGAPPAPQCQTLHSPQHASQQQQQQQQQQQQHQQQQQQQQQHPQQQRGLKRSGSDCYEDHHRSSGGLTLQGLDNVASGAVDDSVDNYNPLPNKKSPPANGKKTKGRVKIKMEYIDNKLRRYTTFSKRKTGIMKKAYELSTLTGTQVMLLVASETGHVYTFATRKLQPMITSEAGKQLIQTCLNSPDPPSVGGGDQRMSATGFEETELSYNIADEDSKDDRSPTSSGNESDDSSDVEMPAEAAEVATKLPASKTEVSAPPAASCSAATASSGHKTMPALNYQTDTNSGPSTSTAAGGGGSADSKYVYSAASIANIPQKMLRQLIQSGHLQVHAEEDGNQYVTIPLSSTAANLIKSNKLTASGSGASGSGTPVKNDASADKPLTIKQEFD

SEQ ID NO: 6397 - DNA, 3508 bp, DROSOPHILA
ctgatccttgcctccgagaagggagcccacatcctagcaaagaactcaaagctacagaacgagctgggggcccgaaatgagctgctaggcccggaggcactgcgtcagcggtttccgtggttgtccacagagggcgtggagctgggatgccacgggattgacaaggagggatggtttgatccgtgggccctgctcatgggctacaagaagaaggcccgtgcattgggggcgaatttcgcgaacggttcggtagtgggttttgagtggaacgattcgggcggcctttctggagctgtggtcgacgccggagatgtgttgcagcgcacggtgaagtttgacacgtgcgttctggcagcgggagcgtactcgggtcaggtggcgcgtctggcagggattggtgataaggaagcaaaggaggcttccctgagtgtagccctgccggtggagcctcgcaagcgatacgtctatgtggttagcactcagggtaagaattgtcctgggctagccacacctctgaccgttgatcccgatggcacctacttcaggcgggacggtctttgcggcaacttcctgtgcggccgcagtccaaacgaagacgaggagccggagtgcgaaacgctggacgtggaccacgggtactttgaaacggatgtctggcccacactggcgaaccgagttcctgcttttgagtctgtgaagatacagagcagctgggcgggcttctatgaccacaacacatttgacgcaaacggcgtcatcggcaggcatcctcactacagcaatctcttcattgccgcaggcttcagtgggcacggcattcagcagactcccgccgtgggtcgagccatttccgaactaatcttggacggcaagtttaccacactggatctgtcgcgcctcggcttcgaacgccttgtaaaccaacagcctatgcacgaagtgaatatcgtttgacaaatttatcacaggaggatcgtacttgcccttggtgtgtttatgtatgtacttcttttattgcaatttctgttgtgtatatagtaattttgtatagtaaagttcacgttttagtcacgtacagctgtgttggtgttttggctgccagtagtcaagggaatttagtttagtttacggggatttgacgtggaatcagccacgagaaggtcgtgtgcctacatataatttattaaaataaggagttaaacataatcgtaatataacttgcgaaataattgctgacttaggatcagatggggcgagcgggtttgagggggtctgcccttgttacttagttatcgttatgtagctctatgtgtatctgacatctaaactacatacaagatctgcattagagtcgggtccgcgtggaatcgtttccctgtcagggtgagccaacccaacttgcaagctattggtaaatataaatagatgtatgttgaatgagtgtttcatgcgagtctgactaatctgggcgggctcctaagcctcgctttcgccaggggccgcgttttcacccacgttgatgggcacgatcagattctccttcgacatcagattatattttgtgacgaaatgcgtgaaacggtggcacagatacgtctcggcctcgaattcgtcgaaaatgcgacgatggtgaaagtaggcgtgcgagaagatgcgatacacccgccgacatacggagcccagcttggttaccgacgactccttgatggacaccctgggagagacactttgcttattatgtggctagttcaaccatgtcgctaagcctgcatacctgctagggaagtacttgttgctgtttagcagacaggcggcaccgtccagcgtgtggcgtgtgtagtcaatggccggacattccttgggcgtcttgtgcgcggcgcacaggaatatccactggtcagtggctgtcatctgggtgcacgtcgacggcgagcactccttctgcagccgcactgccaggccgttcagctccatgcagaactggcgcaggtgctcgtacttccacacgccctcatcctgggcttcgggcatggtcagtatgagttccacgttgctcgggtcgcgcttaatcagctgctgtatgtactgctgcaccgccagcgtgctgtccatctcctccaggggctcgtcgggccagcgacagaagtcctgaaaggcgaaacggaaaacgggtcagacgggccgggccgggatcgttgttcggacgccatgtcatcgctcaccttggattttgtgcctggccggttcctacgcaatatggtcgagccgtcagccatcttcatgtttcacccgctcgaagacgcgatgatccacaacgtctgtgcctacgccttgatgagaaaatcactggcagaaactgaatgctagcctggtccctgccccgcgggagtctccggatgtgggatccctgcaccgtagtatgctgagtgtattctacaggagctggcacatcgcttgacaattaattggcgtttatcctccaaaacactttgctttgtgcgagaaaatttctgacaaattctacatacatacatatacctatcgattggccagcggcagtgcgcatcgttatcgatagggcgattgcagccttgcggtatttcggtatttccgccagccctggccacaaagtggccacactgtcgctagccagtcatcataaatacgaacagattggaaaacgtacaagaattgcgtattatctgtggcattacgagatcgtactttctaaaaactagcttaccgtaacccccgtcagcttaaaacatgtcctacgcgtacttgttcaaatacatcattatcggagacacaggtgagtgcaagctgcgacttcctttgaaacggaatggccagtgaaaagttggccattgtcagggaaacaatctgtaattgcaaacaacacaacaaaacaaagggcatcgcaggcgtaggggtcgtacccgaaaatcaaaaaatgggggtttcaggtggtctcaagtgaaaaattgataccgtgagatcaaaattgcgtcggcaggaaaatattcctggagtcggtgggccgaaggaaaaatcaataataccataacaacgcatacaggcgtttgctgctctcagagttagtggtgcgcggggagcagcccacacataaaccctgctgctgactcacccaaccacccccagtaattgagggattccgccccaaagagccacgggcttatcagcactctgcttttcgggatgtccaacagctgttggcattttccagcctgtcccaccttttccccgctcgcccactaacccttttccgtttccgcaggcgtgggcaagtcctgtctgctgctccagttcacggacaagcgattccagccggtgcacgacctgaccattggcgtggagttcggagcacgcatgatcaccatcgacggcaagcagatcaagcttcaaatctgggacacggctgggcaggaggctttcaggtacccacttctgttcatttagtgttaatacttaagaagggataagtgaa

SEQ ID NO: 6398 - DNA, 1374 bp, DROSOPHILA
attttctcgcacaaagcaaagtgttttggaggataaacgccaattaattgtcaagcgatgtgccagctcctgtagaatacactcagcatactacggtgcagggatcccacatccggagactcccgcggggcagggaccaggctagcattcagtttctgccagtgattttctcatcaaggcgtaggcacagacgttgtggatcatcgcgtcttcgagcgggtgaaacatgaagatggctgacggctcgaccatattgcgtaggaaccggccaggcacaaaatccaaggacttctgtcgctggcccgacgagcccctggaggagatggacagcacgctggcggtgcagcagtacatacagcagctgattaagcgcgacccgagcaacgtggaactcatactgaccatgcccgaagcccaggatgagggcgtgtggaagtacgagcacctgcgccagttctgcatggagctgaacggcctggcagtgcggctgcagaaggagtgctcgccgtcgacgtgcacccagatgacagccactgaccagtggatattcctgtgcgccgcgcacaagacgcccaaggaatgtccggccattgactacacacgccacacgctggacggtgccgcctgtctgctaaacagcaacaagtacttccctagcagggtgtccatcaaggagtcgtcggtaaccaagctgggctccgtatgtcggcgggtgtatcgcatcttctcgcacgcctactttcaccatcgtcgcattttcgacgaattcgaggccgagacgtatctgtgccaccgtttcacgcatttcgtcacaaaatataatctgatgtcgaaggagaatctgatcgtgcccatcaacgtgggtgaaaacgcggcccctggcgaaagcgaggcttaggagcccgcccagattagtcagactcgcatgaaacactcattcaacatacatctatttatatttaccaatagcttgcaagttgggttggctcaccctgacagggaaacgattccacgcggacccgactctaatgcagatcttgtatgtagtttagatgtcagatacacatagagctacataacgataactaagtaacaagggcagaccccctcaaacccgctcgccccatctgatcctaagtcagcaattatttcgcaagttatattacgattatgtttaactccttattttaataaattatatgtaggcacacgaccttctcgtggctgattccacgtcaaatccccgtaaactaaactaaattcccttgactactggcagccaaaacaccaacacagctgtacgtgactaaaacgtgaactttactatacaaaattactatatacacaacagaaattgcaataaaagaagtacat

SEQ ID NO: 6399 - protein, 223 aa, DROSOPHILA
MKMADGSTILRRNRPGTKSKDFCRWPDEPLEEMDSTLAVQQYIQQLIKRDPSNVELILTMPEAQDEGVWKYEHLRQFCMELNGLAVRLQKECSPSTCTQMTATDQWIFLCAAHKTPKECPAIDYTRHTLDGAACLLNSNKYFPSRVSIKESSVTKLGSVCRRVYRIFSHAYFHHRRIFDEFEAETYLCHRFTHFVTKYNLMSKENLIVPINVGENAAPGESEA

SEQ ID NO: 6400 - DNA, 4414 bp, DROSOPHILA
gtttcaatctccatatggccgcaaacaggaagctaatcctgctcagtgatatatcaacatatttatggtaaacggatcagagggcttaggccagcaaattggagtgaagaggggaactgggggagcatccatatgttaccctctggtatttttaggctcgacttcaagtggcaactaaccgcagaaactccataaaattttatgaacactctttcggcgattttatgtgacgagcgacggctgcttagcacttcgatcgcccatggtctattaatgtttaataaacaattattagacaatcaacgaatttttcgtggctctgaagctttttgatcttcatcacatccagtgactcaccaagaatgggtgtacaaataaataccaaaacgactgtgtttagatcaaatcggataattacgcacacgaattctcatgaatcataacaataacaatggaatcccttgaggaatccgtcaggaacacctcttagcggaggcgattgacacgtcacgagtgggagaaactttctgagtcgagaacaaatgcactttgatgtttcacgaactgcaattcgaggtattcaccataagacataacaaacacttcgatatgtttggaaattaaaaacttgcggtaactagaaaatcggtgttaattggttattagcttgccaagtgttttagctaaaatactgacaaacatggaacaaattcaaaatgaagtaccagcgatttcaagacaaactaaatgaaaatgaaaataaagtttaaataaactacaaatgtatatctaatactaatatatttaaatttgttaagtaccaaaaccaattaaataaaaatcttacacttttaaaatgatacgacaggagtttaaatctccgcgggtttccgccacagcaccaaagcagtttactgcttgcttttgagcactgctctccttgcaacaacaatcatttgtgtccctttacagcactgttcggctcacagacatcgataagttatcggtctataatcgctacaaaacgtaaacatctgttttttcgcttttaatgaatttaagaaaaactttaggaaaatggagcgcaaggaagtggacacccagcagttcatcgaccatgtaagtggaatgcgaccatatttcgcgtgaaaacccgcgcactaaccaattcccaaccaacttgcagacgctgctggcgaaccacttcatcatggatctgatagatcagacctacaaatccgaaggacccacgaatctgagcacgaatcccagttccggcaactccgagagcggagtgggttacgtggaaaaggaatcgctgacgccggagctgaatttccacaacaccatctttcagtttgtgaacaaatcatcgccagaaaatgatgttgtaccccaccaggtggatgcgcagcccacatttccggccctggccattgagcccacagtgcccatcgacgtgtccacaggtctacacgaggacgaggatctcctctatgcgcacaacaacgcctcctgcacgaacgcccgcaaggtgctgccccacaagaaacgcatttcgcggaagctcaaaggcaacatagaccccgaactggaccaccagcacaagcatgtccaggatgtggcaccctcttccctgtatagctgtgaaatatgcggctatgctgtgcacacccaattggacttctttgcccatctgaagcagcactacgagcccaccgttctggagcagcgcctggtcgtccaggatccccagcaacagcaccagcaaaaggaacccctcgacatgtgtggtttgtctgcgcaggataaggttagttgggatttcaagcctaaagcttaaagttaaagactcatttcttatatcgcacagctgcaacaggagcaggccaaattggatcaggtttttcaggacgtgcagcttaattttgagaactttcacaacatcagtcaccatgtgaacgatgttgccaacgtcggagtgaatatggtgctgcatggacaagccacggacaaattaaatgccgtggtggttaacaccagcagcactccgaattctgtacccgtggtggatgacgtcgagttcagcgatacggaagacatgctcgagggtatccgcaatgtggtggacaaggtttcaatagaagacacctgcgatgaactggtggatcttgaattgacctccagcggaatgacggcaccctggtttaataacaacttcagggatatcacatttccggctcttctgctgccaggagagccgccaccagcttcttcagagccagctactccactgcttaaagagaatccccatgtaggcgaccacatggcactcgattttcttagtcccgagaaggcggaccctcaagaggaagcaaaactggagaaaacactgtctaaagcctgcgagcccaatgagcaaaccttgttagttgcaccacctgcctgccaaacaccaccgattccaactgttccaccagccaactcatccattgagcagctgcgcagatctcccctagaactaagtgaagccttcaagttggaagaggatgacatgaccgatagccgaccagcttcgtcgttcgaggaaggcgatcccgatgctgaagagccaaatgaatgttttcagatggaggttttggatacgagtttaaccgaggaggcagagaacaagacaaggaggaaacatttctgcgacaagtgcaatcgcgatttcaactcgtacaatgccctcaagtaccatcagtatacgcacaatcaggagagatctcacaaatgcgacagctgcgagagatccttctacacgcagagtgcgctaaaggctcacgaaaggacacgtaagtgattacctagaatctttcgcacataaacccctaatccttgatgctcctatcctccatagattccggcgtgaaaccctttaaatgcgacaagtgcgagtttcagtttcggcagtggggtgacctgaagtaccacatcatctcgcggcacagcgacgtcaaggcgcacatgtgcgaattttgcggaaagagtttttcccggcgctactccctggttgtccacagaagaatccacaccagggagaagaactacgcctgccagtattgtgacaagaccttccgggccagctcctacctgctcagtcatattaaagtgcacacgggcgagcggccgtacgagtgttccatctgtgaaaagaaatttcgagtctcaggcgatctcaagcgacattcaaggattcacgatcccagcagaacaagccaaccgcctgcggaaaaagctaaaaagaagagggcagccgcgagcaataagcaattgccaatcgaagaggatgacgagttggccaccaatatccaaaacaataagtctgacgccatgcgcgaccaaactggacagaaaatcctgggcttatagccatgctgtgccaaggtttcttcaaagtagtataagtctaagtctattgtacgcacttttgtacaagttctgtaaataactgagatcgtattaagtatttatggagaaagaaaatcacgtgtaagagagcttcaagtttaagaaaattccactttaaagtcaactcttgaataaatctgtacatttcttaagcaatttggcacagagcattttctttttttttttgctgtccccaacaatttccttgtgatatctgcaaaataaatttgtaaactagtacattttctattgcagagcatttctttattattttccatgttttcgtcttgtcatcttcatttcattcgttttttttttctcaaatgtttttgtttttcacacatctgtctctctctttttgcacttgtaccgttcgtcgacttaattgttaatgagtaagtatatatattgttattaataatgtaactatgtacaacacaagtgtttgggcgcctgtcagcgggcccaaaacgcaatgaaatctttgtattctttgtttacaacataattggtttcttcgcttttttttttcgtcgtttttgttttgtttctcaaaaatattcaacataaacgccccgcagccatacattccatagatttgtgtgtgctttccgtatttgttagccattctattctctcactgtaacttcctttcgctttcgcttcagagcttataaactaaaatcctagtattggctgattcaccagcttcctatcttttccacgctttaatgtacgctcagtccatgatatcctccgattctcccatttgttacacatatataatataattcatctgtctcatcctcgcttgcattttgtttaattaattaaaaattacgaaaactgcattcctagtatcagtatcatatctgcacttcgcatctcccagcctgatcctaactcctccagcttcgattccccgctattattacatacatagattcttggtgtcttggtg

SEQ ID NO: 6401 - DNA, 2222 bp, DROSOPHILA
ttatcggtctataatcgctacaaaacgtaaacatctgttttttcgcttttaatgaatttaagaaaaactttaggaaaatggagcgcaaggaagtggacacccagcagttcatcgaccatacgctgctggcgaaccacttcatcatggatctgatagatcagacctacaaatccgaaggacccacgaatctgagcacgaatcccagttccggcaactccgagagcggagtgggttacgtggaaaaggaatcgctgacgccggagctgaatttccacaacaccatctttcagtttgtgaacaaatcatcgccagaaaatgatgttgtaccccaccaggtggatgcgcagcccacatttccggccctggccattgagcccacagtgcccatcgacgtgtccacaggtctacacgaggacgaggatctcctctatgcgcacaacaacgcctcctgcacgaacgcccgcaaggtgctgccccacaagaaacgcatttcgcggaagctcaaaggcaacatagaccccgaactggaccaccagcacaagcatgtccaggatgtggcaccctcttccctgtatagctgtgaaatatgcggctatgctgtgcacacccaattggacttctttgcccatctgaagcagcactacgagcccaccgttctggagcagcgcctggtcgtccaggatccccagcaacagcaccagcaaaaggaacccctcgacatgtgtggtttgtctgcgcaggataagctgcaacaggagcaggccaaattggatcaggtttttcaggacgtgcagcttaattttgagaactttcacaacatcagtcaccatgtgaacgatgttgccaacgtcggagtgaatatggtgctgcatggacaagccacggacaaattaaatgccgtggtggttaacaccagcagcactccgaattctgtacccgtggtggatgacgtcgagttcagcgatacggaagacatgctcgagggtatccgcaatgtggtggacaaggtttcaatagaagacacctgcgatgaactggtggatcttgaattgacctccagcggaatgacggcaccctggtttaataacaacttcagggatatcacatttccggctcttctgctgccaggagagccgccaccagcttcttcagagccagctactccactgcttaaagagaatccccatgtaggcgaccacatggcactcgattttcttagtcccgagaaggcggaccctcaagaggaagcaaaactggagaaaacactgtctaaagcctgcgagcccaatgagcaaaccttgttagttgcaccacctgcctgccaaacaccaccgattccaactgttccaccagccaactcatccattgagcagctgcgcagatctcccctagaactaagtgaagccttcaagttggaagaggatgacatgaccgatagccgaccagcttcgtcgttcgaggaaggcgatcccgatgctgaagagccaaatgaatgttttcagatggaggttttggatacgagtttaaccgaggaggcagagaacaagacaaggaggaaacatttctgcgacaagtgcaatcgcgatttcaactcgtacaatgccctcaagtaccatcagtatacgcacaatcaggagagatctcacaaatgcgacagctgcgagagatccttctacacgcagagtgcgctaaaggctcacgaaaggacacattccggcgtgaaaccctttaaatgcgacaagtgcgagtttcagtttcggcagtggggtgacctgaagtaccacatcatctcgcggcacagcgacgtcaaggcgcacatgtgcgaattttgcggaaagagtttttcccggcgctactccctggttgtccacagaagaatccacaccagggagaagaactacgcctgccagtattgtgacaagaccttccgggccagctcctacctgctcagtcatattaaagtgcacacgggcgagcggccgtacgagtgttccatctgtgaaaagaaatttcgagtctcaggcgatctcaagcgacattcaaggattcacgatcccagcagaacaagccaaccgcctgcggaaaaagctaaaaagaagagggcagccgcgagcaataagcaattgccaatcgaagaggatgacgagttggccaccaatatccaaaacaataagtctgacgccatgcgcgaccaaactggacagaaaatcctgggcttatag

SEQ ID NO: 6402 - protein, 714 aa, DROSOPHILA
MERKEVDTQQFIDHTLLANHFIMDLIDQTYKSEGPTNLSTNPSSGNSESGVGYVEKESLTPELNFHNTIFQFVNKSSPENDVVPHQVDAQPTFPALAIEPTVPIDVSTGLHEDEDLLYAHNNASCTNARKVLPHKKRISRKLKGNIDPELDHQHKHVQDVAPSSLYSCEICGYAVHTQLDFFAHLKQHYEPTVLEQRLVVQDPQQQHQQKEPLDMCGLSAQDKLQQEQAKLDQVFQDVQLNFENFHNISHHVNDVANVGVNMVLHGQATDKLNAVVVNTSSTPNSVPVVDDVEFSDTEDMLEGIRNVVDKVSIEDTCDELVDLELTSSGMTAPWFNNNFRDITFPALLLPGEPPPASSEPATPLLKENPHVGDHMALDFLSPEKADPQEEAKLEKTLSKACEPNEQTLLVAPPACQTPPIPTVPPANSSIEQLRRSPLELSEAFKLEEDDMTDSRPASSFEEGDPDAEEPNECFQMEVLDTSLTEEAENKTRRKHFCDKCNRDFNSYNALKYHQYTHNQERSHKCDSCERSFYTQSALKAHERTHSGVKPFKCDKCEFQFRQWGDLKYHIISRHSDVKAHMCEFCGKSFSRRYSLVVHRRIHTREKNYACQYCDKTFRASSYLLSHIKVHTGERPYECSICEKKFRVSGDLKRHSRIHDPSRTSQPPAEKAKKKRAAASNKQLPIEEDDELATNIQNNKSDAMRDQTGQKILGL

SEQ ID NO: 6403 - DNA, 6274 bp, DROSOPHILA
ttctctatacacacatacataattaaatatattaatatgtttacgtttccttctcaacgcatttgctttgtctattttgttgtgcaatccgcttagtctttatacatacactagaaaaaaagtactttaacaaaatatacaaaacgtgagggccgaaatggggttatataatttacacaatcaacatgcattaaccagtggtaacacgaaatgctgcgattcaatgatcaatttagtattttacgaagtttatatatttaattaacggcgattgctaagacaaaacgaaagatacaactgtaaacgtaaatcaaattatttataatatttgtatttgcccaacacaatgcggaataataaatatacatacttactattaatataattatataaattaaatcggtacttaccttgggttcattagcgtttaatcaagtgatagttaacgactaattagttttttggtgtctagatgagaagtaaaacactaaggcaaatttaatgaggcatttaaagttgtaaacaactcaacttttaaatgaaaagaggtcagacaaataattacgcattagtgtagttttaaccctttttatttagtaagaggctttcggtagataattgttgaattaatgtcttgtaaatattattaaatggtgaatccttttttgtttatgtacatatttcctaaagtgttcggaattaacaatttccactttctatgtcggctatagggatatagtgtcgcatttacttaatttttttaaatgtgcttacatgttaaaacatttttttactactgaaatatactatttagaaatatttttgtatttttttttaataatacttgaacttttaagatattacataggtttgtttcttattttctgaatcttatctgtgttttgtctaagaaaaagtttgccaaactgcaaaaacaagtttttcgcttcaacattaactattttttataccctaatttgctcagttggttttttttaattggaaactattcggatccgtgacgtttgatgtacaaacaaatgctccaaagattttattgtgagttttagattgattgaaaatggtcacttgttattgcatacgttacatagattgttgtttattgtattccctttaattaatattcgtacgaaatgtaaggcaattaaaactatttttctaaattttgtaaagaagacaattgagggacccgtttgcacctggcagtgatgcactgcattgatattgattgaaattgaacagtttgtctagacaaagatgcggttagtaattgccctagtgcggtaagtatatgttaggtgtatattgatacttagctacgattagtcaagtcaagtatagtcttacaggctagagcttaggaataggcttagtttcagttacaattctgctctgattttatggctgcaacaccatttgacataagaaactcgttaacatttaatgctagtccattattatgctacagttcggatttgtagtacctccagttgccttctacttgcggcgttcaacagtgcaatgtaagtaacctagtgtaaaagttgagcttttttagtctctaagacatcactatcactctccttaggtgctttcttttcacagaactcgatcagatacgaacagacaccagagagtgcgataaatattccagcataatagaaggtgtcatcccatctgaaagaggacaacgggtggtcagataacctgtgcacagactgtagaatgccgcccaactcacctgcccgtatactcgtatatgacgcctgcaatagggggtcctgcgatcattccaactccctgaaccagcagcaccagaccgtaggcacacgtgaaatcgtccagatccacaatactgaccagaatgctgggcgtaaacgagaaggagctggcgaacgtaaatccgaaaataacgcacatgaccatcaggcccatgtagttggtaatcagcaggggcatgaagaacacagacgctccgcacactgaaaaatataataaataataaattcaattgataaattgaaaatgtgacatagtccaagcactcacccagcatgcacagcgagtagcatatattgatgttcatccaggacagatcccccagatagccaagtcctatcatgcccaccgtttgggcaatgccgacatccgaaatcaactcggcactctggctcacgtcgtacttgtattgcttcatgtaatcgggaaggtacagataggggataatgaacctgtggagcgtgccaaaaagtagattagccgctgattgagcagaggagccttatctggtcaatgttgaggagttagcattgatttcaactagttttcttatcgatctattagggcactcggactccgcagtcgtggggtaagataaaccatgatcttgaacagctaagggggcctactaactgagctgatcgataacgttgtgcttggaatttcaccgctgttggccaacaatattgttgtgcaacgcttttcgttttcgaacagctgccaaaattgtttgcgacgtcttctggcaaaataaacaaattcacgcgacggcttggcacatttgtctattaattttagcatttattgcgccttgagttcatgcacagcttggggcctttgccaatgaaattgttttttttttttttttattaatatcaccaaagagtactcaccaaatgaacaaaaacaatgtagagagattgaagagggcgaacttcatgtccagaaagagtgaaaagtcaaagatggacttcatggtgtccacaaagttgtcataccaggtctatcgaaagagaaaggatatttaattattattgttccattaaatctaagcaacactgaggatacgattatttttgattttgattgtttaccactgcttttatctctacttgaaaattaattaatacaaaatgtacttttaaaacgatttaaaggactatcgcaaaaatcgagtaagtgtgtttagtcaagacattcattacaaaataataatagttgtgagttgttaactaaactatcaagagattatcatctttcaaggtaccaataactggctcggtttcttgcgtaggcagaacggaaatcggagcggtcaccttatcagccctaaaaagtatgtatatgtggtccaactaggcgaccaaacagagaggcagctgataaacagctttgagcattaaccagctggggctgtcgccaagcgaccggctgataagggcggaccaagggtcacggtctactcacatcttcctcctctttggcgatggtggtcatcgagttgcggtagatgttgggacaggaggaggcgcgcagccggtagcggtgcgtgttcagcatggccccgcggtagtggatcgagttgcggtgaatgcgcatatccttaaggaagttggagttccggatcgagatgttgcggcggaggttcgatcggtggtggctgggcttcttggagcgcgacagccggcggattcccgtgatgctgtccaggcgtgcgcgacgggtggccagctcgctgttcaccgactgctcctgttccggaatggcgatgacggtgggcctgatgcgcctgctcggctccagcaatgcgaaggtctcgtccttcgagtagtagcagtgcatgtcctcgctcaagatgtccaccgaattgtgtcgcaggccattcacctttaggttggagattgatggtgttgtatgcttggccatgaagatgttttcgttaagcgagtaccgggagctggcgtgcttctgcgtaaggtagccttcgtccgaggagcggagcgagccattgggagtcctaccagtggagcgcttttccgatggagacagcgtctcgatggaggccagataggccttctttgcttcctctgccgcctcgtgagctattccgcccattagggtatcatctggcgagcctataacggccgtcgatgggggataggcacctgctcctgaggacatggacagcaggttctctcgtgacggcgcctcctcaccctccttgtggcgtagggagcgtcggctcaggctcttaacctcgcagatgctgtcaagctcctgagtgctcaggaaggtgggcaggaagatctcgctgcggtagcgcttgagagcggagtccaacggatcgtcaatctgctggttggcctccgtgttgttcttggtcaccaacgagtctagcacagcctcctttgtgatgccggtgtccagcagcttttttatttcctccaggcagacactggagttcgagaaggtggtgacgctttgggatcgactctctagacggttttcctcgatcagccagtcgggatcgcgcatgagggcgccgcaaacgcatgcgttgagcatggtgccgccaaggattagagtggctccgcgccagccgtacgattcgattagataggaagtaaggcgggcgtagacaaaggtcccgatgccggtgcccgatgctccgatgccggtcgcaaaggtgcgcttcttgtcaaaccagaatgcaatggacaccaccgcggtcacatacccgatgcctaggcccagtcccgaaatgataccaaaggtcaccatgagcatctcgatcgagttgcaaaacgaagacagagcaaacccaaaggcagagaccactccgccgaggatggtcatctttcggcagccgtacttgtccaccagattggaccagatgggtcccatcaacaggggcacggagaagaatagcgaggatatccaggcggtcttcgaagtggactctccgaagtattccagcagttccacgtttattaggccaaatgagaagctcagtccgtcggctataagggacacgaccagagaggcgaacaccaccacccacccatatccaccgtcgggcatcttgggcgttttcttctccgtggaactggagtcgatcgagtcgccggactcgttcgagatcaggcgtttgcgacgcttcacctgcccatttccgttcatcaggcacgtcatggtgccgtcctccagttcgatgacactgctccttaccacacggctgtgtccagccccatctgcgagctcctctacggagaggttgcagaaggtgacctccgggaagaggtcgtgcttgatggccttgtggagtggcgtgttggccggagcaggcgtaagaggcagggcctggtaattggaggcgcctccgttttggctctggttctggccattgtggttgttgttaaccgcctcgcagctgttgttgttggaggcgtttggatccgtcgctagcttggccatgtcggagtcccagtgatcgtgttgttgtgtaaagggttcagctacgtctataaaaaggtttgtaaaatttgcactttcttgtccaagcgattattggaagtgaacacaatttgcattagatttcagcataaattttcttaagtaggcggtaggtaaatattccctctctctgttggtcaactgcagtgcgtagctgaaatatagagacagatggaaggaacttagcgcttgatcgactttgtaacttcccatttccccttctaaactgcagtctgccgctgatgaaacgatcaaaatgaaatgatcaaacccttttccagttaataatcttactaacatggcgctttaagttcgcttcttaatacctcgaatatttacgtatctatatgaccaattgcgcgactacaacaacatctgcctgaaaccatttcgttgaaaaatccgcgcagaaactgtttgctcatttggcaattcgtttatttggctttcgaggcgccttcaacttgacctcaggaaaacagaaagcggacaattttcagattttcagcgagcattttgagagaaccgaaacgagagagaatgattttcttcttacatcagtaccaaaacaaagtgcgtcacatgaacgcgacgtcagctgatgtcccccaataattatggtattcgaaaatgaatattttcagaccaattctgttttcgttcccctgaaacggacgtctgcggttaattatagatggctacacaggcggaatagggaaaaaacatcaacgatcggacactagtcactagttcaaatctaagtaggttttatccttctgaggtttccagttgccccacttacccgatcgtagtccaggcaatgctctctccgcacgccaacagccaacttttgttaacgaataaattgattcggtgatctgcggattttgcggatatattcttaagatttcactggcactagtttcactgtttcggcaccaccgccaatcaattcaccata

SEQ ID NO: 6404 - DNA, 3238 bp, DROSOPHILA
atggccaagctagcgacggatccaaacgcctccaacaacaacagctgcgaggcggttaacaacaaccacaatggccagaaccagagccaaaacggaggcgcctccaattaccaggccctgcctcttacgcctgctccggccaacacgccactccacaaggccatcaagcacgacctcttcccggaggtcaccttctgcaacctctccgtagaggagctcgcagatggggctggacacagccgtgtggtaaggagcagtgtcatcgaactggaggacggcaccatgacgtgcctgatgaacggaaatgggcaggtgaagcgtcgcaaacgcctgatctcgaacgagtccggcgactcgatcgactccagttccacggagaagaaaacgcccaagatgcccgacggtggatatgggtgggtggtggtgttcgcctctctggtcgtgtcccttatagccgacggactgagcttctcatttggcctaataaacgtggaactgctggaatacttcggagagtccacttcgaagaccgcctggatatcctcgctattcttctccgtgcccctgttgatgggacccatctggtccaatctggtggacaagtacggctgccgaaagatgaccatcctcggcggagtggtctctgcctttgggtttgctctgtcttcgttttgcaactcgatcgagatgctcatggtgacctttggtatcatttcgggactgggcctaggcatcgggtatgtgaccgcggtggtgtccattgcattctggtttgacaagaagcgcacctttgcgaccggcatcggagcatcgggcaccggcatcgggacctttgtctacgcccgccttacttcctatctaatcgaatcgtacggctggcgcggagccactctaatccttggcggcaccatgctcaacgcatgcgtttgcggcgccctcatgcgcgatcccgactggctgatcgaggaaaaccgtctagagagtcgatcccaaagcgtcaccaccttctcgaactccagtgtctgcctggaggaaataaaaaagctgctggacaccggcatcacaaaggaggctgtgctagactcgttggtgaccaagaacaacacggaggccaaccagcagattgacgatccgttggactccgctctcaagcgctaccgcagcgagatcttcctgcccaccttcctgagcactcaggagcttgacagcatctgcgaggttaagagcctgagccgacgctccctacgccacaaggagggtgaggaggcgccgtcacgagagaacctgctgtccatgtcctcaggagcaggtgcctatcccccatcgacggccgttataggctcgccagatgataccctaatgggcggaatagctcacgaggcggcagaggaagcaaagaaggcctatctggcctccatcgagacgctgtctccatcggaaaagcgctccactggtaggactcccaatggctcgctccgctcctcggacgaaggctaccttacgcagaagcacgccagctcccggtactcgcttaacgaaaacatcttcatggccaagcatacaacaccatcaatctccaacctaaaggtgaatggcctgcgacacaattcggtggacatcttgagcgaggacatgcactgctactactcgaaggacgagaccttcgcattgctggagccgagcaggcgcatcaggcccaccgtcatcgccattccggaacaggagcagtcggtgaacagcgagctggccacccgtcgcgcacgcctggacagcatcacgggaatccgccggctgtcgcgctccaagaagcccagccaccaccgatcgaacctccgccgcaacatctcgatccggaactccaacttccttaaggatatgcgcattcaccgcaactcgatccactaccgcggggccatgctgaacacgcaccgctaccggctgcgcgcctcctcctgtcccaacatctaccgcaactcgatgaccaccatcgccaaagaggaggaagatacctggtatgacaactttgtggacaccatgaagtccatctttgacttttcactctttctggacatgaagttcgccctcttcaatctctctacattgtttttgttcatttggttcattatcccctatctgtaccttcccgattacatgaagcaatacaagtacgacgtgagccagagtgccgagttgatttcggatgtcggcattgcccaaacggtgggcatgataggacttggctatctgggggatctgtcctggatgaacatcaatatatgctactcgctgtgcatgctggtgtgcggagcgtctgtgttcttcatgcccctgctgattaccaactacatgggcctgatggtcatgtgcgttattttcggatttacgttcgccagctccttctcgtttacgcccagcattctggtcagtattgtggatctggacgatttcacgtgtgcctacggtctggtgctgctggttcagggagttggaatgatcgcaggaccccctattgcaggcgtcatatacgagtatacgggcagatgggatgacaccttctattatgctggaatatttatcgcactctctggtgtctgttcgtatctgatcgagttctgtgaaaagaaagcacctaaggagagtgatagtgatgtcttagagactaaaaaagctcaacttttacactaggttacttacattgcactgttgaacgccgcaagtagaaggcaactggaggtactacaaatccgaactgtagcataataatggactagcattaaatgttaacgagtttcttatgtcaaatggtgttgcagccataaaatcagagcagaattgtaactgaaactaagcctattcctaagctctagcctgtaagactatacttgacttgactaatcgtagctaagtatcaatatacacctaacatatacttaccgcactagggcaattactaaccgcatctttgtctagacaaactgttcaatttcaatcaatatcaatgcagtgcatcactgccaggtgcaaacgggtccctcaattgtcttctttacaaaatttagaaaaatagttttaattgccttacatttcgtacgaatattaattaaagggaatacaataaacaacaatctatgtaacgtatgcaataacaagtgaccattttcaatcaatctaaaactcacaataaaatctttggagcatttgtttgtacatcaaacgtcacggatccgaatagtttcca

SEQ ID NO: 6405 - protein, 800 aa, DROSOPHILA
MTCLMNGNGQVKRRKRLISNESGDSIDSSSTEKKTPKMPDGGYGWVVVFASLVVSLIADGLSFSFGLINVELLEYFGESTSKTAWISSLFFSVPLLMGPIWSNLVDKYGCRKMTILGGVVSAFGFALSSFCNSIEMLMVTFGIISGLGLGIGYVTAVVSIAFWFDKKRTFATGIGASGTGIGTFVYARLTSYLIESYGWRGATLILGGTMLNACVCGALMRDPDWLIEENRLESRSQSVTTFSNSSVCLEEIKKLLDTGITKEAVLDSLVTKNNTEANQQIDDPLDSALKRYRSEIFLPTFLSTQELDSICEVKSLSRRSLRHKEGEEAPSRENLLSMSSGAGAYPPSTAVIGSPDDTLMGGIAHEAAEEAKKAYLASIETLSPSEKRSTGRTPNGSLRSSDEGYLTQKHASSRYSLNENIFMAKHTTPSISNLKVNGLRHNSVDILSEDMHCYYSKDETFALLEPSRRIRPTVIAIPEQEQSVNSELATRRARLDSITGIRRLSRSKKPSHHRSNLRRNISIRNSNFLKDMRIHRNSIHYRGAMLNTHRYRLRASSCPNIYRNSMTTIAKEEEDTWYDNFVDTMKSIFDFSLFLDMKFALFNLSTLFLFIWFIIPYLYLPDYMKQYKYDVSQSAELISDVGIAQTVGMIGLGYLGDLSWMNINICYSLCMLVCGASVFFMPLLITNYMGLMVMCVIFGFTFASSFSFTPSILVSIVDLDDFTCAYGLVLLVQGVGMIAGPPIAGVIYEYTGRWDDTFYYAGIFIALSGVCSYLIEFCEKKAPKESDSDVLETKKAQLLH

SEQ ID NO: 6406 - DNA, 3594 bp, DROSOPHILA
tgaacggttttatcataattctttgttgtagtgcttccttttacagttcttcaattgaaggcaatattaaatatttctcaattgtttttaaattgctatcaataacggggtccaagtgaaattaatttattttgcacaatgaaagtcaaggcgcaattggctgcaataaagtggcgcgcatggaaaagcttcattcatattggttgcacgttttttttttgggcctcaataagccagcatctgtcgcttgcggtttttgtagacaaaaattagcgctatcaattccaaaaaattagcatcatttggcttaaaaatactctttatggccattgattaaaactgtcggcggccataaagaaaagttaagccaaaattataaaacgtaatatgaagtgaatggagctacaggtctgaaaattagcacggaaattaaataagttagcatctaagctagttcggggttagcgttttgaatcggtccagaagagttggacaaagtcagcttaagattataaaattgttggtcaaactaaacagaaaaccaatgattatatccaaggtacttagccctattaaattaagctttaatctattcacttaaaatatagttgtaatctatataaatttcaaacatcacaaatattattaatatagtcattttggaaatatggagtgacttaaatagaaataccagaattcattttcttcatcaaaaagcacgcaatttatgcaaaagttcaaaaccgaagctagtaactttggttttgtaaatgtaaaacgttctacgataaaaatattacatctgtgttctaatacgtaactagtaatatcagttcaacgttataatttattggataagtggtttacaaacgccttaaactttcgttccgtgtgaacctatcgttcttcgatgacagaaggcgcgatttgtctgaacctatcgacggccatcgataccaaagtttgtttatcattgttagtcggcactttgaccataaaaatgagctccattaaggtaagtatatgttattcgggtcaggaaacttgcttccatgttaatgtgcagatcgaatttgcagtgcagatgcgaagaggtgacgaatcctatgccggtgccctccgttcggcgctggatggggtcggccaggtggaaattgacacccaggaaggtcgagtgataatccaaacccaacgaccttggtcagagattcaggacaagatagaagccacaggtgtccgggccgtactctccggattcggcggccagtcggcggtggcccttataaacacaacaggaagtgtagtggacaagacaccaatccagggagtggttcggtttaccaccattaccgcagacaagaagcctggagtggttgtggatggcgttgtggacggtctatcgcctggactgcacggattacatattcacgagagtggtgacacttccgcaggttgctcgtcggtcggagaacactacaatccccgccagtcgccacatggaagccctgcagctggggcagaggagcggcacgccggagatcttggcaacatccgagcggatgaaaacggcagggccacctttagatttgtggatccagtgctagaggtctgggacataatcggaagggctgtcgtcctaacagccaatgccgatgacctgggacgcgggggcaatgatcagagcctgattgacggcaactctggggaaaggtatgtaaatatgccccactttcagattgatcattgatttgtataactcctttcccactaggattgcgtgtggtataattgctcgttcggcgggcatcttggaaaactttaagagaatctgtgcatgtgatggggtcacactttgggatgaacgcaataagccactggctggcaaggagcgctcacaaaagctgtaaacttgtttccatctttaatcttgtaaataaaattatcttatctctaggtgtcactttccacattttgttctagaagtttctgtcgcgacaaagtccacagaacatcaattctcgttccgcaattaaaattagtatactaaaaaccacattcgtagcagttgattttaatggttttaaagttttatttaaaatatttctttgctgtttttctttttgtatttcttagttaaaattaatttgctttttaattattattatctgttttgctctgccaatgactgccggattcgtgtgatgttcgtggttaactacaatttgtttttgcggggcgttaaaaccgaagaacatacagacacttgttgtacgtgataataataataataataatgaataatattcgaaatgcctattgcatttgatattaatagatatatgtgtatataatattaatttgattcctccgttaacactacggcgcatgcctcgttccctaatccacatccgtggggtcaggtgaacgacggcatgcacgctttatatgtaaataagtggtaaaaaatatgtaaagtgtatatgcgtaggtcctaatgcttatttactgcgtttgccgggcgtatttacatatctgttggccttttgtactctacgtgcttttttcgcctcctccggctcctcaagagcctccgatccgggcgccacattgtccgttgtcgcagccacccccagattctgggacacaggactgacaatcacgccgcttcgctgatgattgccataaaacagttttggggagtagcctcccgcagctttggcagctcctgcatttccggtggccatcggctgcgattgggactgggcaacctctgctgccttcgaggtggacgctatggcattggactggctctctgatggcatcttgcgcttaagattcttggctgctgtgctcacggccagcaacttggccgtggtggactcatccggcgaggcaaactcctttagctcgcccacactaacatcgctctcggcatccacatcttcgttgatgataataaagtgctcgggatccacaccctggttgaccagcgcttgaaaatcttcaggcggcaccacaggcgccaccttttgattgcacgaactgcatacggcagggatggccggactcttcgaacgccagaactgcagctcagttttgcacttgttgagctcctgcaagggaagtaaatcaatgccaatcaatagaatgccgagcctcgactcacctgcaaaagggtggagaacttgcgagacatctcctcgttcttcttgtcgttttcgtccagacgattggcatactccagcgtctgcttttgctgctccgatattagatttgattgctcagccagctgcttgctctgctcggcggccttgcgcttgcaggtgcgaagctcggtgcgcagcaccgatagctggttattgtacatcttcatgccctgcttgatcttgcggatgcccttgcggagcaccatatggttctgaggcggcgagttgctggcgctgtcttcgagatctgaactgatggcaagcgtggctgttggtttggaaatgctgcttagttttttcgacgcctgggaaagatcaaaacacttacgtcgcttagttgtagtgggcagcgtatagaagtccttgttgaaatacgccagccccggta

SEQ ID NO: 6407 - DNA, 1482 bp, DROSOPHILA
atgagctccattaagatcgaatttgcagtgcagatgcgaagaggtgacgaatcctatgccggtgccctccgttcggcgctggatggggtcggccaggtggaaattgacacccaggaaggtcgagtgataatccaaacccaacgaccttggtcagagattcaggacaagatagaagccacaggtgtccgggccgtactctccggattcggcggccagtcggcggtggcccttataaacacaacaggaagtgtagtggacaagacaccaatccagggagtggttcggtttaccaccattaccgcagacaagaagcctggagtggttgtggatggcgttgtggacggtctatcgcctggactgcacggattacatattcacgagagtggtgacacttccgcaggttgctcgtcggtcggagaacactacaatccccgccagtcgccacatggaagccctgcagctggggcagaggagcggcacgccggagatcttggcaacatccgagcggatgaaaacggcagggccacctttagatttgtggatccagtgctagaggtctgggacataatcggaagggctgtcgtcctaacagccaatgccgatgacctgggacgcgggggcaatgatcagagcctgattgacggcaactctggggaaaggattgcgtgtggtataattgctcgttcggcgggcatcttggaaaactttaagagaatctgtgcatgtgatggggtcacactttgggatgaacgcaataagccactggctggcaaggagcgctcacaaaagctgtaaacttgtttccatctttaatcttgtaaataaaattatcttatctctaggtgtcactttccacattttgttctagaagtttctgtcgcgacaaagtccacagaacatcaattctcgttccgcaattaaaattagtatactaaaaaccacattcgtagcagttgattttaatggttttaaagttttatttaaaatatttctttgctgtttttctttttgtatttcttagttaaaattaatttgctttttaattattattatctgttttgctctgccaatgactgccggattcgtgtgatgttcgtggttaactacaatttgtttttgcggggcgttaaaaccgaagaacatacagacacttgttgtacgtgataataataataataataatgaataatattcgaaatgcctattgcatttgatattaatagatatatgtgtatataatattaatttgattcctccgttaacactacggcgcatgcctcgttccctaatccacatccgtggggtcaggtgaacgacggcatgcacgctttatatgtaaataagtggtaaaaaatatgtaaagtgtatatgcgtaggtcctaatgcttatttactgcgtttgccgggcgtatttacatatctgttggccttttgtactctacgtgcttttttcgcctcctccggctcctcaagagcctccga

SEQ ID NO: 6408 - protein, 264 aa, DROSOPHILA
MSSIKIEFAVQMRRGDESYAGALRSALDGVGQVEIDTQEGRVIIQTQRPWSEIQDKIEATGVRAVLSGFGGQSAVALINTTGSVVDKTPIQGVVRFTTITADKKPGVVVDGVVDGLSPGLHGLHIHESGDTSAGCSSVGEHYNPRQSPHGSPAAGAEERHAGDLGNIRADENGRATFRFVDPVLEVWDIIGRAVVLTANADDLGRGGNDQSLIDGNSGERIACGIIARSAGILENFKRICACDGVTLWDERNKPLAGKERSQKL

SEQ ID NO: 6409 - DNA, 2849 bp, DROSOPHILA
atacacacacacagcaggacatacacgtgtgtgttgttgtcgcgcacgcatcgatttttccgtttttggtgtatcacaaacttccttattgtccgccaccgcaggatcgactttaaaggctgatgttaagtagaactcctcaacctgccccgatatataccccatagtcattcgccgtggaagaaaaccatattcatatccatatccctgtcccgccttctcaaatttctcacccattctcacctattctctcatcctgcggcctcgttgcgctctgcccataaacatagttccgatactggggattttggggagtctggtcgcaggaaaagtcggaaaatcacaggaaatccaatgtttcgggcttggtgaaaattgcggaaaaggggtaaactaaatcgaggactatttcactactacactacactcgttcgccttgtgggggcgcctccttccactatttttctttctttccggggagttggccgtccgatctcttcgagcgcgcgcgttccgaaccgttcgaggcgatttaacaaactgaaaaggaatccgaacaaaccgaaccaacaccgatgaaattttcatgctctctctgtggagggatgttgatttgtttttcatctcagaatcgagtgcatgcgcagtgtcactcttccatttttcattttcttttgctctgacattcacttgagtatggcgccaatgtgcaacactgcgtatgagtgatgtagaaagccttttcaaatttcatatttaaagaattatttaaaaaattacttttaattcgttttgataatatttaagtaattcacaatattgtatacatagcaactattttttactgaatagttttttaagtagaaacacaagactgaagaaaataaagcaatcaagtaattgataagcgcctatagaaacgtataaaagcagaaaactcagtccatttatgtagtactacaaagctgttgatattaaacgcatctaaataaataaaatcatgtttagattgtcagtcttagttctgaacttactccttgttagccatgaattctcggcaggaaccgcgaaaattgaaattcagccattacctgccctatgcaacggatactgcttccccaccctgaagccagttatggagtatgttgctatccaccaggacaaatggaatacttgtacggaaatattagcgaacgaagcccgcaaggatcagatccagttgaatatccagctggatgccttgaaagcagacgtttccaacataaaggcatcgcagctgtcaaaggatgagaagctggacaggatggagcgagagcagtttgccatgcatgaatctttggagaccatcaatcggtatcttacagtgaaactggacagaacgaaattgcagcttgaggcgatcaaaaacacaatggattatatgaaggcccaaatggatggctatttctcagccataaatggagttcaatgcctacagccaggatttgagaagataggcgatagatatttttacatcgaagaagatgttgagctaaattggctggatgctcaggccaaatgtcgtcgaatgggaggtcacctagcctctataaaaactaaacaggagtttgacgcaatcgtagagaagctcgatgattcgaaatcatacttcctgggcgtcaacgaaaacacaaaaaccggtgactttgtgtctgcagcctccggaaaaagttgtttgtatcacgagtggggtcctggtgaaccccatcacaataatgaccaagagcgatgcgtttcaatcttgcgaaaactcatgcatgtgggcaattgtacttatgaaaaaagattcatatgccagtatggcatctagccagttaaaaaccaaaaaaaatcaaatcattgtgcattttgaagattttgaaaataaaacaaacactttccattgtttgtaaaagttgtatttttaaagattgctgggaacgtaagtactgaagtacagagcagttttgttgaaataggaaacgataaagagacacttaaaggttcctacgttggtcggacaaattttaagtaacttgtaataagcctatttataaaaatcaaatgcaattagctaagtggcgaaatgaagaaatgataatgaccgatttaataatctgatgagttttggtccaagccgggcggttattttcgtacataaagatgagtataaaatagtcgagcagttccgatattcaaattctatgcctgctgctcctcgtttccgtcggcagaggtgtgccacacatgccccatttccagggcctgcaacttgagcagttccttttggctgtccttggcctgaaggtggaacacactttgctggggggagatacaagtaaatggagtacaaagttaatgatagcatatattaatgctttgtttggcaattaattcaaggactcaccttgacctccttggtggtcaggacatccattttgtcgtagatgatggcgtgcaggccgagttcctttaacagcttgatggtatccttggagttgttatcgtcgccccaacaaaacagcaccaatccacgctccttggccagattcacctaaaagcgtccgtagctgaatgattcacgattcgagagtggatcatgttacctgactgggatctcgcagcaggtcctccgtgtgtgccacaacacccaggaactccatggccaccgcgtgccacacggccagctccatggagttgcccctggggtccatatacttctggtatttcgtcgtcctgccgagagttaggaacatgacagggtatcgattttgcttgaatctcagaatagtgcagatatctggatcaaaacaactcagtactatcctgcg

SEQ ID NO: 6410 - DNA, 849 bp, DROSOPHILA
atgtttagattgtcagtcttagttctgaacttactccttgttagccatgaattctcggcaggaaccgcgaaaattgaaattcagccattacctgccctatgcaacggatactgcttccccaccctgaagccagttatggagtatgttgctatccaccaggacaaatggaatacttgtacggaaatattagcgaacgaagcccgcaaggatcagatccagttgaatatccagctggatgccttgaaagcagacgtttccaacataaaggcatcgcagctgtcaaaggatgagaagctggacaggatggagcgagagcagtttgccatgcatgaatctttggagaccatcaatcggtatcttacagtgaaactggacagaacgaaattgcagcttgaggcgatcaaaaacacaatggattatatgaaggcccaaatggatggctatttctcagccataaatggagttcaatgcctacagccaggatttgagaagataggcgatagatatttttacatcgaagaagatgttgagctaaattggctggatgctcaggccaaatgtcgtcgaatgggaggtcacctagcctctataaaaactaaacaggagtttgacgcaatcgtagagaagctcgatgattcgaaatcatacttcctgggcgtcaacgaaaacacaaaaaccggtgactttgtgtctgcagcctccggaaaaagttgtttgtatcacgagtggggtcctggtgaaccccatcacaataatgaccaagagcgatgcgtttcaatcttgcgaaaactcatgcatgtgggcaattgtacttatgaaaaaagattcatatgccagtatggcatctag

SEQ ID NO: 6411 - protein, 282 aa, DROSOPHILA
MFRLSVLVLNLLLVSHEFSAGTAKIEIQPLPALCNGYCFPTLKPVMEYVAIHQDKWNTCTEILANEARKDQIQLNIQLDALKADVSNIKASQLSKDEKLDRMEREQFAMHESLETINRYLTVKLDRTKLQLEAIKNTMDYMKAQMDGYFSAINGVQCLQPGFEKIGDRYFYIEEDVELNWLDAQAKCRRMGGHLASIKTKQEFDAIVEKLDDSKSYFLGVNENTKTGDFVSAASGKSCLYHEWGPGEPHHNNDQERCVSILRKLMHVGNCTYEKRFICQYGI

SEQ ID NO: 6412 - DNA, 15935 bp, DROSOPHILA
tttatatgggtaattgttatttaagattttgcattcttaattaattaaattgaccgttccattgatgcctctcaaataaacaactaaacaagagagaatgcgaaagtcaattttccccgattataagatacctgttagtcagctagtggaaatgcgaaatttcatcatttttctcggatatcaatagatattggggaatgcaaatgtaaaaattatttaaaagtgtgggagtgaccgttttgggtgttttgtaggtgaaaagagggccaccgtgtttttggtatacagataaaaatctaaacatttttcaaaagtgtgggcgtggcagttttgtcaagtacaacctcttattctacgagtaacgggtataaatatgaaatatattatttaataccattagaacagaacgtctacgtattgccgcgattgaattcaaatgatattgaccatggactttacctatgcattatcatgatcaaaataagacaaacccaacgaacaattttacatacatcatccaatagtttattaagtatcataggccgtaaataagttactgtaaaaattattattgacatttattacacaatattatggcgtttaaatttaaatttaacgtaattactatgacttgatagtgttcttctgtaattgatttccatgatgtacacgggtgagaagacaaataaatgtgtaaatgtgacatacatgagttttgatattaatggaagcatcagagtttatcaaagttatcaagttgtctcaaaagatatttcaaaagcaatggattgtctccagacaagtggttttcatgcgtctaatttagacgattggatgacagtttaatgtgcatagatatgcgtgtattattgtgactttggataatcatttcaagtttggttcgctcgcttttgtgtgtcttgtcgaaaaccctccatcgtagttgacagccgttcaacgtgattcagtacattcttcccgattccccaacccataccattcaagactgcttggggtgctggacaggaggcggtggcgccggcttgaagcactgcagcaggaaggcggtgtagaccacaaaggccaccgccagagcaatcagagcgtacataaagatgttcagctcgggctggcggaagcggttcttgcgtagccactccagcacttcgtcctcggataacagatcaccttgaatgagaacgagaatgagaatgagatttctcctttgctcccttcacgttcccacggacatacccctatatatgctgggaaaccgacggcggaagtagaccattgccggcagcttggtgacgccccatttcttggcataacgagagtcggccatcttgacgaaggtgatgtccaggttatccgtctcgctgtcgatgttttcgagtttttccagcgctgcagtactgtccggctgattgtgttcgtctaagtaaaagacatgtttgtactaatcgaaaagtgttttagaaaggatagtaaactcacagaaaaaaacggctaagaactcattttcctcgagtagtttgtcgagcatttttcggtttacttcttctatttcgtttttgatttcgaatacgtcctgtgatgttagccaggtaatcaccttgtcgtgttggtgtagatcgccgtcgtagaggacgggcacttgttttctaaagtgttaaagggttaaaaaacttcacctatagttttgactatcacctaccggaaataaacgagggaaggtatattcactatctcgtatttcttggctgcctggatactagcaatctttacgaaatcaatgccgaacatgtctgcctcaccatcgatctcctccagctcttccaaaatctcctcgcactcagcacaatcatcgtcgtctacataagtgtgtgatgagtttttaagaccattttgtaattcattcaagctgtgatactcacaaaagaaaacaaccaatagagtggactccgccattaggcgatccagcatacgctcgttgacctcctcgatttcatcagccagctcgcggttgtcatcatcgatgagccattccaatactgattgctcgttctgaagatccccctcaaacagtaatgggtttccatttctgcacacaagttcagatgccttagaagtttagttgataggcaatcttgacacttacctgaaataaaccaacgccgggaaagtcttgatcgagtaacgttttgccagctgcggatcctggatcttgaccatatgaattccgaacacgtcgcattcgtcatcgatcagttccaagccctctagtatctggtcgcatatgttgcagttgattttgtctgccgaaaatacatggtaggtcagtagttacccagtagtaattagtgtttataattagagccaagcttgagaatcggttagctatagtgtaagaggcaaagaaaacgccgtaacaaaaaggtattcccgtccaaactaaattccagtgaattctagaaatttggaacgcaaattgtttatcaacagcaaaggaagggcatgcagaaatctcatcatttagtttggtcgtaatacgatgaaagcctggtttagtgctgtcaggattcgattctgggcacagaacagagctcctacggagggttagacttggttagggctccattgagcatgcgaagtcggagcttgggagtttatattgtttgcacgtggaatacggaaggaataccttgtttttcgatacgttttcttttacgtgagatgtagttttgtacgaattggctggatgagtgttttgtggatttggtggtggtcaggttgctttctttaagactagagggggagcagaaactgcggcagaaagcgggttgcttcccattgcgctctggtggcactgaggtcggtacggttgcgattgcggtttcgttttcgggttcggtttgagacagggataagtttttgtggtttatggtcgatgcagtgtgggcggggaggatacaataattcagaatgtgatagatcatgataaagtgacggagtgagaacagttggccaatcgaaccagagtctgatcgataggagctactcacagaaatacacggctaggtactgcgtctcctccaccattgtctccagcatctggcgagtgatcagctcaatacgatcttcggtcttctgggtgataagccactgaagaacctcttcctcctcgctcaattcgcctgtaagataatgacttagtaagggatgcctatcgattgatgactgcttcaccctcgaatacgttggggattcctccctcgaagtaaactagagccggatactcgtgcacgccatagccgtcggccacagagaagtccctggtcttaacgaatgttatgccatgcttgtcgcaatcatcatcgatgttttccaactcctccaaaaccttggtgcactgctcgcagccatccgcatctgattgtcaaagtggggttgagaagtatatgattacaattaatcaattatttgattactgtagacaaggacttgacatacggggtactacacaagcactacataaaaagcagagcagaagttgaagggaagtatgatagagcaaacgactatagttagtacgttttataagtcctgattccactagcacattttcgggtaatgtgataagtgataagtgtacgttggaatcagcaattataattcaaataatatcgtactgaatataagaaataaatcttatcggggatgaggaagataacagctaacgttgataatagaaaggaggagtcgaatataacatagagacagagttggagcaacaaatagatacagtgggtttcgcatggagattctaaattcgttggggtttttacattcgctgtacaaggaggtagtgtgtctagtgtgcgttggctattggtgtctggttgtgctgggttaagtggttaaacattcttggactcattccagttgcacgagttctatacagaaagggtggctaccatcctcttgcttgccagttgaagcatccgctggagcagctgcagaggctggcggggaatccccctcagaacctgccgctggcgcatcctccgccccaccagcggccgcctcggaaggatccgcctcactgccgaaggcggcagcggcgctggctgctccgccctcctgctggtgctgatcgcgctcctttttcagccgcgccttgcgagccgctttcgaattacaaatgtcgcacttggtcttgttccctacgtttggggtatcgatttgtgtggttcggtttgagatttcagagagcacagtcgtaaatagaaatataaataaagtcttgttcggttagatacacagagcgctgataagaggcttagactagatttatctaagtggttatctacaatcataaacacatagttcgctgcaaactgtttgcgcaaaagcgtggtaacaaacccataaagtacgttatacgcgatgcaacatatggttaatttttgaatcaatggaataattctacatttaagaagcctgttggctgatggacgtaacgtgaagtgaacatcaaattgaacattgtactttgtgcgaattgataccaccaaaccgattgcagcgcttaaaaccttggtcctcagagatattgaaaattcatcggttgaatcactgtgtgctttcggttgcaaacttacaaaagtagactgcgatggagccagactcttcaatcagatgaacaagtctttcgccttcgagatcttcgataacatctccacttggatccttttgcgtgatcagccaagttaggatctgttcttcttcgtaaagatcacctgcaaggaaacgagtttactcactgaactaaaacctctctgaactctggacacctaccggcgtatataactggctccttggatgtgggcttgaagaagacaatggcaggcagggcgaacactccgtactccttggccatctgcttatcgtcgattttgacgaagtcgataccagccttgtccgcttcgtcgtctatgtgttccacctcggccaggacgcgaggacactgcttgcactcatcgctatctgagagtggcaagttgtgggttcataaaggtagtccaatcaactgcggacccctaagacttacagaatatcaccgctacgtagtcggagttcttgcggatcttctcgaacatcttgcggttaacctgctcgatgtgatcggtcatctccatgttggccgggctcgttagccagtccagtacctcctcctcgtcatcgatatcgccgtcgtagttgatatacttgccctttcggaaatacgtcagtcctgggggattccggaagccgtacttcttggccatcagtttgtcgtgcatcttcactatgtaaatgccatattccgcagcctcgtcgtcgattagttcgatgtgccgcagcactcgtggcgagtcgggatcatcttctttgtctgcaattgcaagcgatattccattggcattaacatgaatatttcaagtatttggataaagatgttttgattctgatagacttattccgtagaaattatattttgctcgtgtgtttttgggcagttacagtttttagtgggcgcgatttactaaaagtatgtgaaaacctcttggattccttagcatttacaatatattacctaaataccgttcccgaggtatacttacaaaaaacaaccgctaaaaagtctttggtgcctatatactcgaaaagttggtcacgattaatgagttgaatgctttggtcggccttctgttcgagaatccagttgaagacgtcctgattgcttgcaatgttacctgtttgcaaaatcaaacaaaatggttagaactcatcatatttccatgtattaggttgaagtgtctggctcgtccatttggtggcacatacctggcggctgcagtttgtcaatcaatcatcagctttaatcttgaatatgtatacaacattaatgatcgctttgtttattctcacccccgcccaaatgaaattcgaaatcggcactttgccaaatccccacccgcccataaacaatgttacatttggcagcctatgattcaaaatatatggtttttgagggggacatatgcctctgacgaacatacatacatatgtacatcgtcaaggatatattcaagaatatatttaaagattttttttggcctatatgtttgaaattatttaagacaaagaattgcgtattttaacagtgctttaaagtgtatataaataagagaacctaagtttattgagttggatggcttttattaaatattcttacaatttcattcgggagctatgtttacaaaagtgctttatgtcgatttgcgtttgatttttacgatctgacaatttccatttcgaaaatcttgacttatcagctgctgttcaacaaaatttgtttacatatatgttggatttagttacaattgcgtttagattggtaggctttagcttaagaaaacataatgataaagatttctaattcgatatttttcaaataccgataacaaaaacaacagcgagcggtacagaaatcgctctcagaagaaaacaaatgaaacaaaatggcgagctacaatatgcgaggccatgttcagcgagaaatattggattttcgattccataacaaaattaagtatacggcctgtatgctgctgcaacatttctaaaaagttgtggttacaaattatggttcctcatgttgttattatgaaaacttatgaaagttgaaggctctcatagttacacgtttcagttaaattagctaacagttgtgcactgtcaggtgtaaattgtttcaaaaaatattttatgcgtttgttcgttcgtttactatgctttggcccttgtttaaattagactaactacataaatgtaaattgtatattgcgacaaaaagaagtagtatcaaaaaagtttaggcgttcgttattgacaaaagacaatgtcccattaatttgttaataacaaagcttgctgactaaatatacgagcgaaagttctcagaagttttatagttgtttgtcgaagtaattgcttttagtttgaacaaagttttttgaaatccgttggcaaaatgcaacaaatgtgtggtttagttagttatagacctggggacgacctacacaggtcggcccctcttgaagaaagttaaagcgaaaatatcaacaaagttttagttagtaggttttcttgatcattattcattatttcgggtatcgtgtgattctgctactcgtggatcttcttaacgtggaacaacgcccaaggctcgctgcttaaaagtgtggagtaagttctgatctgacacagaagatgtattggtatttaagtcaatgtttttgtgccagactgtttaggattagtgcgaggaaacctcaattttatggacacacagcctgcgaattcagttttcagttggttcttgtcatagttgttgtcttttgcagtcacacatatgtagatgatgtacattaattatagaaacctgtcattgaaggttcttttgctggctatacaggtttgagttggttttgtattttgttttggttttggttttgggtttggtattggttttggtttgataattgttctatcagttggcaacagtgcgtatacgtgctactttagtatggtatatcattcaatcatacaatcaatcactatctaactgtctgtggttatccacattcagttaaactgttgccttactcccacagagagatatcctgaaaaatgatatcatacaaattttttagtcgattttggaaaaaattaatgcctgcaagacacaagagaaagaaaagagaagagaaataaacaaataaggtaacgaccaaattgtgcgtgtgtctgtatgtgtctgagtatgggcacaacaagagcaaagtgatcagggtacaggacaatgagcttgacgtcaaatgaaactctatctcgaattgtttatagtgctaaatgacaacggtgtctggtccgagggtccaacgactacgtaccggatttgacattcagtttgccggacttcttcgccgacttctgtttggataccttctccacctcctgggactggtcgtcgttgtcctggcccttgcctaccggcttcttgccagcctgcggcttgttgcttcctcccgagcgcttgttggcataggaaaccttgaccaggggacttgtcctcgtcgtcctcatcgtcgtcatcggtgtccttggagggcttggcctgcttcttgatggcagctggcttggtggacgatttgctggacgcctggttggcaaactggaagttgccgccgctgggacgcttgccctgatcgccttcgctatgcccgatccgctgggcggtcatcttaggaactttcgttgacttctccaatttggttggacagcattggaatggtttgtaatcgttgggcacgaaattgttgccgcgcttagctgaatggccgtcatgacccaatccaacatagaaacattcgtcatctgtgtaagcaaacaaacaaaaacattttgtcagattgtttaatttaaaagattttggttttttttggttcactatcaacagaaggttcgttacgataagttaaaaaggtttcaacaaaagtgcatcattgtaggctagaactaagaatagaagtcgcaaactggctttttacacttttcttaacacctccgatattaccacagagaaagaaaaagagcagttagtacgattttcgatttaattttcattatattcagacttgaaagattctttgttctagagtagaagcgtgctttatgagtggaagagattcgaaattgttataagatataatttaaattatattgcaaaactacaaaactaactgacaaaatgcttttgatgctgactgtacaagtttcggattttgattctaatttacaaacatatcaaatgtcgagttaagcccacgttgttgtacatttcgttttcgactaagtgtcagtgagttcactgcgtctcactttatcgaacttatggttgtttttgtttatatgcttaaatattttccatggaacaacaggatcgttataaattaatatatatgtaaacaaacataacgattacttaaagtattatgagaaagtaaattataaatcgaacaaattaggtattaacacaattgttgtatcattatcaaaatagttacgtttttaaataaaaaaccttaagttgcctggcttaaataatttcaaacattgtgtcagctatgtatgatttaatattctttaaacgtgtccttgtagtaacaaggacaatggactttgaaagtggataaagctgcggatgtaggtgtaggattactagttcaagaggattaaaagtatacgaatgtgggtagctattttgactggactgtgtattcccaattaagattgtgcctcacatgatagttgatttagcacagaagcaatgcgcagagcacagacacagaaatcacgtgattgtagagtggttaccttggttaaatgcatttctatttgaattcctcttccccaagtctgtagatagacaatgaaattaactttagtcaaagttacagagtgtttttttttttggcatagtacagtgtacaaggatgtgttctcgggtgggatgaaattgggaagggaatttaagtcgggttggacaaaacattgaacaacttgaagttagtgcgtcaatggcaactcacattcaggtattacctatttcatctataagccgacctgagcaaaggtcagcaagacggtgtatcgttcgacctttggccgtgtgcctatattttggtttacttttaatatcctcttcttcttcttcgtcgtcctcattatcgtcctcccctgttgcgtcctcgtcatccttatccttgtcgtccccgtcgtcgttatcatcctcgtcctcatggtcttttttgttatcgtcgtccccgtcatcatcgtcatcgtcctcctcgtccccgtcctcatcatcctcgtcatctcccttattatcttcgttgtcattttcgtcctcatcttcgtcgttttcatcctcatcgtccttgtcgtcttcattattatcttcttcgttatcttcgtcgtccttattattatcttcttcgtcatcctcgtcgttatcattattgtcttcttcgtcatcctcgtcgtcttcatcgtcatcttcgtcgtcattattattatcttcttcgttatcctcgtccttgtcgtcctcattgtcatctccgtcatcgtcgtccccatcattatcttcatcttcgttttcattattgtcctcttcgtcatcctcgtcgtctccattattatcatcttcatcatcctcgtcatcgtcatcattattgtcatcttcttcttcgtcctcgtcgtcctcgtcgttcccgttattatcatcttcttcgtcatcctcgtcgtcctcatcattatcatcttcgtcatccccattttcattatctttatcatcatcctcatcatcgtcatccctagcagtatctttctcccctgtttcatcttcgttatccccattttcatcatcatcagtttctagtctttttttatgtaatctctcattgcgaatcgaattctgcagacgctttaatctttctcttttatcctcatcgctttctttgggatagcgcaatttaacaattttttcattactgtcgccgtcatcattgcctatataagaaattatcattacgtattgtacttttaatttaggcaagaaacgggtaaatgatattggatttataatttttaagatttatgaaatcttctttgactttgtatcgaaagtttggcttatgatcgtgagttataaagcataaacacgtttaagaaaggacgcttactcttttgattgactaaccactgcagcacacggttttcatttttgagattacctataggagaaaatactgttagttcaggctgtaataatataccaaagatccccaacttaccatcatacataatcgggacgccggtctcgtagtagaccaaagctggaaatgcgaaaatgccaatttcatgagccagcttaacatcatttgatttgacaaattgtattccgtgcttgtcggtgtcatcgtcgatgttctccaactcctccaagatgtcggaacacgattcgcattcatcgtcgtctgtggtacaaacaatcaatgtcaaccaaagatcttattgaacttaatgagaaatacacttacagaagaacacagccaggtgctcaacatcgttgatcaaaacttgcagggtcttacgatcgacagattcaatgacatcagctgtggactcgtgcaaatcaataacccactcgagaatttcctcttccttcatcaggtcaccttttaaagaaaattacaaacatgtaccttggctaataaagtattcattaaatgtatcagcactcaccggtgtaaattgttctaaacttatgtctataaaatgcaagtgccggcagaccgggcaggtcgtactccttatcaatatcgtcgtcggatgtctttacaaagtcaatgtctttttcctcgcattcgtcatcgatgttctccagctcgttaaggatcttttgggccttcttatcgccctcagcgtctgcagaaaacggttttaaggataatacaatataaggttttaagttggcttacagaagaatacgacaacgtgatcgttttcagccaagatcttgtccaacatcttcacattgacctcctcaatttttccgggaatttcaagggtctcgtcgtcagtaatccaggccaacacctcgtcctcgtcgtccagatcaccggtaaagtgaagtggatcacgattcctgaagaacaccagacgtggataggtcttgacgttgtatttcttggcaattccggtatcctcagtggtaacaaaaattatgccagcctcatccaattcatcgtcgatgctttccagggcgttcagagtgtgctcacaggtctctccgggctcgcagggacccgtaaagaagacgacgacatattcgtgttcgttgatcagagtgaccaggatctcatcggtaacctcctcgatagtagctgtctttttctggacaagaagccactcgagcacctcatcctcgttcatcagatcgccttcatagagggccgggatcttgttttcgaagtagatgagggcgggcaaatgatcgagaccatattccttggcctcagcggcgttatcaatgcggacgatgacaattccctccttctccagctcgtcatcaatgttctccagttcgttcaggatgcgcatatcctgcttatcgtccttgtcgtctgtgagcgaatggtaatgattgcaaaggcgtaggtacattagcagtgtggtctactcacagaatataaccgccaagtgctcggtgttctcgaccaacttgtccttcatctcatcggtgacctcgggaatttcggaatagcgcttctggtgcaccaaccagccaagcagctcatcctctttcatcagatcaccctcgtagatgtgtggaattccacgttcaaagagtacaatcgatggtatctcatcgataccccattctttggcctccttgtcatcatcgatcttgacaaaggcaatatcgttctgatcgcactcatcgtcgatgttttccagttctgcgaggattttctgtgatttcttttggtctttgtcgtctgcgaagatgatttcataggataatttaacaattgtctgcaacgcgttggaggctatgtaattaactgatcaacaaactgctgttttgctcaacttgtaacgtgaaacctacaatctacactgttctaacggtctttgcagagatataccttcacgaaaaggggtctactagttattattgtttagttttaagttaatactttttccaagcgccattgaaaattactactagaaagcggggttaatgttacgattgcagtcaccccagaagtacaacaccaattcaactgtacaatatcaacagagatagggagtcgagtgcgcaagcgtcctggcacaaagtcgcaatggggccctgaaataacttacagaaaagaacagcaacatggggcattttctcaatgattaagtccaacatttcgtcggtgatgtcctcgatttgatcggaactcgtttggtctgttagccatttcagaagcttctcctcgtcctccagattgccctcgtaaatagttggaatgcctttttcaaagtatatcagtttaggaactttattgatgccatattcaacggcctcctcgggattgtcgatcttcacgaaagtaatgcccaatgcgtcgcactcgtcgtcaatgttctccagctcctcgagcactttctgggacttcttgtcgttgttgtcgtctggaaaacagcttatgagcaaaacgtgttcgccgccttaggcgcaatgggtacggggtttcaatatttacagaacagcacggcaatgacgcgtccttctttgatcattgtatcgagcatttcgtcggtgacgtcctcgatctcatcccgttccaactgtcccaacaaccatttcagaatctgctcctcgtccatgagatcgccgtcgtacacatttggaatttctttttcaaagtaaacaatggccggaatctgcaggtcgaattatgttatttgtgtcaaagacgtttcaattgccagctcgctggaatcctaccgaatcgattccgtaatcggctgccgccttggcatcgtcgattttcacaaactgaatgccatgcttgtcgcagtcgtcgtcgatttgctctagctcctctaacacggtcatcgagtcgtcgtttccatgatcatctgcagattaatgtcagtcggttatcgcgtgtcgcgcctcgcggaaattctcatctacatacaaaacagcacaaccagattgtcgatattgctgatcagcgtcgacagagtcttcgaagtgacgtcttcaatcacatcatcttcatcgcccgtcgacttattctgcaccaaccattccaagacgtcctcctcccgctgaagttcacctggagacacagttcgatattagcgaaatgaataccgagctcagcatgggattgatgtgtgttggtctgaattcgatttgagtggtgggtggtgcaggtttcaagagaatgtggtttgggatggaggtaccttcgtatatgatcggagtctggtggcggtaatagaccaaggctggcagattgcctagattgtattcgtcggccaaggcctcgtcgtgtatcttcacaaacccgatgcccagctggtcagcttcgtcgtcgatattctccagctcctgcaaggccttggcgcacttgcggcattgctgtttgtctggcagtcgcgatcgcggatttggtggattgtttcatagaatcaggcaaacaatagataattagggccgtctggcagaggggtaacgtcttggtaagcaaggagtagagcacagaacatcagggtgggctctggtgttgggtattataatacacggataggaagaacattcaggtattatatttcgtgcggccgtaagttattctgcggggtgttattgtggagccatctcagacatatgtgagtgcatgcaagggccatggagttccacttaacgctacggttacccaatctttcccaggcgattcgtttatttacacaatttgtttacaacatccctatcagtctgcgtgcaacctgttgcaatgtgcttgtcttggtaaaggaaatacatatgtacatatcagagtggtttaataaaagaggaatggttttttctgaaagctctctccttgcatttaccttttcctctatttctttgtgttgggcttaccacattcgtaaatgtgttttcggcaagctttcgcttctctggccgacgctgcgtatacgtaatatttatttctgttgcttcgtcggtgaacttgtcagtgtgatagctgcctggccacatgtttatggcaacctatcaccgcatctttccgaatgcagttagccggcggtagtgcccagaatgacacgccttcaaaagccattaccccgaccaaaatacatacgtatgtctctaatttccccgatcgacgcgactcattcccagcagctgtttgagtgggtgtcgccaaggtgacaaggccaacgcacacactcgctcgcgaaaatgtctcataatttactgcacaatgcacaatgatggcaaaacatacatatgtacccacatatgtgctaaatcgagaaaatcagacgtgtttgcgagccttcaactttctccctgacggactgaccaatttttggccctgccgcagacatgggcaaatgttgcacttaactaaaaatagtgcaagtcagtcgggaaagagccacgcacacacagttatagatctgcagtgggacggacggatacgaatatatcggtataggtattcgtatattatgtaaaccagcatttggctgcgacaactgaagatctgcccataaccatgcactgccggctcgtgtgcgccatgttgatgtattgctgaatgcaagagcaattaaaagcgctgtctgtctgcagcccctgatggattcaaactcaattgcggggggatggccgggggcgcagtgaagggggcgggcgggacaatgggccacgatttcttgtcttgggtcacctacatgctgttcgcatctatgcatacatacatgcatctatgcatctatgcatcttgcattaggataagcgttttgttttttgtatgctgtctgcgtttgataaaaatacctatggatagtgtagcggatgctacagaaatgttcttgtgaattcacacacttgccatgtgagtgtggctatagttagttgtttcagaattaagcaaaaataacagcagcagcaagaacagcgaaaaatcattttgttggcccaccaactgcttgagttttctatttttaacactaaaattgtaggtggctgt

SEQ ID NO: 6413 - DNA, 4893 bp, DROSOPHILA
atgtggccaggcagctatcacactgacaagttcaccgacgaagcaacagaaataaatattacgtatacgcagcgtcggccagagaagcgaaagcttgccgaaaacacatttacgaatgtggtaagcccaacacaaagaaatagaggaaaagacaaacagcaatgccgcaagtgcgccaaggccttgcaggagctggagaatatcgacgacgaagctgaccagctgggcatcgggtttgtgaagatacacgacgaggccttggccgacgaatacaatctaggcaatctgccagccttggtctattaccgccaccagactccgatcatatacgaaggtgaacttcagcgggaggaggacgtcttggaatggttggtgcagaataagtcgacgggcgatgaagatgatgtgattgaagacgtcacttcgaagactctgtcgacgctgatcagcaatatcgacaatctggttgtgctgttttatgatcatggaaacgacgactcgatgaccgtgttagaggagctagagcaaatcgacgacgactgcgacaagcatggcattcagtttgtgaaaatcgacgatgccaaggcggcagccgattacggaatcgattcgattccggccattgtttactttgaaaaagaaattccaaatgtgtacgacggcgatctcatggacgaggagcagattctgaaatggttgttgggacagttggaacgggatgagatcgaggacgtcaccgacgaaatgctcgatacaatgatcaaagaaggacgcgtcattgccgtgctgttctgcggcgaacacgttttgctcataagctgttttccagacgacaacaacgacaagaagtcccagaaagtgctcgaggagctggagaacattgacgacgagtgcgacgcattgggcattactttcgtgaagatcgacaatcccgaggaggccgttgaatatggcatcaataaaacaattgttaaattatcctatgaaatcatcttcgcagacgacaaagaccaaaagaaatcacagaaaatcctcgcagaactggaaaacatcgacgatgagtgcgatcagaacgatattgcctttgtcaagatcgatgatgacaaggaggccaaagaatggggtatcgatgagataccatcgattgtactctttgaacgtggaattccacacatctacgagggtgatctgatgaaagaggatgagctgcttggctggttggtgcaccagaagcgctattccgaaattcccgaggtcaccgatgagatgaaggacaagttggtcgagaacaccgagcacttggcggttatattctacgacaaggacgataagcaggatatgcgcatcctgaacgaactggagaacattgatgacgagctggagaaggagggaattgtcatcgtccgcattgataacgccgctgaggccaaggaatatggtctcgatcatttgcccgccctcatctacttcgaaaacaagatcccggccctctatgaaggcgatctgatgaacgaggatgaggtgctcgagtggcttcttgtccagaaaaagacagctactatcgaggaggttaccgatgagatcctggtcactctgatcaacgaacacgaatatgtcgtcgtcttctttacgggtccctgcgagcccggagagacctgtgagcacactctgaacgccctggaaagcatcgacgatgaattggatgaggctggcataatttttgttaccactgaggataccggaattgccaagaaatacaacgtcaagacctatccacgtctggtgttcttcaggaatcgtgatccacttcactttaccggtgatctggacgacgaggacgaggtgttggcctggattactgacgacgagacccttgaaattcccggaaaaattgaggaggtcaatgtgaagatgttggacaagatcttggctgaaaacgatcacgttgtcgtattcttctacgctgagggcgataagaaggcccaaaagatccttaacgagctggagaacatcgatgacgaatgcgaggaaaaagacattgactttgtaaagacatccgacgacgatattgataaggagtacgacctgcccggtctgccggcacttgcattttatagacataagtttagaacaatttacaccggtgacctgatgaaggaagaggaaattctcgagtgggttattgatttgcacgagtccacagctgatgtcattgaatctgtcgatcgtaagaccctgcaagttttgatcaacgatgttgagcacctggctgtgttcttctacgacgatgaatgcgaatcgtgttccgacatcttggaggagttggagaacatcgacgatgacaccgacaagcacggaatacaatttgtcaaatcaaatgatgttaagctggctcatgaaattggcattttcgcatttccagctttggtctactacgagaccggcgtcccgattatgtatgatggtaacattgcaagcaatcaggacgtcttcaactggattctcgaacagaaggccgaccaaagcattcaactcattaatcgtgaccaacttttcgagtatataggcaccaaagactttttagcggttgttttttacaaagaagatgatcccgactcgccacgagtgctgcggcacatcgaactaatcgacgacgaggctgcggaatatggcatttacatagtgaagatgcacgacaaactgatggccaagaagtacggcttccggaatcccccaggactgacgtatttccgaaagggcaagtatatcaactacgacggcgatatcgatgacgaggaggaggtactggactggctaacgagcccggccaacatggagatgaccgatcacatcgagcaggttaaccgcaagatgttcgagaagatccgcaagaactccgactacgtagcggtgatattctatagcgatgagtgcaagcagtgtcctcgcgtcctggccgaggtggaacacatagacgacgaagcggacaaggctggtatcgacttcgtcaaaatcgacgataagcagatggccaaggagtacggagtgttcgccctgcctgccattgtcttcttcaagcccacatccaaggagccagttatatacgccggtgatctttacgaagaagaacagatcctaacttggctgatcacgcaaaaggatccaagtggagatgttatcgaagatctcgaaggcgaaagacttgttcatctgattgaagagtctggctccatcgcagtctacttttggaacaagaccaagtgcgacatttgtaattcgaaagcggctcgcaaggcgcggctgaaaaaggagcgcgatcagcaccagcaggagggcggagcagccagcgccgctgccgccttcggcagtgaggcggatccttccgaggcggccgctggtggggcggaggatgcgccagcggcaggttctgagggggattccccgccagcctctgcagctgctccagcggatgcttcaactggcaagcaagaggatgatgcggatggctgcgagcagtgcaccaaggttttggaggagttggaaaacatcgatgatgattgcgacaagcatggcataacattcgttaagaccagggacttctctgtggccgacggctatggcgtgcacgagtatccggctctagtttacttcgagggaggaatccccaacgtattcgagggcgaattgagcgaggaggaagaggttcttcagtggcttatcacccagaagaccgaagatcgtattgagctgatcactcgccagatgctggagacaatggtggaggagacgcagtacctagccgtgtatttctacaaaatcaactgcaacatatgcgaccagatactagagggcttggaactgatcgatgacgaatgcgacgtgttcggaattcatatggtcaagatccaggatccgcagctggcaaaacgttactcgatcaagactttcccggcgttggtttatttcagaaatggaaacccattactgtttgagggggatcttcagaacgagcaatcagtattggaatggctcatcgatgatgacaaccgcgagctggctgatgaaatcgaggaggtcaacgagcgtatgctggatcgcctaatggcggagtccactctattggttgttttcttttgtgagtatcacagcttgaatgaattacaaaatggtcttaaaaactcatcacacacttatgtagacgacgatgattgtgctgagtgcgaggagattttggaagagctggaggagatcgatggtgaggcagacatgttcggcattgatttcgtaaagattgctagtatccaggcagccaagaaatacgagatagtgaatataccttccctcgtttatttccgaaaacaagtgcccgtcctctacgacggcgatctacaccaacacgacaaggtgattacctggctaacatcacaggacgtattcgaaatcaaaaacgaaatagaagaagtaaaccgaaaaatgctcgacaaactactcgaggaaaatgagttcttagccgtttttttctacgaacacaatcagccggacagtactgcagcgctggaaaaactcgaaaacatcgacagcgagacggataacctggacatcaccttcgtcaagatggccgactctcgttatgccaagaaatggggcgtcaccaagctgccggcaatggtctacttccgccgtcggtttcccagcatatataggggtgatctgttatccgaggacgaagtgctggagtggctacgcaagaaccgcttccgccagcccgagctgaacatctttatgtacgctctgattgctctggcggtggcctttgtggtctacaccgccttcctgctgcagtgcttcaagccggcgccaccgcctcctgtccagcaccccaagcagtcttga

SEQ ID NO: 6414 - protein, 1630 aa, DROSOPHILA
MWPGSYHTDKFTDEATEINITYTQRRPEKRKLAENTFTNVVSPTQRNRGKDKQQCRKCAKALQELENIDDEADQLGIGFVKIHDEALADEYNLGNLPALVYYRHQTPIIYEGELQREEDVLEWLVQNKSTGDEDDVIEDVTSKTLSTLISNIDNLVVLFYDHGNDDSMTVLEELEQIDDDCDKHGIQFVKIDDAKAAADYGIDSIPAIVYFEKEIPNVYDGDLMDEEQILKWLLGQLERDEIEDVTDEMLDTMIKEGRVIAVLFCGEHVLLISCFPDDNNDKKSQKVLEELENIDDECDALGITFVKIDNPEEAVEYGINKTIVKLSYEIIFADDKDQKKSQKILAELENIDDECDQNDIAFVKIDDDKEAKEWGIDEIPSIVLFERGIPHIYEGDLMKEDELLGWLVHQKRYSEIPEVTDEMKDKLVENTEHLAVIFYDKDDKQDMRILNELENIDDELEKEGIVIVRIDNAAEAKEYGLDHLPALIYFENKIPALYEGDLMNEDEVLEWLLVQKKTATIEEVTDEILVTLINEHEYVVVFFTGPCEPGETCEHTLNALESIDDELDEAGIIFVTTEDTGIAKKYNVKTYPRLVFFRNRDPLHFTGDLDDEDEVLAWITDDETLEIPGKIEEVNVKMLDKILAENDHVVVFFYAEGDKKAQKILNELENIDDECEEKDIDFVKTSDDDIDKEYDLPGLPALAFYRHKFRTIYTGDLMKEEEILEWVIDLHESTADVIESVDRKTLQVLINDVEHLAVFFYDDECESCSDILEELENIDDDTDKHGIQFVKSNDVKLAHEIGIFAFPALVYYETGVPIMYDGNIASNQDVFNWILEQKADQSIQLINRDQLFEYIGTKDFLAVVFYKEDDPDSPRVLRHIELIDDEAAEYGIYIVKMHDKLMAKKYGFRNPPGLTYFRKGKYINYDGDIDDEEEVLDWLTSPANMEMTDHIEQVNRKMFEKIRKNSDYVAVIFYSDECKQCPRVLAEVEHIDDEADKAGIDFVKIDDKQMAKEYGVFALPAIVFFKPTSKEPVIYAGDLYEEEQILTWLITQKDPSGDVIEDLEGERLVHLIEESGSIAVYFWNKTKCDICNSKAARKARLKKERDQHQQEGGAASAAAAFGSEADPSEAAAGGAEDAPAAGSEGDSPPASAAAPADASTGKQEDDADGCEQCTKVLEELENIDDDCDKHGITFVKTRDFSVADGYGVHEYPALVYFEGGIPNVFEGELSEEEEVLQWLITQKTEDRIELITRQMLETMVEETQYLAVYFYKINCNICDQILEGLELIDDECDVFGIHMVKIQDPQLAKRYSIKTFPALVYFRNGNPLLFEGDLQNEQSVLEWLIDDDNRELADEIEEVNERMLDRLMAESTLLVVFFCEYHSLNELQNGLKNSSHTYVDDDDCAECEEILEELEEIDGEADMFGIDFVKIASIQAAKKYEIVNIPSLVYFRKQVPVLYDGDLHQHDKVITWLTSQDVFEIKNEIEEVNRKMLDKLLEENEFLAVFFYEHNQPDSTAALEKLENIDSETDNLDITFVKMADSRYAKKWGVTKLPAMVYFRRRFPSIYRGDLLSEDEVLEWLRKNRFRQPELNIFMYALIALAVAFVVYTAFLLQCFKPAPPPPVQHPKQS

SEQ ID NO: 6415 - DNA, 4846 bp, DROSOPHILA
tgttgtaagttttccttttgatcttgaaaagctgttgtttaaagcatagcttaatctgaacatactaactatatcatcatatcatgaaaacttgccgaagaggactaaccaattctcatcctttgcagacgatataaaggcacatgatagcagggtcacgagccttgatcttggcgaaactggacgagtgctggtcaccggaggagaggatcgcaatgtgaacctctgggcgattggtcaaaatgagtgctttatggtgaatatactaactacttcctaaatatatgtatgtactaatcggtgaccctttcctttcagtctctgacgggccacaatcgttccatcgattgcgtgcgttttgcttataaggataactttgtctactccgccgacgacatcggtataatccgaagatgggatctgaattcacagaaaatctactccacgctaaatggccacatgaagagtgttcgcactctggactttaacccgtctggagaatatgtggtgtccgggagcaatgataccaccgtcaggtgagccaaggaccgatatataaatagtcagagtaacccatgagtcattcggaagctctagtttccttatcaagtggcagatttaaagtttattcgttgattgaaaagggatggcgatattctccctccctcttttagctgtgcttaatcctatagaatcgcgtattttgggtttaataatctacacaaaagaaaaatctcatatttagaaattagaaattttatatcggtttaatgcacatacatattagatgcattgtatctatatggtcttttcttagatatcacttgacctatatatgtgtaaaacaaagataatatgactcactacattgcacaaaaggggacaggctgacaaagataatatcactttgtgttgtttagctaaagttgatatttcttttgggatctcatatatcttatctctcagatctattacatccatgatcttaaacaacattgcattttcagttatgtgatgttttattgggagttttataaaagtgttacaaaaaaatacttctaccaccacgggcgtttaaacaattgcatatgtataggcatatttgttatagtgtatgtacaaaaaaaaacggacgcgaaacgaattataaagtcaatgataatccattgcgactaaggcagactatgtgtctctaggtgatccgcgcttacagcttggcctgtgagctcttcaggtcgacataggcgccggatatgacctccttgccggtctccacgaccacggtgcggaagttgatgcgtgtgccctgcttccacaagtccacgcgcaaagtctggcccggaattacgggtccggagaagcgcactttgacagccttgaacagagccgggttgttgtccgcaaactgagcgagcacggcgcgcaccgagaagcccagtgtgcagagtccatggaggatgggtgtcttgaagccggccagcagggccatctggggatcgatatgcagggggttcttgtcgccggacagacggtacagcgccgcctggtcctcgctggtcgtatactggacggttgcgtccggttggcgattgggcgccggctgcagcggaactacaccagcgatgggatccttcttgcctccgaatttgccagcgccgacaatgaaagtggtgctctggttgcgcaccaacaggcggccactttcgtcgaacgactcgctattggtgacgaccacggcgccggatcccttgtccataacatcgaagaccttgccgttggtcagcaaagtgccactggtgggcagatcgtcaacgatctctaggtactgttcgccgtgcagaatgttgctgaagtccacttggctgttgggcaaagccttgctgagcagcttgtcggtggacatttgcagcagaaggccgggcagaacgaagaaagttggaatggcggcgaaatcggcatcgttttcgtacaggaagcgcatgtccttcgcgtttttgacggatgccccaatgcccagggcgtaggtaataagctctttgctattgaactcgaaggcatcctcgatggcgtcgccgccgccttccttgagcttctcaagcacttccagcagggtgccggaggcctctgcgatggcacccaagtgcttggccttggacatgtcggtcacattcgaccacacatccttgacgtactcaatggtcacggggtcgtccagcgaaggacgcagcacagcgcccttgccgcgaaccatgtgcagcttggtggcccagccggcggcactctcgatatagctacctgtggatcggagaagagggagagagaaaacgtttaataaaccctatatatacacacatgtacacatattcctgataaacggtctaagttcaaacgctatcagtatgaatttccctaatcaggcagattatgttgaccatttggattggactactggacatattaaagatgacttagcagtggttggccaaaaattgcataattttgtagttctcaaagggttaaattgatacaaattgatatgataatcaattctgagataatgcaattctcgcataacttcggatcccacttaccattatcctcgcaggactcgtggcacaagtaggccactacgggagcaatcagcttgggcttcagctcgttgaagagaatgtcgggcagaatgccctcggtcattcgactggcggcagttggcacgatgacgttgcaaagaacattgttgcgggctccctcgatggcaaccgtgttggccaatccgatgaggcccatcttggcggcagtgtagttgacctgcccgaaattaccatagatgcccgagttggacgatgtcatgatgatgcggccatagttctgcttcttcatgtacgggaatgccgcctgggtgcacttaaagctgcccttcagatggacatcgttgaccagattccagtcctgttcgctggtcttcaccagactcctgtcgcgtagaatgccggcattgttgaccaggatatcgacgcgtccgaaagctttgatggccgtctcgatgacctttgccccatcgattaccgagttgtagtcggccaccgcctcgccgccggccttacggatctcatccaccacaatgtcggcggcccgctgcgatgctccatcgccggagtgggtgccacccagatcgttgaccaccaccttggcgccacgctccgcgaagagcagtgcgtactcgcggcccaaaccggcaccagctcccgtcaccaccgccacacggccatcgtaacgaagttttccatcggatgaggacatggtctgtctattggtcaatagcaatcgcaatttctggtttcgctgcacaaatccggtctctgcggcaacgctttttcggctgtaaaacacgaatgaaccgatgaaaataaactggttggctaataatcgaacaagaaaggagagtagcactacttttcaatcgtacttaatctcaagcgataatgctatctgccctgccctcgcatatgtgagtgtaactctggactcttcggctgaagaacgttacccaggcgatatggtccaagtccaggggttcacggttcatagtcaagtgcttttcggatggcaccgaaatcgccgaaatccgagatacaagatacatttgcacagtgacgacagcacagttattcgaaccgcgtgaaatggcccacacacacacacattaaacaagggttaacttacagttctcgtagattcgccgtatgatggtatggtatgcccgaatatgcacagattaacccagtatcagtggtacaaagtgcatcactattcgctgccgagataattttgcaatcgtttaatcggttcaacccatgaaaatgcactaaaatatactgcccgcattcatacgtttgtgagcactagaaagtagtgccgtcaaaatgctggaaagcagtgcatcgcggacgtaaacctcggttcggaacttcgctaagccgtagcaaagactccaacccgttttcattttccagacgattaaatttaaaaatgaacaattatggaaattacacttatcttccacatttcaaattcaactatgtctctttatttaacatagaaatgtataaaacaacaataaattgagcaacaataaatgaattaactaggagattacatatattattgaaactttatgaattacatatgctttgttgcttatttagcaaactattaactttcatatgtctgcaatctcaggctttgggacgtgcagaacgaaaacaactgcattaaggtatgtcgcggccacatgtcccacgtgaattccgtaaaattctcgccggatggtctttggattgcctctgctggcctggagggttccatactcatctgggacatacggaagagcaaacagataatggagttcatagccgatccgccggttacggctatcacatgcgtgcaattccatccgtttgagttcctgctggccgccggtcgcgtcgatggcaccgtttccatttacgatctggaacaccagcagctcgtctcgcagaccacgcacttctatggccaggccatcaggtgtataacctttaggtgagtcctgcaaagaataatccgcaatcgtgaattgatttatgaaaagaaatagtaatatagtaattttgccaaaaagtgcataaattctaattatctgcatgttaaactttatttatttcagtgacaatggcgagtgcctttttgttggcagttcttcgggcatttcggtaattggatgggaaccggatcgtgagctggaccatataaaaagcacctggtcctccttggcggacatgaaagtggtcaacaataagttggtaag

SEQ ID NO: 6416 - DNA, 2206 bp, DROSOPHILA
ccgattaaacgattgcaaaattatctcggcagcgaatagtgatgcactttgtaccactgatactgggttaatctgtgcatattcgggcataccataccatcatacggcgaatctacgagaactccgaaaaagcgttgccgcagagaccggatttgtgcagcgaaaccagaaattgcgattgctattgaccaatagacagaccatgtcctcatccgatggaaaacttcgttacgatggccgtgtggcggtggtgacgggagctggtgccggtttgggccgcgagtacgcactgctcttcgcggagcgtggcgccaaggtggtggtcaacgatctgggtggcacccactccggcgatggagcatcgcagcgggccgccgacattgtggtggatgagatccgtaaggccggcggcgaggcggtggccgactacaactcggtaatcgatggggcaaaggtcatcgagacggccatcaaagctttcggacgcgtcgatatcctggtcaacaatgccggcattctacgcgacaggagtctggtgaagaccagcgaacaggactggaatctggtcaacgatgtccatctgaagggcagctttaagtgcacccaggcggcattcccgtacatgaagaagcagaactatggccgcatcatcatgacatcgtccaactcgggcatctatggtaatttcgggcaggtcaactacactgccgccaagatgggcctcatcggattggccaacacggttgccatcgagggagcccgcaacaatgttctttgcaacgtcatcgtgccaactgccgccagtcgaatgaccgagggcattctgcccgacattctcttcaacgagctgaagcccaagctgattgctcccgtagtggcctacttgtgccacgagtcctgcgaggataatggtagctatatcgagagtgccgccggctgggccaccaagctgcacatggttcgcggcaagggcgctgtgctgcgtccttcgctggacgaccccgtgaccattgagtacgtcaaggatgtgtggtcgaatgtgaccgacatgtccaaggccaagcacttgggtgccatcgcagaggcctccggcaccctgctggaagtgcttgagaagctcaaggaaggcggcggcgacgccatcgaggatgccttcgagttcaatagcaaagagcttattacctacgccctgggcattggggcatccgtcaaaaacgcgaaggacatgcgcttcctgtacgaaaacgatgccgatttcgccgccattccaactttcttcgttctgcccggccttctgctgcaaatgtccaccgacaagctgctcagcaaggctttgcccaacagccaagtggacttcagcaacattctgcacggcgaacagtacctagagatcgttgacgatctgcccaccagtggcactttgctgaccaacggcaaggtcttcgatgttatggacaagggatccggcgccgtggtcgtcaccaatagcgagtcgttcgacgaaagtggccgcctgttggtgcgcaaccagagcaccactttcattgtcggcgctggcaaattcggaggcaagaaggatcccatcgctggtgtagttccgctgcagccggcgcccaatcgccaaccggacgcaaccgtccagtatacgaccagcgaggaccaggcggcgctgtaccgtctgtccggcgacaagaaccccctgcatatcgatccccagatggccctgctggccggcttcaagacacccatcctccatggactctgcacactgggcttctcggtgcgcgccgtgctcgctcagtttgcggacaacaacccggctctgttcaaggctgtcaaagtgcgcttctccggacccgtaattccgggccagactttgcgcgtggacttgtggaagcagggcacacgcatcaacttccgcaccgtggtcgtggagaccggcaaggaggtcatatccggcgcctatgtcgacctgaagagctcacaggccaagctgtaagcgcggatcacctagagacacatagtctgccttagtcgcaatggattatcattgactttataattcgtttcgcgtccgtttttttttgtacatacactataacaaatatgcctatacatatgcaattgtttaaacgcccgtggtggtagaagtatttttttgtaacacttttataaaactcccaataaaacatcacataactgaaaa

SEQ ID NO: 6417 - protein, 598 aa, DROSOPHILA
MSSSDGKLRYDGRVAVVTGAGAGLGREYALLFAERGAKVVVNDLGGTHSGDGASQRAADIVVDEIRKAGGEAVADYNSVIDGAKVIETAIKAFGRVDILVNNAGILRDRSLVKTSEQDWNLVNDVHLKGSFKCTQAAFPYMKKQNYGRIIMTSSNSGIYGNFGQVNYTAAKMGLIGLANTVAIEGARNNVLCNVIVPTAASRMTEGILPDILFNELKPKLIAPVVAYLCHESCEDNGSYIESAAGWATKLHMVRGKGAVLRPSLDDPVTIEYVKDVWSNVTDMSKAKHLGAIAEASGTLLEVLEKLKEGGGDAIEDAFEFNSKELITYALGIGASVKNAKDMRFLYENDADFAAIPTFFVLPGLLLQMSTDKLLSKALPNSQVDFSNILHGEQYLEIVDDLPTSGTLLTNGKVFDVMDKGSGAVVVTNSESFDESGRLLVRNQSTTFIVGAGKFGGKKDPIAGVVPLQPAPNRQPDATVQYTTSEDQAALYRLSGDKNPLHIDPQMALLAGFKTPILHGLCTLGFSVRAVLAQFADNNPALFKAVKVRFSGPVIPGQTLRVDLWKQGTRINFRTVVVETGKEVISGAYVDLKSSQAKL

SEQ ID NO: 6418 - DNA, 3783 bp, DROSOPHILA
agcttgacctattcgacattgaaaccgattccgaaaacaataaattattttaaccaaaccgatcgtaatctttacaatgcatacttaatagacatacacacttgcatacgtactttaaacaataacatgcctttcaataaaattgaatatattttatctgcgttcaataaaagactcaagttgaccgacatccccttcctcctttacgtaggtgctcaaattccgctggaaacagagtgccaattcgttatcttcccgatcccgtttcagttcctctctgacctgccgccacatccgttcaaatccactatcgaacggcattcccaggaagcgattatgtctggaacggagttcattgccgatctgctgccacattgcctcgaattccccgtcgtagggcatccctagaaatttaccctcacatccggaggattcgaacatgaaggagtactcaaacatgtttcagtctaaaatatattataattacaaaaattacaagctttttttggagcaactaatttgtaggatttaatccttttttttttgttttaatgatatgatatcatgtatgatttgtatgatattatattaatattaatatcttatatcatagtatttttggtcccagcgtcggtcttcttcctgcagcttaggaaagcaaactgagtagaggattctcaaacgaagtgcagaccaaaaaagaggccacaaaataatgctgaatgtacataagatccattgcgacaaagaacataaagtaaacaaaaatcaagcagggcatcaaatttcctgtgattctgtatagggtttttaatggtatttttcgtatatacacaagtccaaccaaaattaaatggttcactctaagctttttatacgcttaaaaaaaatagaattttgaaagctcaagtatggtcagatcttaaacgaagatccgttagtttaacatttttttttcttcaagagaacaagttgagcgtgggtaagttttggctccaaattaatagacctccatggacttctcaaagagttgcgacaggttttcctgcgtctgcgccctgggtgctagcttagtgatcctttcctggggcagggttccctccaccaaggcgggtatatcgctgctggagaatcccagctctcggaggccattttctatgcccgcgcgttgcataaaaccgcgtacagtgtccgccaaaagacgaccggcgtctgctttttcgacacctcgcacttctgcgcccagcaactgggcagcctccaaatgccgatccggacaagctggagcagtgaactcaaagaccgccggagcactgatcaccacggataggccgtgtggaataagagcgtgatccgcggagtagccctttggcttgtaatccctcacatttccagaaataggataggaaaggccatgacacaggtgcactccggcattaccaaatcccacgccagccattgtggaagccaggtgcatctgggatcgggcttctaggttatcgggctggtaaatggcgttcacaaagtttttccttatcgtctccaatgcgaatcgtgcccacacatccgacactgggttcctgccctggtaggtgggtctcaagctgggatcactgggcgccaaaccgcgttccctgtaatccaccgccgtgaaactctccagggcatggcagaacacatcaaagccagcgaaagccatcacgcgttgcggctgggatagggtgtgcagaggatcaatcacagctagagttagatagaacgatattagaataaattatttaaagaagttcagttttttacccaaagtaggtttgaggaacttgctggaaatcccagttttggcatgcaacttcttgtaatcaaatatagctactccagtggtttcggaacctgttcccgaagtggtgggcatcgcaatcaggggcttcagttttacggatatctaaatggaattcaagtggtattaaaggtactaagtctaaaaaggagacctcacctccttgcctctgccaattgggcagtttacataatccaaaaactctgcatttgcatcactgctaaaaagattagctgccttggctgtatccatggcagatcctcctccgatggccagaaatgcatcgaactccttgccgcgcgcaaactccacggcatgccacatgctcccatccgtgggctccacccgggtttcatcatagacttcgtagttgatgccattacgagccagtgaatccaaggccactttcacggagggcaattgcacgacatttttatccgtgaccaaacaaaccttccgagctcccaagttgcgaagatcggctcccacttcggcacttactcccggtccaaatcgaacagtcgaggctgacatctgtttatcaatacatttgaccaaatttgaattagaatttgttatataccgaacaaaatttaagttaaaagtattcacaagatctaaaatataaattctattgggatgcttaagaatatagagatagtattatctggtccagggtatgaccacctgtctaaagatgagaatctactatctggaggtgctccaaagtccaaggttttgccacttacctcgaaggcgtattccatgcgacccgtttgggaggcggttggagctgctgagccatagttatgcgaatgggcggggcacttgcagctataagaccatactttatttaaatcacttgaaatcagttataaaacgcaatttttacttacgagttggccacgatcgtgttgatcaaacctaagacattcttccgcgacattctgtatataaatgaaatcagctggactggtctttcgtttgataagaacccgccgaatcgatagctggcgccaaaagacagcacttcataatcgatagctaacaatttgaaattctctgtcttgcagctttgaactacaagaagacccgaaaatgtgcgactaccagatggagtactcctttatttttgaagacagctcctgcgagggcgatgcctcgatggcatcctacgacaatggattcgagtccatgtggcatcaagtgcgcgaggagttgcaaagggagcgggagatgaatgagctctgccaggttttccagcaaaacttgagcctgagtccgccggtcatcgcggatagatggagattctgactggacctcccaaaagccaacttattgtgatatttgtaaattatagttttagcagttcgtttgccacatgagtggaacatcgtgaatgcacttttgataagtgctcggttattttatattgtaactaccagccttcagaggcgatcgtatgcatagtttcttgaagtcaatttgtccgtgtattcaaatgtttgctttcgtgaaaactcgcattgttttgtcactctaccaagtaatcaatttgtaccaatcaatcgcatatggttgtcctagatctaaaaatggcaataatttgccttcggtattgcacctaatgtattcaagaacaagtagggaagctcgaaatttctcaaatacttacccaaaaaatagatagaaatatattttcgattcgcaatcgttcaaaaacccattcgtttttaattacgggtcccacagtaagatgtgactgcgattcaattgtaatgggaacaattgttcccattacaatggagctaattacctaaatgtatgtccgcccatttttcgcgctggatttacaactcaatttgccgcgctatctggccgatctgcgaacataaactactggcaatggtaaacgatgttgacggcagtttccctcattagcatgc

SEQ ID NO: 6419 - DNA, 1395 bp, DROSOPHILA
atgtcgcggaagaatgtcttaggtttgatcaacacgatcgtggccaactcctgcaagtgccccgcccattcgcataactatggctcagcagctccaaccgcctcccaaacgggtcgcatggaatacgccttcgagatgtcagcctcgactgttcgatttggaccgggagtaagtgccgaagtgggagccgatcttcgcaacttgggagctcggaaggtttgtttggtcacggataaaaatgtcgtgcaattgccctccgtgaaagtggccttggattcactggctcgtaatggcatcaactacgaagtctatgatgaaacccgggtggagcccacggatgggagcatgtggcatgccgtggagtttgcgcgcggcaaggagttcgatgcatttctggccatcggaggaggatctgccatggatacagccaaggcagctaatctttttagcagtgatgcaaatgcagagtttttggattatgtaaactgcccaattggcagaggcaaggagatatccgtaaaactgaagcccctgattgcgatgcccaccacttcgggaacaggttccgaaaccactggagtagctatatttgattacaagaagttgcatgccaaaactgggatttccagcaagttcctcaaacctactttggctgtgattgatcctctgcacaccctatcccagccgcaacgcgtgatggctttcgctggctttgatgtgttctgccatgccctggagagtttcacggcggtggattacagggaacgcggtttggcgcccagtgatcccagcttgagacccacctaccagggcaggaacccagtgtcggatgtgtgggcacgattcgcattggagacgataaggaaaaactttgtgaacgccatttaccagcccgataacctagaagcccgatcccagatgcacctggcttccacaatggctggcgtgggatttggtaatgccggagtgcacctgtgtcatggcctttcctatcctatttctggaaatgtgagggattacaagccaaagggctactccgcggatcacgctcttattccacacggcctatccgtggtgatcagtgctccggcggtctttgagttcactgctccagcttgtccggatcggcatttggaggctgcccagttgctgggcgcagaagtgcgaggtgtcgaaaaagcagacgccggtcgtcttttggcggacactgtacgcggttttatgcaacgcgcgggcatagaaaatggcctccgagagctgggattctccagcagcgatatacccgccttggtggagggaaccctgccccaggaaaggatcactaagctagcacccagggcgcagacgcaggaaaacctgtcgcaactctttgagaagtccatggaggtctattaa

SEQ ID NO: 6420 - protein, 464 aa, DROSOPHILA
MSRKNVLGLINTIVANSCKCPAHSHNYGSAAPTASQTGRMEYAFEMSASTVRFGPGVSAEVGADLRNLGARKVCLVTDKNVVQLPSVKVALDSLARNGINYEVYDETRVEPTDGSMWHAVEFARGKEFDAFLAIGGGSAMDTAKAANLFSSDANAEFLDYVNCPIGRGKEISVKLKPLIAMPTTSGTGSETTGVAIFDYKKLHAKTGISSKFLKPTLAVIDPLHTLSQPQRVMAFAGFDVFCHALESFTAVDYRERGLAPSDPSLRPTYQGRNPVSDVWARFALETIRKNFVNAIYQPDNLEARSQMHLASTMAGVGFGNAGVHLCHGLSYPISGNVRDYKPKGYSADHALIPHGLSVVISAPAVFEFTAPACPDRHLEAAQLLGAEVRGVEKADAGRLLADTVRGFMQRAGIENGLRELGFSSSDIPALVEGTLPQERITKLAPRAQTQENLSQLFEKSMEVY

SEQ ID NO: 6421 - DNA, 3127 bp, DROSOPHILA
tggcgcacacaacacacaaatttgactggggaacgaacagcgggcgatgcaaacgattcggttccgacttggaatatatagctgccgaactatcggtgcaacaatcggatcgctcaaccggtcgctccatctgcagggaataccaaaacgcctcagttaagtggcgcgcgaatgaaggtacttgcgcttagccaccagctgggcacactgcacgagcctgcatagagttttttacgaaattatcacaatttaggagttttccaattagaattggaataagttcgtactcttaacttgctaacaagttgatttttaatgcaaaacttttcgcagacaacttttcgacaagaacagtgctgccagactgtcagaccggcaccttactggcgtgtttttatcacattttctaatatttccaagctattgaaatattccaaagctttctatctgcacattctttttatataggtgttcccagaaaatcgccttagcatggagagtcgtgctaatacggcgttgccagactgtcattgcatttcttgttgctctttgcaagagcccgccaaatgaaatttttatttgaatacaatttatttttttcttcccccgttcttttgcttgtataatatcccaactggaaaatgtgtacttttcaattacgaaacatgtacaatatatagcaataaagtccagtaaaatcgtggtatgtttacaattacttttttgggcctgatgatacgttgccattaaagtgcaatgtcataccactaatgtaagttttttaaccctttataccccccaatagcttgcccataatcctcccgtgaacaatcttgaatcccaaatgcaagaacaaagttcgaatattcaacaggagctccgcctaatgtatgatgacgcatgtattttatacagatcaaatattttcataccgttttacagggttccgaagaatagaaagtggtaattaaaaaaagtatgcattcggttcaccgaattcaatttgaatcgttttccaagtcaaatcaggttggctacaatgagcagacagaatgtgggcggcgacaccagatagtgtcgccgaatgcatggaaagcgattcaatgcaacggccttccatcgaagaagtgtcccagctgctgggtgttactttttctgtttcttcttctcgagctcctcctccttctccttctcgatgatcttaacataatcggtaatgacatcggtgtccagcattttcagtggcttgccgttctccatgatggccacctccagattgttctggcctgactgcgccacctcgagcagcgcacggatggccagtttgacggctccgtgctcgttggccacctcctcctcgcggtaggacttctcgaagaactcgcgcacaacctttgccgatcgcccggtggcgttagccttatactcgtagaaaatgcccgacggctcagtctggaacagatgcgcagagccatcggcatcgaagccgccaataaggcaggaaataccgaagggacggcggccattgctctgcgtgtatttttgtttcagctgggcaatgaatctaaaatgaaaggccaaaaccatatagaagctaatttagagcgcaactatttcacaaatcctcacctggttatgtactcgagggtcacgggatcctcgacattgagacgatggctctggcactccacctgggcacgattgatcatgatgcgagcgtcggccgtgagaccggcaaaagccattacaacgtggttgtcgagcatgcaaatcttgcgcacctttcgatcctcctgcagttgggccaccgacttcttctccacgccaagcacaacgcagttggcgccgcgaactccgacctgcgaggcgaaaaattggaaaagtccatgtttgtttcggtttggcggcactgcgaacggtactaaattgcacttaccgcagtcgatcccttgcgaacggcctcctgggcatactccacctgcaggaggtgaccgtcgggagagaatatggttacagcacgatcgtagcgtgaggacatcttgttgctttattcaatagctgaggtacttgcagaatattaacttatagctttttccttctcgaattcgccaggcaatgatgatgcttttttgaggaaatgccgcagtgtgaccgcagcatgggttcgatgaaaattactaaattaataccgtttcgcagtgaacgatatatcgttgctgaaatcatgtatcagaatcaattcaattcttgttacttcagtctatttaatattctattccatttagtctatttaaatatttaatttaatacttttgtaaaccgttttacagcttcagggctgtaaataatttagtaaaatatcaattaattttttttcacattatctgttattattgttatttaataatacaaatttataatacaaattattttcaatatatatatatatatatgtattaataattataaccaacgactgttacttaaatgtacaaaatgcaatcgctatgccggccctggtaatcggtgttcatcgacagcttgctgcagccctcgtcgtcgctgtaattacaatgtgatgtgcatttgtttttgttaataagaattgtccgattaaacatttagattatctgtttttaaacaatgcgatcacggtgatatcggttcgtaaaggttttacacaccgtgtgattttgtttcagtgcgttttgttgttcgtttcgtaaataagtgggcttcattttgcccaaaaaagacgggagcccagacagctgatcacagactttggctcacacctgctacaaaaagataatatttattcgaaaacctggcattcggatcgaatttagcagctgccagcgtatttatataagaacaatttgattgattatggcgctgcccagaaaactgatatccaagatctgtaagtaaaccgaatgttcgaaagtaccgttgtatattcccacacacacacaagcacgtagaaatacgactgcatgtatatatgtgtgtgtgcgtgcgtgtttgaaatcctatcgtaaattctagtgttgcatgcaacttcagtaacttttaaaacaataccacgcgttcttataaacaatgcagatatccaataggaaaatcc

SEQ ID NO: 6422 - DNA, 985 bp, DROSOPHILA
aagcatcatcattgcctggcgaattcgagaaggaaaaagctataagttaatattctgcaagtacctcagctattgaataaagcaacaagatgtcctcacgctacgatcgtgctgtaaccatattctctcccgacggtcacctcctgcaggtggagtatgcccaggaggccgttcgcaagggatcgactgcggtcggagttcgcggcgccaactgcgttgtgcttggcgtggagaagaagtcggtggcccaactgcaggaggatcgaaaggtgcgcaagatttgcatgctcgacaaccacgttgtaatggcttttgccggtctcacggccgacgctcgcatcatgatcaatcgtgcccaggtggagtgccagagccatcgtctcaatgtcgaggatcccgtgaccctcgagtacataaccagattcattgcccagctgaaacaaaaatacacgcagagcaatggccgccgtcccttcggtatttcctgccttattggcggcttcgatgccgatggctctgcgcatctgttccagactgagccgtcgggcattttctacgagtataaggctaacgccaccgggcgatcggcaaaggttgtgcgcgagttcttcgagaagtcctaccgcgaggaggaggtggccaacgagcacggagccgtcaaactggccatccgtgcgctgctcgaggtggcgcagtcaggccagaacaatctggaggtggccatcatggagaacggcaagccactgaaaatgctggacaccgatgtcattaccgattatgttaagatcatcgagaaggagaaggaggaggagctcgagaagaagaaacagaaaaagtaacacccagcagctgggacacttcttcgatggaaggccgttgcattgaatcgctttccatgcattcggcgacactatctggtgtcgccgcccacattctgtctgctcattgtagccaacctgatttgacttggaaaacgattcaaatt

SEQ ID NO: 6423 - protein, 249 aa, DROSOPHILA
MSSRYDRAVTIFSPDGHLLQVEYAQEAVRKGSTAVGVRGANCVVLGVEKKSVAQLQEDRKVRKICMLDNHVVMAFAGLTADARIMINRAQVECQSHRLNVEDPVTLEYITRFIAQLKQKYTQSNGRRPFGISCLIGGFDADGSAHLFQTEPSGIFYEYKANATGRSAKVVREFFEKSYREEEVANEHGAVKLAIRALLEVAQSGQNNLEVAIMENGKPLKMLDTDVITDYVKIIEKEKEEELEKKKQKK

SEQ ID NO: 6424 - DNA, 3499 bp, DROSOPHILA
gaaattgcagcgaaacccgggatttacggatgccaaagctgactaattcgtagaggcgccttcaattcgcactgctcagctcgtaattcgtgaaatttgtaaacaacacgcgcacttttaactaaattcaacatcccattgatgattacggagcaagtatagcggcgaatgggcgtgaaacttgaggacgcacgcaaacggaatggggtattacctcattcgtacacagtcactttcacggttttcggctttatctatcactgcactatcgctattttgactgtttttgccgcacactaagccatttgaagcgtattttaccccgaaaatgcttggaaatttctctcgcgcaaacgcttcgtgttgccactgagctgcaattgcaccctgtttggcgatctggcagcgccggcgaaaaatggccgtttaggtcatctgtgccagaagagagcagcactatttgccttcgccaagggcaaaaacagaaacaacacacacttatgcaaacacacacgcagagggggaaataataagttaagtcggctgctgcttagttactttgctttacagctggttttcggcaggtgcagcctcagcaaacgttcttttccgcacttccgctgtccgattgcgcactttctaactgtttgcacggcgcttttcctctcatgatttttccaccagcattgtgtggccgttcaacaaaactccaaaaataccaaggatgggtgattttatacaccagcaatccggtcctcctatacccttccctttataacatatagaactattaggttttcttaacagctgtagaaaatcgatatcaattcactactttccagaacacgacaactttattgttctaaaatgtaagtgtaggaaaataatgaatatgttatatttaatatgctgtattccgagtccgagtgtgaccagttaatcatttttagaaaagcatgcttttgcttgccttgaaataaattcagaaagcgaggcgtcggccacactgtaaatcgtttctgcttgtcattttggcctgagttttttgccgcaaattgcaggtaatttagcgaaaaacaggagtcgcaggaagccaaacccgtcgaaaacaaatcagtccggtacctatcaatcggcgcagaggtcatagtaagcccccgaaccgaaaacccagaaaaagcacaaacatgccgtcgcaggaggtgagcgtaaacaaagtgatagtgcatccattggttctgctgtccgtggtggatcacttcaaccggatgggaaagattggcaaccagaagcgcgtagtgggagtccttctgggctgctggcgatccaagggagtgctcgatgtgtccaacagcttcgcaggttagtactgcctttgaatatccaaagtcgtggccataaaacaaaagaattccctcccgacttccagtgcccttcgacgaggatgacaaggacaagtcggtgtggttcctggaccacgactacctggagaatatgtacggcatgttcaaaaaggtgaacgccagggaacgggttgtgggatggtatcacacaggtcccaagctccaccaaaacgacatagccatcaacgagctggtccggcgctattgtcccaactccgtgctggtcatcatcgacgccaagcccaaggatttgggcctgcccacagaggcgtacatatcggtggaggaagtccatgacgacggctctccgaccagcaaaactttcgagcatgtgcccagcgagattggcgccgaggaggcggaggaggtgggcgtggagcatctgctgcgtgacatcaaggacacaaccgtgggcagcctgtcgcaaaagatcaccaaccagctcatgggtctgaaaggcctgaatgcccagctgcgggacataaagcagtatctgcagcgcgtcggcgacagcaagatgccaatcaaccaccagattgtctaccagctgcaggacatcttcaacctgctgcccgatataaccaatgaccagttcacgggcacaatgtatgtgaagaccaacgaccaaatgctagtcgtctacctggcctccatggtgcgctcgatcattgccctgcacaacctgatcaacaacaagctggccaaccgcgacgccgaggagggcaagagcgacagcaaggaggccaaggagaagaataaggatagcaaggataaggacaacaaggagaccaaggacaaggacggcaagaaggcggaggagaaggccgacaagggcaaggacgaaggcggcaagggttcgcgcaaataggagcggaagaaaaagcgcaaaccccgtcgcaaacgaaagaagcagcgggcgcaggactagctgctgcttcttctgttctccaggaagtggaactcatctgcagaccatacggcgagggtgtgcagtggcctcagaaatcaagcattgctaccattcatcgttcattttccacacgaaattaagctccctcttattatttcgcgtaactaactaatggcaagtttatgtaattaaaaattaaataatttaaatactcctattgtttgctttcctctaatattgctagaagcagcatacctagtattaaaaccgctcaggcttgtgtttttgtatttcgtaaaaccgaaattatattttaaaacaaactaaactcgctggagaggcaacgtaaatggctgacttacgattgcctttccccgagcacaaaaacggttgagtaatgcattgtacagggcgttctctatcttagagcagttattacttagaaagcattttaccaaatttcacttgacttacagctgagctagttaacgcttacgaactaaggctaagggttccattgctaacaccatcgatgacccaacaactagaatacttaggttcactatgtgcttgcaaagcaatcagaaactagatcaaacattgagttcctggcacctcctttccgaattgtagcactatgcacgggagtcctgcaaaatggctgatttgcaggactccggtgtagactggaggctcacttagaccagccactcgctggccagcgggaacttaagcggctggcagctgctgagtcgcagcgagcagttattgtcctcggcagcaagtgggatcctggtggtcgccatgggattgctctgcaccgagcagaggcttaaactatggctgtgcgactgcctaagactagagctaatgatatcgctgctgatccgatgctgatgctgatggtgatgatgatgatgatgctgttgctgttgctgttggtggttccggctccgatactgatcttccgacgggcaggaatggttgcagttgagattagttgagtagcagctccttccctcggcccctgaggttgttggtgacaagctgttgctgttgctgctgcagttgaggttgtagatcttgatgctcgtgcagctggtgcggatgttgacgtgaacctgggcgtggtcatgtcacaccgaggtgccctgttggccgggcaccaccgatccgcagttgtcct

SEQ ID NO: 6425 - DNA, 1432 bp, DROSOPHILA
gccacactgtaaatcgtttctgcttgtcattttggcctgagttttttgccgcaaattgcaggtaatttagcgaaaaacaggagtcgcaggaagccaaacccgtcgaaaacaaatcagtccggtacctatcaatcggcgcagaggtcatagtaagcccccgaaccgaaaacccagaaaaagcacaaacatgccgtcgcaggaggtgagcgtaaacaaagtgatagtgcatccattggttctgctgtccgtggtggatcacttcaaccggatgggaaagattggcaaccagaagcgcgtagtgggagtccttctgggctgctggcgatccaagggagtgctcgatgtgtccaacagcttcgcagtgcccttcgacgaggatgacaaggacaagtcggtgtggttcctggaccacgactacctggagaatatgtacggcatgttcaaaaaggtgaacgccagggaacgggttgtgggatggtatcacacaggtcccaagctccaccaaaacgacatagccatcaacgagctggtccggcgctattgtcccaactccgtgctggtcatcatcgacgccaagcccaaggatttgggcctgcccacagaggcgtacatatcggtggaggaagtccatgacgacggctctccgaccagcaaaactttcgagcatgtgcccagcgagattggcgccgaggaggcggaggaggtgggcgtggagcatctgctgcgtgacatcaaggacacaaccgtgggcagcctgtcgcaaaagatcaccaaccagctcatgggtctgaaaggcctgaatgcccagctgcgggacataaagcagtatctgcagcgcgtcggcgacagcaagatgccaatcaaccaccagattgtctaccagctgcaggacatcttcaacctgctgcccgatataaccaatgaccagttcacgggcacaatgtatgtgaagaccaacgaccaaatgctagtcgtctacctggcctccatggtgcgctcgatcattgccctgcacaacctgatcaacaacaagctggccaaccgcgacgccgaggagggcaagagcgacagcaaggaggccaaggagaagaataaggatagcaaggataaggacaacaaggagaccaaggacaaggacggcaagaaggcggaggagaaggccgacaagggcaaggacgaaggcggcaagggttcgcgcaaataggagcggaagaaaaagcgcaaaccccgtcgcaaacgaaagaagcagcgggcgcaggactagctgctgcttcttctgttctccaggaagtggaactcatctgcagaccatacggcgagggtgtgcagtggcctcagaaatcaagcattgctaccattcatcgttcattttccacacgaaattaagctccctcttattatttcgcgtaactaactaatggcaagtttatgt

SEQ ID NO: 6426 - protein, 338 aa, DROSOPHILA
MPSQEVSVNKVIVHPLVLLSVVDHFNRMGKIGNQKRVVGVLLGCWRSKGVLDVSNSFAVPFDEDDKDKSVWFLDHDYLENMYGMFKKVNARERVVGWYHTGPKLHQNDIAINELVRRYCPNSVLVIIDAKPKDLGLPTEAYISVEEVHDDGSPTSKTFEHVPSEIGAEEAEEVGVEHLLRDIKDTTVGSLSQKITNQLMGLKGLNAQLRDIKQYLQRVGDSKMPINHQIVYQLQDIFNLLPDITNDQFTGTMYVKTNDQMLVVYLASMVRSIIALHNLINNKLANRDAEEGKSDSKEAKEKNKDSKDKDNKETKDKDGKKAEEKADKGKDEGGKGSRK

SEQ ID NO: 6427 - DNA, 2672 bp, DROSOPHILA
cataagtcaagaagcatgatgaaggggacagagtttattatttagacagaatccaagaagacgttaagcaaaaacgagaagactaacaaatgaagagtgtttgatttcctaggccgaggctgacagcaggatcgccacgtgattaaatagttattcttcaaacatttatttgatacgaacgcgtcgtcgcttaacagatagagacgggatttttttcgattcaaaattgtacccacgataattttgctgatgttgccgatgtgtgtgaaccatcaaccatttcatatttaaattgtttgtatattagcggaataaacgaaccaaatctcgatatctaatggaaagccagcctacccttttcaaaattcttttttgaaaggttcacagactcgtaactaagaaaatttagaatgctcagcttgcaaatttactttgatttagattagctctttgtatcacatggtttacatggttgatttatatcctattaagcacatttataatttttgtttaagtaaaacttttcactagctgacttttgtcgttttgagtgttgtatgtagtggatcacaagagccgaaccaacggtattttgtactttcgatttctatttttaaataattggcttcataacaaaatgattgtataaaataagtgatttttgctctcaattttttaagttctatatttatgtgtaaaacaggcagaactcgttaaaaagtttgaataaaagcgaacgtctaaacacaactttttgatttccggctttcacattacatcactacgcacggacaagttactccaagcggaaactttcacccctccatttctcttctctgatcattgtaaataatttgttaacacaccacaccactcacatgatagtcaacctgtcctttcgacagacacaagtaaatgtatgattatgctcacacaccacagcatcgagtgtgccacccacgccatgatctataacctaattctagaataaaaacatgtgttgcttgattcaaaattaatgcatttctcttttcgcacacgggcagggccctacaaccaatcctaaatctatttgacggcgctctggatgtgtggctgcttgtgggtgccgtcacagaagggtctgtgggtggtctgtttgcagttgcagagccagtagtctcccgacttctccaccttgaaccgaatgggcctggaaagcacaggggtattacttcgtcgcatagctctggctcgagcacctatgtacatacctctgcttgatcttcaggaactcgttcttgtgcattccatcgcagaggggctgagacttggacttgccgcacaggcaccagctgtatgttttatctgttggaatcgcgagttgtggttatgtaaatacttgttctctgcgcaccgatacgatgcgatttctcaataatacctttgtccaggtggatcttgaaggggcgcttgtcgaagatcgtaccgttctccttttgcagaacggccgtttgcttatcctcgagcaggttactgggaattgttttggccgagtccaccggttttgcgctggaactgtagcatgcctgcatgggagtaatgccttgaaatcagggggtgatctatcttggctatgggggatgcctaccttgagcaaccaggatgcccccaggttccgtcttagtatcattgacattctaacgctaatttatttttgttctctttatttaagctgatgattgcagtgtcgaaagtatcgatatgttgtcatcggtggtgatggtgttgcaaggtcgtaccactacttttaccaagctcaaatgggctcattgagagtatggatagatactgctttaatttacatctaaaagttcacaaatatatgtctcttctggtagcgagaaagaaaaaatgttgcagattttcaaactgggcagtgctgccagaccgccccagctgaatgcacagtggtgcaaaacgttcgggctgaatgttaatgttatcggcagtcactcctatcgatgctctatctgccgttatcgctgcccaaggtcgccaatttaaaatttgatttcagaattccggaatctgttcagctgataagcagagatatgattccgatgcgcctggaaatgtctctcctcgtttggaggtattttagcgtctatcgcagacattcatcttaatgaaagctcgttatgtgccccatacttgactagggaattctgagttccgaccgacgggtgcacacgccgaattctcgcagataacacgatttatcaagcggccccgttagacaaactgattagcccgacagcccagagatcttctacgtaatatactttattttacaatacaaatactacatatgcggggtgtcttacgaacctcttccagtaaaatattaaggggaattaatgcacgggtttactcgaaacctttttaactttgagttaacaactaaaacaaaacacccctcttggaatgccacagtcgttttgtttgcattcctagccaatccaataacggcgaaaccgatatttctgggacacccctgagcccgtctagaactcgtcgttgaacgggtagtacttatggcccgacattcccgaaaagggtaccgtgcgctgcccggtgtgatactgctccatgccggcgacgtcgtctggactcagctcgaagtcgaagac

SEQ ID NO: 6428 - DNA, 473 bp, DROSOPHILA
atgatactaagacggaacctgggggcatcctggttgctcaaggcatgctacagttccagcgcaaaaccggtggactcggccaaaacaattcccagtaacctgctcgaggataagcaaacggccgttctgcaaaaggagaacggtacgatcttcgacaagcgccccttcaagatccacctggacaaagataaaacatacagctggtgcctgtgcggcaagtccaagtctcagcccctctgcgatggaatgcacaagaacgagttcctgaagatcaagcagaggcccattcggttcaaggtggagaagtcgggagactactggctctgcaactgcaaacagaccacccacagacccttctgtgacggcacccacaagcagccacacatccagagcgccgtcaaatagatttaggattggttgtagggccctgcccgtgtgcgaaaagagaaatgcattaattttgaatcaagcaa

SEQ ID NO: 6429 - protein, 134 aa, DROSOPHILA
MILRRNLGASWLLKACYSSSAKPVDSAKTIPSNLLEDKQTAVLQKENGTIFDKRPFKIHLDKDKTYSWCLCGKSKSQPLCDGMHKNEFLKIKQRPIRFKVEKSGDYWLCNCKQTTHRPFCDGTHKQPHIQSAVK

SEQ ID NO: 6430 - DNA, 5340 bp, DROSOPHILA
cgagttggtatggataattgcgtaaaagcatatatagtaaatattctaactttaaagttcaccacttctcacttgaaaattagacggtcgacttcatcaaagagatttaaaaaaataaaatatcttgattcgcgtggagcggatttccagttgtgtttacccgacgaagagccggagcaatatgattttgaaactcgtgatgctgccagttgatcactcgattttactgcggtgattgggcgctttttagcgtcgaactgaacttttgcttatttatttgctaattattattattgcgagcgtggcgtgcacactcgactcggattgccaagtgggcaagtcactaattccgcgtaattgcgaatcgccagcggcactgagaatagcggatcggtgcgatggggtgcacggtcatctggactccagatgggcagcacacgttcccagtggttggggtaggcggagcagacaggctgattactctgctgttagacagagtgtctgtggcgcggagcgatacctgcgcactggagcaccctgggcagtgtacaccattggattggacccgacctccaacggcggcggatcatcgctgggtgtgcgttgctgaactattttgccgcaagccgggcttacataactgaaacccgacatcgaatttcctagccaagccgcaaactacgtcattggctccacaatcgctgcagtaataggtgggcgcgatatttaaatggattcgcagcgctgggctatcgcatcgtgcgttgattaccgaattcaataagtacagaaggtttgaaatgaatctagtccccgcataaatgctatcctcgcaagtaacactttgaaatcaaatttgaaatgtgcgcgcaatttggtgttggcgtcatacaagtttgactgtactgcactttcaaattcagtatttttcactgttcagtattttttcatggcatttagtgggtcaccctaggttgccattcgcacaaatgcgttggcaaaacaaatagttgtctgtttttaatttttagatcttaggaaacacaatcaagcaactaaattacttaggaaatgcgcttgacaacgctgtggcagaaccgctcgcctggcgaccgccatctgagtacatacttttgctttgcggcggtgcgtctgctgctcgtctttgtgccccaactgggctacgtgcatccggatgagttcttccagagcgtggaggtaatgactggtgaggattggctactgcagtgtccttcggcaaatgtaactagtcctccacttcacaggcgatcactttcggctggagcatacgcgcacctgggagttcaacaactccctgccggtgaggtcaatcgttctgcccttcgctctgctccggattccctggagcttctacgagttcgttgccgagtgcctgaaggcctggtggcaactggagctgctgggcacctacgcgtacgtggtgttcccccggctgatttacactctgatctcctttagcaacgactactgcttgttccgcatttgccggttgtacggactccgattcgagatacgcctcttggcaatgggcagctcctggattcttctcgtcttcggcacgcgcaccttctccaacagcctggaaatggccatgtgctcctggctgctctgcttggtatcggaatgcatgttgcgcacgaacacggtggtgtacaaaaaggagtttctggaagagaagtacgacaaggcggagtccatcagcgaaagggtgcgcatttggaagctgaagaactccctgcccgcgcacaatctgcagcacctaatggccatgtcaaccatttgcgtagctggcgtgttcaatagacctacattcctgctctttggagcaccgatggtcttcttttggctgctgcgaggcatgggaaccagaagcatcaccttcagggactttaatctgcgcattgctctcttctgcttgtgcgccttgcctgctctagtactgtttatattctgcgactcactgtactaccagcacttgaccctcggagaactgcacatgatgcacttgagcatcgacaactttgtcttcacgccctggaacttcataaaagccaacctggattcggcacagacggccagccatggagtccacccatgctatgtccacctgatggtcaacatgccaatgctgttcaacgtccttgccttggcttcgctgggagccttcgcacagttgctgctcagattcttccgggcggaatatcaggtgctgccgcgtttccaaagcatcgtgtcattgatgtcgggggccatatttgtgcccctcttctttctttccctgatcaatcaccaggagccgcgctttctcctgccagtcacatttcccctcattctgcttcatgcgcccaaactaatcacaggatttagtgccaagtatcccttccaaaaggaccacccactcttgcgcttgttctacgacaaactgctttcgagcaaagcttctggtccctatttgctgaagatctggtacgtaagcaatgtggcgctgaccctgttctttggcttcatccaccaggcgggcgtttatcccttggcggcggacatttcacatgtgattgccactaagccggcagcaacgcacgttcatcttataacatcgcacatatacagcctgcccttgcacctgatcaacatacccagttcgagggtactgcactttaaccgcctgactcaccagcgatatcgtcgtccaagagacttttatatgtacgagtacggaggcctacccttggattccctgctgcagaaggtaaaactcatcagtgggagctgcgaggtgaagaagtcgggaccaagtcggcggcgctacaaactgtatttggccattccggcgtcactaagtgcagatcttcacgaggctttagtacactcgaatgcctccagctaccttaacttcgaactgctaaaggtgttctatccacacctctccacggaggcgttccctcaccttcagggcaggcatccgtgcgatgtggatgctcctcattgggcgcacgatgatctgcggggcacttgctccgcggagcagctgccagcgtttagcttcgcctacctgaacaagcaattcagctccttcgtccatcaactaggactggcgctctacgagatcgatgtgacgcgcaacaagccgcggtctgtagtaataaagaaggcctccatgacggaaaccgcggcgtagtcttcacttcttggccagtccaagtgccttataccaaagttctaggttaagattaactatttattgtaacttaagtctcgtgaatcacaactttcgcgatacaaaatactcttgttaagcttgacttctgtaaacattcccaatatgtgcacagcaaacttgaaattttgaatatggctagtcattaccaaatattcccttgatcttaagattcattccatacaaactaacatataaggacaataatacagagtgaccacagataaatagagcagccaagacttaaatcctatataaaaggtgagtttggtcttcgccagaaaaccacttaacatgttccatctaacaatcagtagccagaatcgtaattctgtccatttcagttgtcgaacgctggaaaaaagtaatccatttgacacgccgttggcacttaattcccaacaaacatctgaggcgtggggcgcggcatccgcgttcattgaacgttacccggcagagatctcgttgcggacgcaattgtgttctgatttagattttgtgtttgggccgcctaagccgtaaacccgttttggcaatgaggcgacaattggcctataaaatgctggaccattttggccaacagcatcagtcaccgacgaaccaaccaaaccaatctacaaaatcaacatgaaggtatgtgtcacttgcctattcgggatgttcacccactaaaggatacttcttgctcttcatccagttccttatctgcttggccctctgcatcgccgccgcccaggctggcttcatcgcctctccggtgaccacttatgccgctgctccagcatatgccgcctcctacgctgctcccgtggcttacagcgccccagtggccacctatgccgctgctgcaccagcctactccacctacgccgccgccgctcctgcctactcgacctacgccgccgccgcccctgcctactccacatacgctgccgccgctcccgcttacaccgcctcggtgtacagtgctccggcctacaccgctcctgtgactacctatgctgctggtgccgcatacgccgctcccgtcaccacctactctgctccggccatcgtcagccccatcctgaagaagaagtaatcgcgtactatcattgagccatcccaaacgatccgataaactaaataaaacgccaatctaagcgaaattctattcgtctaaggtcatctaagaaactaggtgcaaggtggagaactttcaggagtaaacttcatttggaacgaccgacgacgggtcaattgactcgatggcatcacttaaatttgctacagatagtttctttattaacgcttgttaaatgccttaaacatattgaaacgccactatagctacaatttacttaagatctagggagtgctacaagcgaaatacaaaacaaatcgcatattcgagatgtgggacacgcgatctcagatggactcattggagattgtggctcagatacatgggactcttcggcgcgtcgacctcctcgaagtcaaagtcctcggtttcgtcctcgttccagcgcaccgtgcgatcactactgaatattgtcggttcggtggagttgcggggagaaaaagcaagttcagaatatatagactttgtcgctgtgaacacaataagaatttgtgtgtgatttggttggtactctgtccctggcatgtgctcaagattcgatcaaattaatcaaaaaaccaaaagtcaaatcaaaaaacaaactcattggcaacagaatacggttaataacgttggtagaacctgttcaagccggccgctggcggaggagggggtggaggtgcgcccctgggcggagtgcgtcgcgcgctgaaagatagtcaatagtggttgttattgaaggagttatcattaccccattgttcgaggtgccacaaaaatctctgaccatttcctatagaaattttttctgacgaatcactttggtcatggtgccacatatatttcattcatagattggtgaaactccgaatgtatctcctctaggctatagagatttctgcaacactcatatcttcccagaaacttacgccgccacgtccgcatccaaatggcctccagcaccgtatgcatcgctgtc

SEQ ID NO: 6431 - DNA, 2564 bp, DROSOPHILA
aaacaaatagttgtctgtttttaatttttagatcttaggaaacacaatcaagcaactaaattacttaggaaatgcgcttgacaacgctgtggcagaaccgctcgcctggcgaccgccatctgagtacatacttttgctttgcggcggtgcgtctgctgctcgtctttgtgccccaactgggctacgtgcatccggatgagttcttccagagcgtggaggtaatgactggcgatcactttcggctggagcatacgcgcacctgggagttcaacaactccctgccggtgaggtcaatcgttctgcccttcgctctgctccggattccctggagcttctacgagttcgttgccgagtgcctgaaggcctggtggcaactggagctgctgggcacctacgcgtacgtggtgttcccccggctgatttacactctgatctcctttagcaacgactactgcttgttccgcatttgccggttgtacggactccgattcgagatacgcctcttggcaatgggcagctcctggattcttctcgtcttcggcacgcgcaccttctccaacagcctggaaatggccatgtgctcctggctgctctgcttggtatcggaatgcatgttgcgcacgaacacggtggtgtacaaaaaggagtttctggaagagaagtacgacaaggcggagtccatcagcgaaagggtgcgcatttggaagctgaagaactccctgcccgcgcacaatctgcagcacctaatggccatgtcaaccatttgcgtagctggcgtgttcaatagacctacattcctgctctttggagcaccgatggtcttcttttggctgctgcgaggcatgggaaccagaagcatcaccttcagggactttaatctgcgcattgctctcttctgcttgtgcgccttgcctgctctagtactgtttatattctgcgactcactgtactaccagcacttgaccctcggagaactgcacatgatgcacttgagcatcgacaactttgtcttcacgccctggaacttcataaaagccaacctggattcggcacagacggccagccatggagtccacccatgctatgtccacctgatggtcaacatgccaatgctgttcaacgtccttgccttggcttcgctgggagccttcgcacagttgctgctcagattcttccgggcggaatatcaggtgctgccgcgtttccaaagcatcgtgtcattgatgtcgggggccatatttgtgcccctcttctttctttccctgatcaatcaccaggagccgcgctttctcctgccagtcacatttcccctcattctgcttcatgcgcccaaactaatcacaggatttagtgccaagtatcccttccaaaaggaccacccactcttgcgcttgttctacgacaaactgctttcgagcaaagcttctggtccctatttgctgaagatctggtacgtaagcaatgtggcgctgaccctgttctttggcttcatccaccaggcgggcgtttatcccttggcggcggacatttcacatgtgattgccactaagccggcagcaacgcacgttcatcttataacatcgcacatatacagcctgcccttgcacctgatcaacatacccagttcgagggtactgcactttaaccgcctgactcaccagcgatatcgtcgtccaagagacttttatatgtacgagtacggaggcctacccttggattccctgctgcagaaggtaaaactcatcagtgggagctgcgaggtgaagaagtcgggaccaagtcggcggcgctacaaactgtatttggccattccggcgtcactaagtgcagatcttcacgaggctttagtacactcgaatgcctccagctaccttaacttcgaactgctaaaggtgttctatccacacctctccacggaggcgttccctcaccttcagggcaggcatccgtgcgatgtggatgctcctcattgggcgcacgatgatctgcggggcacttgctccgcggagcagctgccagcgtttagcttcgcctacctgaacaagcaattcagctccttcgtccatcaactaggactggcgctctacgagatcgatgtgacgcgcaacaagccgcggtatgtgtcacttgcctattcgggatgttcacccactaaaggatacttcttgctcttcatccagttccttatctgcttggccctctgcatcgccgccgcccaggctggcttcatcgcctctccggtgaccacttatgccgctgctccagcatatgccgcctcctacgctgctcccgtggcttacagcgccccagtggccacctatgccgctgctgcaccagcctactccacctacgccgccgccgctcctgcctactcgacctacgccgccgccgcccctgcctactccacatacgctgccgccgctcccgcttacaccgcctcggtgtacagtgctccggcctacaccgctcctgtgactacctatgctgctggtgccgcatacgccgctcccgtcaccacctactctgctccggccatcgtcagccccatcctgaagaagaagtaa

SEQ ID NO: 6432 - protein, 830 aa, DROSOPHILA
MRLTTLWQNRSPGDRHLSTYFCFAAVRLLLVFVPQLGYVHPDEFFQSVEVMTGDHFRLEHTRTWEFNNSLPVRSIVLPFALLRIPWSFYEFVAECLKAWWQLELLGTYAYVVFPRLIYTLISFSNDYCLFRICRLYGLRFEIRLLAMGSSWILLVFGTRTFSNSLEMAMCSWLLCLVSECMLRTNTVVYKKEFLEEKYDKAESISERVRIWKLKNSLPAHNLQHLMAMSTICVAGVFNRPTFLLFGAPMVFFWLLRGMGTRSITFRDFNLRIALFCLCALPALVLFIFCDSLYYQHLTLGELHMMHLSIDNFVFTPWNFIKANLDSAQTASHGVHPCYVHLMVNMPMLFNVLALASLGAFAQLLLRFFRAEYQVLPRFQSIVSLMSGAIFVPLFFLSLINHQEPRFLLPVTFPLILLHAPKLITGFSAKYPFQKDHPLLRLFYDKLLSSKASGPYLLKIWYVSNVALTLFFGFIHQAGVYPLAADISHVIATKPAATHVHLITSHIYSLPLHLINIPSSRVLHFNRLTHQRYRRPRDFYMYEYGGLPLDSLLQKVKLISGSCEVKKSGPSRRRYKLYLAIPASLSADLHEALVHSNASSYLNFELLKVFYPHLSTEAFPHLQGRHPCDVDAPHWAHDDLRGTCSAEQLPAFSFAYLNKQFSSFVHQLGLALYEIDVTRNKPRYVSLAYSGCSPTKGYFLLFIQFLICLALCIAAAQAGFIASPVTTYAAAPAYAASYAAPVAYSAPVATYAAAAPAYSTYAAAAPAYSTYAAAAPAYSTYAAAAPAYTASVYSAPAYTAPVTTYAAGAAYAAPVTTYSAPAIVSPILKKK

SEQ ID NO: 6433 - DNA, 5137 bp, DROSOPHILA
tctacaacatggccaaaggcacctgcctccgggcagctgctcccacgacgggcgccctcatcagtctggatctgtgctccaagtccaacggagcgggcggctcctgggacattgtgcagctgaagaagccaacggaggcggagggcagggccaaggaggcgaggaactcggacaaggcgctgtgagcgattcgctcggatcgaataattccgattgcaatattagactgataactgtttagggcaaagtgtattatgtttaaatagccagtattttttcatcaaactttttttttttaataaatatgatcaaaatgttgatggtgcagtttgattaatggccaatggtggtggccttggaaacaggttttctttcaaataatttgcaaattaatgtgtacgaatatgttatgtctgcatatttaatgattttgtgatgacttatcaaaatttaacttaattgtgaaaataaatgtatgtatgtacctacaatttaccttataaatatgcttcgtattcgtaatacgaatatcttatatctgcatatttaatgattttgtaatgacttatcaaagttcaactttgaataatggaaatttttggacctttaccactacaattttacttatgaatatatttagatagttaaattcttgcaatataacaccttttttccatttgctgcaatttcaaaacacaattttcaataccgactatctggtggtaatagaaaaaccacgtttttttttatgtatatgtgttatgtatatatttataaagaataaaaactttgttaactataaaataaacctaagctcgaaattgtaccgataaaaaaaaaattaattttagtatattatagactacctattaatttgtacttaagcaaccctttttttttaagtgtatgatttggtttttgcacatttggtatctctttacaagaaaatggtatattggctggcatcgaatacggtcacactttgtttatgctgaaacaggcgcgaaattgtgtgattattttaaccattttaaaagcggaaaaatgcaggccaaagcaaccgacagcaggcaggaacctaccctgaatatgggtaagctgataagcagtaataataactgattagttactataattaaacgctgtttgcagacacaaatgcgcgtcgcaatttcatcaaattccatgcgaaactcggcgaggtaagtaaatgctaaatgcaataaatccggtttaactgcattctacgccgtattttgcagaaacccgcaactacagtgaggttctttgatcacaccgatcgctatacggtccacggcagcgatgactgcgaacttgtggccaaaatcgtatacaaatccacggccttcattggcgcactgctgccggatgacaaaaaggagactcttcagtttgtgtccatgtccaagggcaacttcgagctggctgtgcgcgagctgctcttggtgcgcaattaccgggttgaggtgtacgttaagaattccagcgattgggaaatcgagtaccgcggatcacccggcaatctgctgcaattcgaggacatcctgttctccaataaggaggttttggtcgggaacagcatcatctcgctgctggttaagctcgatggcggtggccagcggcgtgtgggtgtggccagcgtcgagcagaacgactgcaagttccagctgcttgaattcctagacgatgacttcttcaccgaactggaggccaccgtggtcctgctcggaccaaaggagtgcctgctgccaagcatcgagggcgaatatagtgctgtgaagacgctgctcgacagaaatggtgtcatgattacgatgcccaagaagagcggcgacaacgatctgctgcaggatctaaatcgtcttttgcgtttcgccaagggacaacaggaggatgccacgggcttgaaggaactccagcttcagctggcctccaacgcactgaagaccgccatcaagtacctggacctggtcaatgacgccggaaatctgggacactacgagatcaagcaactggacctaaaccggtaagatcttaccgtattccttacttccattgaaaagcgaactaattccttatattgccatgcagctttgtccacttagattctgctgccgtggctgcgttaaacatcatgccaaagccaggcacacatccatctatgccctcgtatcgctggcaaagcgtcttgggcgtgctggatcattgccgtacaccacagggacatcgcctgatgggtcagtgggttaagcagccactgcgaagccgaaatatcctcaatgatcgtcataacattgtccagtgcctactcgaatctccagacacaatggagactttgagtctcgattatctgaagcgtattccggatattcttatgctaactaagaagctaatgcgacgcaaagctaatttgcaagatttattccgcatttaccaggtcattctgaggaccccgaaaattcttaaagttctgcatgagctcgataattcaacgatcgaaagtgtgatctgtgcgccttttaaaagcttcctaaaggatctgacagggctcaagcagatggtcgagcaggtggttgactttgaggccatcgaaaggggcgagtatctggtgaaggcttcgtttgacagccgtctaatggagctgcagcagatgatgacggagctttattcgaaaatggaagagttgcagttcaaatgcagtcaggaattgaatttggatggcaaaaaccaggtgaagctggaaagtgtggccaaattgggacaccacttccgcatcaccgtgaaagatgattccgtgctgcgcaagaacaagaactatcgcatcgtggatgtgatcaagggcggtgttcgcttcacatccgataagctggagggctacgccgatgagtttgccagctgccgcactcgctacgaggaacagcagctgtccattgtggaggagataattcatgtggctgtaggatatgctgccccgctcactttgcttaacaacgagcttgcccagctcgactgtttggtgagctttgctatcgccgcccgcagtgcgcccactccctatgtgcggcccaaaatgctggaggaaggtgctcgcgagctggttctcgaggatgtgcgtcatccttgtttggagctgcaggagcatgtcaacttcatagctaacagtgttgactttaagaaaggtacggtgtaataataccatgcacacgttttttttttaactttttttttaacttttgttttgtttttttttttattcagaggagtgcaacatgtttataatcacgggacccaacatgggtggcaagagcacttatattcgctctgtgggtaccgctgtgctaatggcccatatcggagcttttgtaccctgcagcttggccacaatcagcatggtggactccattcttggaagagtgggagctagtgacaacatcatcaagggtttgagcacatttatggtcgagatgattgaaacatctggcataataagggtgagtagagaaacaaaagaaactaaatttacttactttatccaggacttttaataaatgttgtggcattttgcagactgccactgacaaatccttggtaatcatagacgaacttggtcgtggcacttccacgtacgaaggttgcggcatcgcctggtccattgctgaacatctggccaaggagaccaagtgcttcactttgttcgccactcattttcacgagataaccaagctggcggagaccctgtctacggttaaaaactgtcatatggccgcagttgcggatgctgatgactttactctgctgtatcaagtgcgttcgggggtcatggaaaaaagctttggcattcaggtggcgcgattggccaattttcccgagcatgtcgtccaaaacgcgcaggaggtgtacaatgagttcgaggacgagcatgtggacaagcagaagaaagaggataaggcactgctggaaaagattcaagtggctattcaacagctgtcaacagccgggaacaacgtggacattaacgtggaggatttgacccagctggtcacccagtttacgaaggatatcgagcagctggatagtgattacttcaaatctgtgctggccactagtgaggcttgaaatggaggtagggtccaataattcttaatctggcagtattatttaaagaggcagttgttctacgtacttatcacaacttttttgttcttaaatattattaatttgcatcactgaatattgctcatccatggttacaaaccatattctcctgatttgattacaaggctacatcgaaaatgttgtttaaatatttcttccattgtattaaacatataattataatataggagaaatcaactaaactagatgatatatgattttttactaatgcgagtgttcatacaccattcatgatttaataaaaatgcacacttgcgaatacatacaagttgatatgtaaaacaccaacatactaatattaaatctgaatgttttatttgtatattcaatatttctagaactttaaatcggaattggaatcaaagggtgtaaagcaagacgttaataaacttcatgttccacaaccgtcacatgatttggaaacacggtgatttgtgtgctactaatagcacgatgtatttcttcggcggtgtgccaagtcacattgaacacgctttttaactgaaaaatacgagcccgacaaaaactgtcagcttaatcggccgggctttaacctcagccgtcagttggtctaaagcgccgccgtttcgccagccgatctttagcgcgactgtcattaccaaattcaacttaagtgctgtcaaaagataattaccgtttcggctttgatttttcttaccttttttttttttgctttgagacaactaaatgacaacggctctctgaaaggcccaaaccagtttgtctccgccgcatttggtgtgattcaataagatggcaaaaattggagttattttttgggatgaattaatatatagactttattattttagcagtatgtttctatgttgattataacaactaagcaaatcgatcttaaaacagacattccacatcacgctcttcagaatcttcgagacgacattatgtgttcgcatct

SEQ ID NO: 6434 - DNA, 2609 bp, DROSOPHILA
gcgcgaaattgtgtgattattttaaccattttaaaagcggaaaaatgcaggccaaagcaaccgacagcaggcaggaacctaccctgaatatggacacaaatgcgcgtcgcaatttcatcaaattccatgcgaaactcggcgagaaacccgcaactacagtgaggttctttgatcacaccgatcgctatacggtccacggcagcgatgactgcgaacttgtggccaaaatcgtatacaaatccacggccttcattggcgcactgctgccggatgacaaaaaggagactcttcagtttgtgtccatgtccaagggcaacttcgagctggctgtgcgcgagctgctcttggtgcgcaattaccgggttgaggtgtacgttaagaattccagcgattgggaaatcgagtaccgcggatcacccggcaatctgctgcaattcgaggacatcctgttctccaataaggaggttttggtcgggaacagcatcatctcgctgctggttaagctcgatggcggtggccagcggcgtgtgggtgtggccagcgtcgagcagaacgactgcaagttccagctgcttgaattcctagacgatgacttcttcaccgaactggaggccaccgtggtcctgctcggaccaaaggagtgcctgctgccaagcatcgagggcgaatatagtgctgtgaagacgctgctcgacagaaatggtgtcatgattacgatgcccaagaagagcggcgacaacgatctgctgcaggatctaaatcgtcttttgcgtttcgccaagggacaacaggaggatgccacgggcttgaaggaactccagcttcagctggcctccaacgcactgaagaccgccatcaagtacctggacctggtcaatgacgccggaaatctgggacactacgagatcaagcaactggacctaaaccgctttgtccacttagattctgctgccgtggctgcgttaaacatcatgccaaagccaggcacacatccatctatgccctcgtatcgctggcaaagcgtcttgggcgtgctggatcattgccgtacaccacagggacatcgcctgatgggtcagtgggttaagcagccactgcgaagccgaaatatcctcaatgatcgtcataacattgtccagtgcctactcgaatctccagacacaatggagactttgagtctcgattatctgaagcggctcaagcagatggtcgagcaggtggttgactttgaggccatcgaaaggggcgagtatctggtgaaggcttcgtttgacagccgtctaatggagctgcagcagatgatgacggagctttattcgaaaatggaagagttgcagttcaaatgcagtcaggaattgaatttggatggcaaaaaccaggtgaagctggaaagtgtggccaaattgggacaccacttccgcatcaccgtgaaagatgattccgtgctgcgcaagaacaagaactatcgcatcgtggatgtgatcaagggcggtgttcgcttcacatccgataagctggagggctacgccgatgagtttgccagctgccgcactcgctacgaggaacagcagctgtccattgtggaggagataattcatgtggctgtaggatatgctgccccgctcactttgcttaacaacgagcttgcccagctcgactgtttggtgagctttgctatcgccgcccgcagtgcgcccactccctatgtgcggcccaaaatgctggaggaaggtgctcgcgagctggttctcgaggatgtgcgtcatccttgtttggagctgcaggagcatgtcaacttcatagctaacagtgttgactttaagaaagaggagtgcaacatgtttataatcacgggacccaacatgggtggcaagagcacttatattcgctctgtgggtaccgctgtgctaatggcccatatcggagcttttgtaccctgcagcttggccacaatcagcatggtggactccattcttggaagagtgggagctagtgacaacatcatcaagggtttgagcacatttatggtcgagatgattgaaacatctggcataataaggactgccactgacaaatccttggtaatcatagacgaacttggtcgtggcacttccacgtacgaaggttgcggcatcgcctggtccattgctgaacatctggccaaggagaccaagtgcttcactttgttcgccactcattttcacgagataaccaagctggcggagaccctgtctacggttaaaaactgtcatatggccgcagttgcggatgctgatgactttactctgctgtatcaagtgcgttcgggggtcatggaaaaaagctttggcattcaggtggcgcgattggccaattttcccgagcatgtcgtccaaaacgcgcaggaggtgtacaatgagttcgaggacgagcatgtggacaagcagaagaaagaggataaggcactgctggaaaagattcaagtggctattcaacagctgtcaacagccgggaacaacgtggacattaacgtggaggatttgacccagctggtcacccagtttacgaaggatatcgagcagctggatagtgattacttcaaatctgtgctggccactagtgaggcttga

SEQ ID NO: 6435 - protein, 854 aa, DROSOPHILA
MQAKATDSRQEPTLNMDTNARRNFIKFHAKLGEKPATTVRFFDHTDRYTVHGSDDCELVAKIVYKSTAFIGALLPDDKKETLQFVSMSKGNFELAVRELLLVRNYRVEVYVKNSSDWEIEYRGSPGNLLQFEDILFSNKEVLVGNSIISLLVKLDGGGQRRVGVASVEQNDCKFQLLEFLDDDFFTELEATVVLLGPKECLLPSIEGEYSAVKTLLDRNGVMITMPKKSGDNDLLQDLNRLLRFAKGQQEDATGLKELQLQLASNALKTAIKYLDLVNDAGNLGHYEIKQLDLNRFVHLDSAAVAALNIMPKPGTHPSMPSYRWQSVLGVLDHCRTPQGHRLMGQWVKQPLRSRNILNDRHNIVQCLLESPDTMETLSLDYLKRLKQMVEQVVDFEAIERGEYLVKASFDSRLMELQQMMTELYSKMEELQFKCSQELNLDGKNQVKLESVAKLGHHFRITVKDDSVLRKNKNYRIVDVIKGGVRFTSDKLEGYADEFASCRTRYEEQQLSIVEEIIHVAVGYAAPLTLLNNELAQLDCLVSFAIAARSAPTPYVRPKMLEEGARELVLEDVRHPCLELQEHVNFIANSVDFKKEECNMFIITGPNMGGKSTYIRSVGTAVLMAHIGAFVPCSLATISMVDSILGRVGASDNIIKGLSTFMVEMIETSGIIRTATDKSLVIIDELGRGTSTYEGCGIAWSIAEHLAKETKCFTLFATHFHEITKLAETLSTVKNCHMAAVADADDFTLLYQVRSGVMEKSFGIQVARLANFPEHVVQNAQEVYNEFEDEHVDKQKKEDKALLEKIQVAIQQLSTAGNNVDINVEDLTQLVTQFTKDIEQLDSDYFKSVLATSEA

SEQ ID NO: 6436 - DNA, 15763 bp, DROSOPHILA
attcgaacattatcatatttatttatcttcattcttttatttatgcaaatgaataaatatttgtatatagcactacgttggctgcgagtaattaataagcatcatttcatcattgacctcttattgcatttgattcacttatctctctctctatcggctctcctttctgatcatcctttgcatatagtgtacatacataataatatatatagagtttaatttaagttatcgttagctttattttataactatttataggcttcgcaagaagttattcaaggtctgctttgcttcgcattgtttgagagttaagagtttgagtttctttgagtatttgcttgcttgcttgctttgatttaaattccatttaaagaaaaacaacagttaaaatgcaaaataaattaattcaactacaatttgagacataactaggcatgcacacattgagttctcagttttggattcatctttcagttatttttggtttgaaaaagcactacgggttacaagatcgtcgagtatttggggttgttgccattgttctgaacaagcttcctagtcattacgaaataaaattaaatccatcgacttttcgtcctgatagcaattagtgagaaagttcgagtagcaaacgagttaaagttaaagtaggagttaggattaatcttcatcatcatcctttgtataaatacaaattgagttaaagttagatttggtaggtagtaagttaggataggttcataacgatttgcatattggtagattggtaggcaggtcgtttgcccttttggatggctaacagaccattagaccagattggccacgtgcgttgtgtccatgtgctgaattaaggtgcgcatgaaggacatctctttgcgagcgttctccaggatcactttcggatcctccgatgtacagcgcaggcagttgggcgcaaacaccatggccagatttgaggagtccattttggtgcaactcaccacctcgggtatggcgaattgttgtaggaaatgtattagatacgttagaacctgaaagcagaggtatttcttaatttcacagctcctttagtttcgctaaaaacttatgacttaccagctgatttatttcaggcaacttattaactatttctttggctttgtcgggatcctctgtgtttacgcaatcttcgtagtaggcatccggtataagtggatcgtacagttctcggtaccacagcttaagcagactggctggcgtgtgtgcatcaactatgaaatggggtagaatattaacatttcattcagtagttcttataaagaagtagtacttacccaacgtgtttttgtaatcaggaacatcccaccgatccaggcggttcttcatgcaacctacttcatccacatccgcggagactcgaaagattccttcagtctgctttccattcagcaggagtaccttaaagaaagaaaaatatttatttagaatgcgaattaaagttcggcaaacaataacgtacatgctctgatagtgttgtctgtatccagggcagcttacggaaaggaaatttctctttttggagatccatgacttcagaaagcgtgttaccaaacatgctgttccttaagatttgttgctaaaatttcagaatcgagcaattattataatttcttcttacttttttatgtacgattagttacccgcgcttgctccacctcatctacagttggctttttggccattcggcgtccactgctacctatgcgatccaagcggcgacagcacacagttgcgtagtgcgagatttgcacatggatgggccacttgctaacctccatgaagcacgtggcaaacgatggatcgcggtgccgattgacataactgcaatataaaacatcaattataaacgagttacacgaatttatatatgaagtaactgacttgagcagcgtcggttgaaacgtgggcgaagggggtacgtatgacagacagatggccatcagctcccaaccgcggatgagcgagtctctcttgggattctctgtcgtttgccgacacaactggacatatagctcgtctcttaatctgcaaagaacacgacttaatttatgagtttatatttatttcatgttaatgaactcactgctgctgtggtagggatgcactgataatttctatggccactgaattcagagtcatgcctatgcgcgccttgcgatccgccatgtagatctgcaccagcttaaacagttcaatggccgtcttcttgtccgccttgtcccgggacaatgccaacatgggtctgctaatcgcctccgccgtccaactaagcatgtcgcgaacagatgcctttttccggaagattccctttgagtgcaaattcagattgtcggcagcgaatttctctatatcacattctttcatgcaggccaacgtaggtccacccaatcccaagttgcccattcctggcgcccgttcgctgggtggaaagatttgctggatggtgggcttcaacgagggcggagccatcttgtgaccaggtcgggaaagactggctggcgttacagtgcctacggtaacctgctgttgaccggcaacggtactgtggccggtctcttctttggatgatgcagctggtcccgatccctgatgaccggcgccagctagacgtgaaatctgccgattaggggagggcagggtctgcgactgcttctgcttagtgtcgctcggttccaggtgcaactgctgctggtggggcagtgacggcggtggaacgtgatgtccatgaccgtgcccagagtagggcggagtattggagtaaagctgctgaccgtgatagccgcttccggcagagggactgtgcgatacggtgtcgtagtatgagatctggtaacgaggctttggcttgggggcggtggcggttggagccgaaggttctgtcgcattgccgccaattccctccagcacagcctccacgttttcagagctaaggcatagatagaatacaaagttaattaggctctaaaagaagaaatcaaatctatacttacatatcttcccttccggcgggatcgtgcggcggatacatgtacgcgtagtaggatacgctatcacccatattggcgtagtcgtcgatcatgccgtagttgtgctccagataaccgccatgcgtatccgatccgccgtccgagtcctcgttgtccggttcgtgtcctgagagtgagtgttccgactggctatccgagtggtacgagtccgaatctccgccatcgccaccacggtattcatagcgaccggacaactttgcctgctcgatgatgtagtgtttgagaggcagcaggtggggcatttcctggtcccaattggtgtacaagggcgaggtgttcccattgtcgtactccacgtcgctgttgtcagcctgctgttgataatgatgctgctttgagcgccgcttctcaccgcctgttactccccttccatcgccactccctccgcccacatggtagcctcgtttgtccagactagaactggcgctatgtcgcaaggagctctgtccgggataatgatgcgactgcgaacggttcgccgaggagttatttgacttctggcgctggcgggcagagtcgttggagccgcgcgacgagtgcgtcagcaggccaagattctctgtcccacctcccggtgatataggacccgattttcccagcgaaatcctttccaaactcagcaaatctagactgtgactcggctcctgcaggcgcggtgaatgctgcagctgtggcaccgtactggtggcactcgtcttagcctgccgcgaactttttgtctgtggactgatcggactctgcggactagagtcgctcgagtgctttttgtggctgctgctgccgctgcccgccgtactggtggccgtattgctgccactggctccacctccgctcttggttgcattggtggtgtggcggcgacgcgagagcggtgtgttttccactgacttgaagtacttttcgtgcattgagtcatcgctggcagctcctccattcgctgcttctgcgctgctcttgcggtaggatttgctgtggtggccagcggcggcgggattgattgaagaggacatgaaactgccggagcgggccagcgatactttgtattcgcgatctaaaagggttgacaatatttaaaataaacataaatcattttgctttaaacttcgtttggctgcatttgaatttaagtttactcctactacatatgtttcataattactcaatttatagggaaattaatcatcttcttcctctgccaaagtgttcttatctagctcattagcaaatttttcgaaattcttaatagcttatgcatgtataattctagcaaccaaacgagtttaacagcatggaaaacttctcgtaccgcctccgtaggactttcccgctggggctccggtgccagcagctcctccgccactacgttgtgcgcttctctgctgatgctgctgttgtgcgtagttgtattgtgcagcgggcgctgcatccggcgacatcttcttcttctgcgactggggcgtgtgaatggagtgtgttggcgaggcaatgtccgacgacttggaggaatagccctgcaggtggttgggcagcagctgatgatcaaaatacttgtccccatagccactgccaccggcgtaggatgaggatgtggaggtgctgccatgcggtaaattatgcgaactggtgctctcttgcagcatctcgaaactgtaaggcaatccgtaacccaagcgcaagcagagatggagatgtgggtataaaagcgatttaaagccgatgaagtgatggatgccaaacctcaagtacttacgctccattgtccttgccaccgccacgctgctgcttttgcagcgaacccagacgcaggttatccggatgtcctgacaccggaacgccgctgtcattgaagcgcctatagccatgcgcactggacagactagagtcgcttgacttgcccgattccttatactgattgcaggagtctgtcaggttagaaggatgttgatatgagtgagtcaccaggatgttggggttgactcaaagcacttaccttgcgaacgcctggaggcatagccctgcggatgctgctgctgcatgtccatcgaccgggatgagtcaccagtgctaacgctgcaaagtggcccagaatgaaatgtaaacatattcgagtgtaaacaatgcggcagcagaccccaaatggagttactcaactcaaggcgagccaactcaccgaaagctttgacgaccacgtggactagagatcacttcgctgctggttagcttctcctccgagctcgccaccgtaccgttgccaccgctgatcctctgctggccacgtcctttcttgttcggtcccgacatgggcgagggatgttgctgctgctgggaagcgtgctgcacctgctgctgctgctgcttttggggcgttgtctgctcgcgacgctcgctgggatcggtgttctgcttgagcgtctgcagcttcgccagcggaatgatgtcgcacttactcggccggtgccacacggtcttctgcgtggccgcattgtagtagtagaaccgctgggtattcgtatcaaacagttcccaccactgcgatgagtcggtccgcttaattggcacatcctgtaaagcgagaacggaacgggaataagttacgtactacaaacgggagcgagaacggaacgcggtacgcgtggcaaaattagtttgaatcgttgtcatctctcatcgcagagagtagtcgtgcgtgtgggattgtgcagtgcggaatgggatcgctggtcgtggaatttaggattcctattgcgagggggaaggcagcacgtggaccgtgagatcgacgggcgttgattagataagcacacataaacgtaaatatgccgtaagttgaagcttaaaccaatcgatgcataattcctgaccgaaaaatgtgcctactgtttatgcaaattatcaagaaatattactataggttactcttctctcatgagtataactcagaatcagaagtataactctagaatctgcttatatatttctattcagtttctttgcttttgaaatgaaaaccattgagaattattctaacgtccacttcttatcactagcaatcatcgttgaattcgctcatttctatacaaacccaactactacaaccatattgcacatattgaaagcattacaatttctgcacgtttcaacatctgtctcacaaacgtatgtagtttcatcagaagtgacaccggacccaatgacattgagctcgagtggtggcaatgatgagtttcaatccgctaaagcttcggcggctccattgttgctgttgcatggcgctggcttttatccctcctcttgaattatccaacaattacacaaaggcagatctattttggtatctcagctcgagagcttttcttcgggcttaatcagcaaactcgagcgcacaaagagtgcgagtgggtgtgcctctgagtgtgtgtgtgtgtttataatctcaatctgaagggttttatcagccaagtaaatacaaatacaacaagtgcttgccaaacaggaatgcccgatcccctctgcctttccgcctgctgtaggctacatgagccttgtgtgacatcagtgatgggaaaggtatttactttgcattaagtttgtgtacaagatgtaatgtacctaggattctaaggaaattgcagccaaatctcttgactaccaacggattacctaagattgctgccatttcacggacaatccagccaacaatttaaatagcttgaatagtccttgataaggactataaggactccttataaagaggataattctgatcgattgatcattatcatatttagtgatgtttttaagaccctagatagctcatttgcatctattatatttcgaattacatttatgtacagcttacagcttttgaacactaaactttagttatacgttgtaatgcacatacatctctgattttatcctccctttaatatctggccttgatggcgaggcgcgtgtgcttaatccgcttcatctcgctcactccttgctacccatctctgtcttacccagaagtcagggttatttctgcaaaatgcatgcagtaagagcagcagtagcagcagcagcagccatagcagcagcgttgaccttgaacttttgcgctgcagatgcgttcacttcagactgctgggagacccagctccagctgcacttgcccgggccagttgggcggtggaatgtgagcggtgggaggtgggtggtggttggtccctgacccacgccctcttttaattcagatgcctgctggcgttctgctgcacttgcttttgtggttgtaactggccacagatatatggcaacaataacaatgcccaggcccgcccaccgttcaacgcccaacgcccattgcccatcgcaccccgctgcaaatggaaagctttcggcttggctgcttttcatttctggttttcatttccatttcgaagcggcgccccgattgcgttgcatgttgcataatttgtgggcgcgaccagacgacgattgggtctggaggggagcaaggccacccagtggagatgggccactcagatgctacgtcgcctcgttacgcttttcgcattgttggctttccaactgccagtcagtaactcagtcagtcagtcagtcatccagatagtcctccctccattcgcgccaccaatgatccgattccccgctgcctccagttaaatgcgagatgaactataaaaagaaacaaacaagcgactcgacctcatttttcggcctgctacaaaattcttacctaacttttcataattgtggaatatgaaaaacaatgccctacatcttaatcacacaacggtcagctggaatttgcccattgtgtttgttggaagttggtgtgtaaccaattaattaaagcatttaaacggtgcctttcacattttcatttgttatcatttcatttgcaatatacaagaaccttatttaattaagtatatcggaaagcatataggcgttcttttgaattgctgactaaatattcactttcaactgattaacttttttaatatttcctgagatttcttaactaagatgtccagagtttcactaaaaacaaaaggaaatcagactgtcaaaacgatttatttttcaaaaatatgcaaattcctcatggattaaagtgtcggaatgatttgactctgcagaacgtactatacgtatgattactcatacgccctgtgtgagcagagatgaaaggcctatatgcgcagcaagagatatatactagtaaataaatgtgattcctactccaacaattggggaacagacttggcaaattattagattgatatgatttaatcgcgacccgattaatttcctgaattgagccaagcgttatatatatatatatacatatatagtagatcccccgtttaatgcattccgtttcgttatctgccattcaatttgccaaccatttggagtacagcatgtggcatgtgtgtctggcgcttattgaaaaacaattacaactcttaatcagcggcaagtgggtcgatcaagacgaaaaaaaaagcgaggcacgcacaagatttctaatcgctcggagtctagagttcctcgtatacgagaagactatgaccgaggtcagtttcggacccaaaccactcttcctttcatctgctcatctgttcatctgtgaatcatgcagcgggaaaacaagcaaatgatattaaatgagacgcagacacactggggtaaaaacaaacggaaagtcaacgcgcagctttcggttgcccccgccggaaaattaggtcatcatcagagcaaattttgaagtccagcgtagatctcaaaatagaatccatggaggcgataacatcgtctctttaaattcgaatggaatgtgccgccaaaaatcgagagcaatgaatataattgaattgaaccaaagcaatatgcgtgtgtagatctgacttcaatttaaagtttgctcacttttctcggcgcataaaaacaatcccccaataacttcatccagacgaaagcaataacaattaaatatccgatttatagattaaggctttgcagttatcgccgagttgggcacatgtttcacattcccgccagtgaatcggaatgcagatcgcgatacaaatacgtatttatagatcagtgagcaacaaaagagcctagtcctacgcttatttacgatatggggctactaaatagctccaccatagttcagcaacccggaaaatcaattcattcatgggggatctgcgttcgaaattgatcatcaatcaactgcacgcactgacaaataaaaacgcgtgattcgcttttatgatggataaaatatatatgttataagttatacaagttcttaaacctactgcattttccaacaaaatacaactaagccgaaaaaagcacaaaatcattcgcgttgcttaaactcagacaatttcgcctccgggggatttggaaatttttaatgtatctacgcctgcaagaagctccgaacgacgaaattcattagcaatatttatgcacatttaattgacttcgtaattgctttcaaattgtgccaagcaaagcggaagaagtctgtatttagctgtgtgcctgtgtggatccgaaaagcacactttggccgcagagacaggaaaccaaacttggcccaagaaggcaatgggcgatggccaaacgacgaggaggaagaccgggtgccaaggaatgcctcaaactgaagtctgggatcatagataatgcatgacatgcatattcagcaagtcggtatatgaatattgaatttattaaatcaagttacacaatactaggtattattctataggtaccaatttcggtatttctatttgggaaattcaattcaatctataaattctggaatatggataccaatactcaaaatagataccacactcttctgatcatagacaatcttacgaatcaaaccacttctttaaggttaagtcttgggtctaatatcccctgagtagaatgggtatacagcgacctcactgacaattgaaatattttgtcgattgcgtagcccaagagcctccattgaagcgaagaggaaggcccagatcgaggtctgaccgttttggaggaggcgccgcatttggttgcaccacctccctctgaaggggggactgggattgcggcttggggattgggcgagagcagttggagcacatggagcacttggatgacgccggcggacgcacgtgaacatccaatgaatctggtgcccactgtctcggggtcttgaggcgggtttcgtaatgtgaaacatgaaacgagcaatggacgtgcaacttgtgggcaacttttcttttctttactgtttctccctgccaaccggaagttttacaaagccaaatgggcaaaaagagcgacaaaaaaacagtatgaaaaagttgacaaaacgtcgagaggcagggaagaagagggagggcggtaatttcgagttataatataaaaaaaagaaaggggagaaaaaagtagacggtgtcccagcgcaattgtgaataaatttcaaatcacgtacaatgaacgcagcagcagcgagagttgtagtagtcttgttgttgttgctgctgctgctgctggtgacaccaaagggagctcggctaaaacaaagcgctgcaagttggccaacacaagcagcagcgaaaaaacgagaacagaatgttactaatttaaagcgagttagaagtgagcgagggtggaacaatgagtacgcaaaggggtgctcggcaaggtggtgcagtcaccccaactttaataatgccattttcacgccgccctgcataaattgtgcggattatatggcgcagtgaaaaggattcacttcctcatcgtcacgaggggaagcagcaacaattgcagtagatgcaatcagatactgaaatcgggggcaggtctttatagaccttatctagtacttcggaaggggcagaatgcagtcggaagtgtcgactttgcgctgataaattcacaaaagagacccacgaatcgaaggtatggtatgttcatataacaggttgagaagagtttgtaggtctgcttcttatgcgggaaatgctttattatttatacattgaaataagtaataattaacataatataatattataccagatctaaaatttatagaaacttacgctaaacagctgtttactattataatgtaactttcttctgatatattcctacagattacgttaattttagtttaagaaaagttgtgagaaacaattccattgatactttaagcatattatgattttctttatctcctctcactctctcattcactctctttttggccgaaagccgtgtttgtgagggcggaggggggtgtaatcagaatgcggatgacgtagtcgatgagtcaaacggagagtgagagtgacaaaaaccgaaatgaagtgcacataaataagcattcgaagagggcaaaagagagagcgagagcccggcgactgcagcaatgccttgttggtaagataacggggagggggagaacggaagaagagccgcaggacgagcaataaatcatggcttaaaaacggacctatgtaacacccacttacagacgaagaaattatttgaaagttgtcaaaaagtaagcgttttgttctcagctgtttattttgggtgtgttttcaaaaaattgttgaagaaactatctcaaattacctttcagtacatatattgcataaatatcatttaagccttgaaatttgtaagatgttacaaaacatttaaaataattactggatatgtgtatgtactataactaaatattttccgattgcgttttctttgatttaacttcttttttagtgtagctcctcacgtaagcctttccattatggatgcaggacatgcactctactgcacaccaataccttcagaaaactcctggccaagtgtgtgcaatcaggagcgaaacgaggacattgcaggccaaaaacaaaatcaatgaaattccccctacttcctttggcaggaggtaaaaagagaaaggccagggggtagggtattgaaagaggggtggcctggtttgttcgtctggccgatgtttgcctttcggattcgtcctgcaggcgagaccaaagttattagtccgcaacaccttttggcgttgccgcattagccaaacagcataaaaaatgcaagaaaaaaaaacaccatgcatttaagcaaacagacagctaatggtttttctttcgatggcgtctgaaaaggaaaagttttgcgttcacatagggaaaatatttgcactgaggcatgaaagactgcaacatttcctccttttacccagctgttatatcagaacggttatgatgatgcgctcaccattcgacagttattttaatataattaaccttggtcacgccacttggcgaagtgggttacgaaaaatttgcaagccaaacacaagcaagaaaattgcgcaaacaagtgaccccgagtagtaattaaaccgccagccgcacaacaagttactcatctaatcaatgaattgagcgtggtcactgaaccccataaacataaataagtgttgcgtaagataagacgtggaaactgttgacttcctataactataattattaaccgatgaataattctcatattcaagtcatgatgttcgtcttaaatcttctctgaatgcataaagaaatatatataatgatgatattacaaagatatggataaaagtaatgtagatttgaaaagtttttgaagcggaaaatatatttaaagtggaatattctttttagagctataataaatgatgaaacccaataaaaccaattcaaatatgtggcagaagaagtgagacattaaatcaacaatgttttcatttgattttaagatattgtttgagtcacagatggcttccgttcggaacttaattttagagcagttctttgctgatacacatatgtatgtaaatatacaacttaagagacttgtacttacttctggtggatcccaaacacactcgcccgtggtgagattggcgtacatgtgctccttggtgcgaggctcgatgatttctacccattctattctgcttatccggagcaaagaaggagatggggatccggagaagccgagaaatacacataaataagacataaaatgcgattgcttctattttcgagcggccgaaaaatgtatctcaggaatgccagccgccagtcaagtttctcgagattcgaaacttgctgaaaaacgccctcaaaagcggcagcaaaaatcaacaacgggcgaatcccccggcaaaccaatgtttcattcaacatatcatggcattcattgaggcaaattaataggagataccaaaaagtttaccaaaatcggcattgtgcgtagcatcttaatgtgtgtgtgtgtgtgtgtgccggttttcccccattcaattggtcttttctctatgccgacaaacatatttagtcgagcattatccggtttttccttatttgaaaattgcagtcctgacacactcacacacacactggccaagaatgggagttgggagagagtgggtgaggtgagtaaaagagggtgtaagtgctggtagtactctctctggctctctccatttggcacatttggcggacgacgcttgttgccgcgccttgccagaaaatcgattttgcaggcgcctcgggccacaaaaagagccaaaaagtgcataaatcaggaatttaatcaaggtaaaggaaaatgcacgcgacaagcgagagtgagagagggagactgggagagaaactcgcagggaggtagagtcgccacccacacacgcattctcacggacgcacacacatactccggcaggcaaatgctgtttcttccgcagtcattttcgtctccctcccacttccacttgcacgtccacgcccaccatctcctttttccacccactcgaactgcatggaaattagctgcactcaagactgccatttatttaacaaaagcatctgcagctggtcattgttgttgctgctcttgctttcttaataaattgtatacacaatttcgacattcgcgttgtctggagattgccgtatttgttgttgcatttctttgctgccgctgatggtggtgttgtagtttgtagtgtaacggcacacacctttcacaacttgaactcatttttttctctgctctttattagggggctgctgctggcggtttctctagcttgttgttgttgctgcctccttttgctatttcttctgctgccgctgctgctgcttcttgctcctttcctacacacacacaggcacactcgcaagcacgcacacaccccgaacgcactttatatatataaatatatatattattttctttcacttattttcgtttcggccgcgacagcgaatatgcaattttcctctcaattgattttttctacacactcgcactccttttcacatgcgtgcagtttatgttgctattgctgctactgctgctgttgttgttattgttgttctggctgccgctgcagtgcaacttgtaacactttcacatttatgacataatgcactggccatatttttgcttggctctccgtttgtgcaactgcatgttcccagtgcttttttaatatttatgcagcagtgcgtgcaaattcgaacgcgagacgatccgcttttcgctgcatctatgcgctgaagatgtgctgcagtcgatgggctcgtcgatagtgggaaggctcggtgccggcactatcgattcccaacaccatacgataatatcggctaagttatcaatatcgaagtttactatatttcgggtttttgcgttttaaaaattggcaaatctaccttatacaacatttttgtaagaagtaaaaagtagtttctcttatggatgcatcgataaaaactcggctcacatcgctctaaaagtgtgtcaccaccaacagaaaaccaaaacaaacacgacgcgaacagtgtgaccagcacaccaaaaattaaaaaaaggaacaaaaacgtttaaatatgggtcgtcttgatttgaaatatgtttagtcatttaaaacattgttttgttactgtattgttatttattttatctgcgccggcgaaataaaatctcattttatgttcaaaacgtagttatcaaaaatattatctatttcacggaaaaaacttttagcttacttcacagagaggttttttttgactggaaaacggcttagctcggaattagtaacagtccgaaatcatgttctcatcgtcgcgcttcagcgcaccgaggatgtcatccagcagggaggtaaagttctccttgcactcgaaccactcctggtgctgcttaaccaactggtccaggtcaatggtcttgagctcctcaaagaactgccgcaatggcaccgcgaactgcttatagtagaactcatcgatgtgccgcttctccgctgttttcccttgcgcgtttatctgcatctgggtctcaaacgccttctccaggagctgtgcatcctgcgagttcaatatggactcgatgacttcgtccgcctcggtgggattgaccggtggctgctgtggaatcggagttggctgcggctgggacgggaagtcgaatcttggccgctctctgtctgagagcggcgatctcatttcaatctcctccattatgcccttgtagcgctcgaacttctccgtcatggtcttgacgcc

SEQ ID NO: 6437 - DNA, 4525 bp, DROSOPHILA
cagcacatcttcagcgcatagatgcagcgaaaagcggatcgtctcgcgttcgaatttgcacgcactgctgcataaatattaaaaaagcactgggaacatgcagttgcacaaacggagagccaagcaaaaatatggccagtgcattatgtcataaatgtgaaagtgttacaagttgcactgcagcggcagccagaacaacaataacaacaacagcagcagtagcagcaatagcaacataaactgcacgcatgtgaaaaggagtgcgagtgtgtagaaaaaatcaattgagaggaaaattgcatattcgctgtcgcggccgaaacgaaaataagtgaaagaaaataatatatatatttatatatataaagtgcgttcggggtgtgtgcgtgcttgcgagtgtgcctgtgtgtgtgtaggaaaggagcaagaagcagcagcagcggcagcagaagaaatagcaaaaggaggcagcaacaacaacaagctagagaaaccgccagcagcagccccctaataaagagcagagaaaaaaatgagttcaagttgtgaaagaatagaatgggtagaaatcatcgagcctcgcaccaaggagcacatgtacgccaatctcaccacgggcgagtgtgtttgggatccaccagaagatgtgccaattaagcggaccgactcatcgcagtggtgggaactgtttgatacgaatacccagcggttctactactacaatgcggccacgcagaagaccgtgtggcaccggccgagtaagtgcgacatcattccgctggcgaagctgcagacgctcaagcagaacaccgatcccagcgagcgtcgcgagcagacaacgccccaaaagcagcagcagcagcaggtgcagcacgcttcccagcagcagcaacatccctcgcccatgtcgggaccgaacaagaaaggacgtggccagcagaggatcagcggtggcaacggtacggtggcgagctcggaggagaagctaaccagcagcgaagtgatctctagtccacgtggtcgtcaaagctttcgcgttagcactggtgactcatcccggtcgatggacatgcagcagcagcatccgcagggctatgcctccaggcgttcgcaagactcctgcaatcagtataaggaatcgggcaagtcaagcgactctagtctgtccagtgcgcatggctataggcgcttcaatgacagcggcgttccggtgtcaggacatccggataacctgcgtctgggttcgctgcaaaagcagcagcgtggcggtggcaaggacaatggagctttcgagatgctgcaagagagcaccagttcgcataatttaccgcatggcagcacctccacatcctcatcctacgccggtggcagtggctatggggacaagtattttgatcatcagctgctgcccaaccacctgcagggctattcctccaagtcgtcggacattgcctcgccaacacactccattcacacgccccagtcgcagaagaagaagatgtcgccggatgcagcgcccgctgcacaatacaactacgcacaacagcagcatcagcagagaagcgcacaacgtagtggcggaggagctgctggcaccggagccccagcgggaaagtcctacggaggcgatcgcgaatacaaagtatcgctggcccgctccggcagtttcatgtcctcttcaatcaatcccgccgccgctggccaccacagcaaatcctaccgcaagagcagcgcagaagcagcgaatggaggagctgccagcgatgactcaatgcacgaaaagtacttcaagtcagtggaaaacacaccgctctcgcgtcgccgccacaccaccaatgcaaccaagagcggaggtggagccagtggcagcaatacggccaccagtacggcgggcagcggcagcagcagccacaaaaagcactcgagcgactctagtccgcagagtccgatcagtccacagacaaaaagttcgcggcaggctaagacgagtgccaccagtacggtgccacagctgcagcattcaccgcgcctgcaggagccgagtcacagtctagatttgctgagtttggaaaggatttcgctgggaaaatcgggtcctatatcaccgggaggtgggacagagaatcttggcctgctgacgcactcgtcgcgcggctccaacgactctgcccgccagcgccagaagtcaaataactcctcggcgaaccgttcgcagtcgcatcattatcccggacagagctccttgcgacatagcgccagttctagtctggacaaacgaggctaccatgtgggcggagggagtggcgatggaaggggagtaacaggcggtgagaagcggcgctcaaagcagcatcattatcaacagcaggctgacaacagcgacgtggagtacgacaatgggaacacctcgcccttgtacaccaattgggaccaggaaatgccccacctgctgcctctcaaacactacatcatcgagcaggcaaagttgtccggtcgctatgaataccgtggtggcgatggcggagattcggactcgtaccactcggatagccagtcggaacactcactctcaggacacgaaccggacaacgaggactcggacggcggatcggatacgcatggcggttatctggagcacaactacggcatgatcgacgactacgccaatatgggtgatagcgtatcctactacgcgtacatgtatccgccgcacgatcccgccggaagggaagatatctctgaaaacgtggaggctgtgctggagggaattggcggcaatgcgacagaaccttcggctccaaccgccaccgcccccaagccaaagcctcgttaccagatctcatactacgacaccgtatcgcacagtccctctgccggaagcggctatcacggtcagcagctttactccaatactccgccctactctgggcacggtcatggacatcacgttccaccgccgtcactgccccaccagcagcagttgcacctggaaccgagcgacactaagcagaagcagtcgcagaccctgccctcccctaatcggcagatttcacgtctagctggcgccggtcatcagggatcgggaccagctgcatcatccaaagaagagaccggccacagtaccgttgccggtcaacagcaggttaccgtaggcactgtaacgccagccagtctttcccgacctggtcacaagatggctccgccctcgttgaagcccaccatccagcaaatctttccacccagcgaacgggcgccaggaatgggcaacttgggattgggtggacctacgttggcctgcatgaaagaatgtgatatagagaaattcgctgccgacaatctgaatttgcactcaaagggaatcttccggaaaaaggcatctgttcgcgacatgcttagttggacggcggaggcgattagcagacccatgttggcattgtcccgggacaaggcggacaagaagacggccattgaactgtttaagctggtgcagatctacatggcggatcgcaaggcgcgcataggcatgactctgaattcagtggccatagaaattatcagtgcatccctaccacagcagcaattaagagacgagctatatgtccagttgtgtcggcaaacgacagagaatcccaagagagactcgctcatccgcggttgggagctgatggccatctgtctgtcatacgtacccccttcgcccacgtttcaaccgacgctgctcaattatgtcaatcggcaccgcgatccatcgtttgccacgtgcttcatggaggttagcaagtggcccatccatgtgcaaatctcgcactacgcaactgtgtgctgtcgccgcttggatcgcataggtagcagtggacgccgaatggccaaaaagccaactgtagatgaggtggagcaagcgcggcaacaaatcttaaggaacagcatgtttggtaacacgctttctgaagtcatggatctccaaaaagagaaatttcctttccgtaagctgccctggatacagacaacactatcagagcatgtactcctgctgaatggaaagcagactgaaggaatctttcgagtctccgcggatgtggatgaagtaggttgcatgaagaaccgcctggatcggtgggatgttcctgattacaaaaacacgttggttgatgcacacacgccagccagtctgcttaagctgtggtaccgagaactgtacgatccacttataccggatgcctactacgaagattgcgtaaacacagaggatcccgacaaagccaaagaaatagttaataagttgcctgaaataaatcagctggttctaacgtatctaatacatttcctacaacaattcgccatacccgaggtggtgagttgcaccaaaatggactcctcaaatctggccatggtgtttgcgcccaactgcctgcgctgtacatcggaggatccgaaagtgatcctggagaacgctcgcaaagagatgtccttcatgcgcaccttaattcagcacatggacacaacgcacgtggccaatctggtctaa

SEQ ID NO: 6438 - protein, 1309 aa, DROSOPHILA
MYANLTTGECVWDPPEDVPIKRTDSSQWWELFDTNTQRFYYYNAATQKTVWHRPSKCDIIPLAKLQTLKQNTDPSERREQTTPQKQQQQQVQHASQQQQHPSPMSGPNKKGRGQQRISGGNGTVASSEEKLTSSEVISSPRGRQSFRVSTGDSSRSMDMQQQHPQGYASRRSQDSCNQYKESGKSSDSSLSSAHGYRRFNDSGVPVSGHPDNLRLGSLQKQQRGGGKDNGAFEMLQESTSSHNLPHGSTSTSSSYAGGSGYGDKYFDHQLLPNHLQGYSSKSSDIASPTHSIHTPQSQKKKMSPDAAPAAQYNYAQQQHQQRSAQRSGGGAAGTGAPAGKSYGGDREYKVSLARSGSFMSSSINPAAAGHHSKSYRKSSAEAANGGAASDDSMHEKYFKSVENTPLSRRRHTTNATKSGGGASGSNTATSTAGSGSSSHKKHSSDSSPQSPISPQTKSSRQAKTSATSTVPQLQHSPRLQEPSHSLDLLSLERISLGKSGPISPGGGTENLGLLTHSSRGSNDSARQRQKSNNSSANRSQSHHYPGQSSLRHSASSSLDKRGYHVGGGSGDGRGVTGGEKRRSKQHHYQQQADNSDVEYDNGNTSPLYTNWDQEMPHLLPLKHYIIEQAKLSGRYEYRGGDGGDSDSYHSDSQSEHSLSGHEPDNEDSDGGSDTHGGYLEHNYGMIDDYANMGDSVSYYAYMYPPHDPAGREDISENVEAVLEGIGGNATEPSAPTATAPKPKPRYQISYYDTVSHSPSAGSGYHGQQLYSNTPPYSGHGHGHHVPPPSLPHQQQLHLEPSDTKQKQSQTLPSPNRQISRLAGAGHQGSGPAASSKEETGHSTVAGQQQVTVGTVTPASLSRPGHKMAPPSLKPTIQQIFPPSERAPGMGNLGLGGPTLACMKECDIEKFAADNLNLHSKGIFRKKASVRDMLSWTAEAISRPMLALSRDKADKKTAIELFKLVQIYMADRKARIGMTLNSVAIEIISASLPQQQLRDELYVQLCRQTTENPKRDSLIRGWELMAICLSYVPPSPTFQPTLLNYVNRHRDPSFATCFMEVSKWPIHVQISHYATVCCRRLDRIGSSGRRMAKKPTVDEVEQARQQILRNSMFGNTLSEVMDLQKEKFPFRKLPWIQTTLSEHVLLLNGKQTEGIFRVSADVDEVGCMKNRLDRWDVPDYKNTLVDAHTPASLLKLWYRELYDPLIPDAYYEDCVNTEDPDKAKEIVNKLPEINQLVLTYLIHFLQQFAIPEVVSCTKMDSSNLAMVFAPNCLRCTSEDPKVILENARKEMSFMRTLIQHMDTTHVANLV

SEQ ID NO: 6439 - DNA, 3288 bp, DROSOPHILA
gacttgccgcacaggcaccagctgtatgttttatctgttggaatcgcgagttgtggttatgtaaatacttgttctctgcgcaccgatacgatgcgatttctcaataatacctttgtccaggtggatcttgaaggggcgcttgtcgaagatcgtaccgttctccttttgcagaacggccgtttgcttatcctcgagcaggttactgggaattgttttggccgagtccaccggttttgcgctggaactgtagcatgcctgcatgggagtaatgccttgaaatcagggggtgatctatcttggctatgggggatgcctaccttgagcaaccaggatgcccccaggttccgtcttagtatcattgacattctaacgctaatttatttttgttctctttatttaagctgatgattgcagtgtcgaaagtatcgatatgttgtcatcggtggtgatggtgttgcaaggtcgtaccactacttttaccaagctcaaatgggctcattgagagtatggatagatactgctttaatttacatctaaaagttcacaaatatatgtctcttctggtagcgagaaagaaaaaatgttgcagattttcaaactgggcagtgctgccagaccgccccagctgaatgcacagtggtgcaaaacgttcgggctgaatgttaatgttatcggcagtcactcctatcgatgctctatctgccgttatcgctgcccaaggtcgccaatttaaaatttgatttcagaattccggaatctgttcagctgataagcagagatatgattccgatgcgcctggaaatgtctctcctcgtttggaggtattttagcgtctatcgcagacattcatcttaatgaaagctcgttatgtgccccatacttgactagggaattctgagttccgaccgacgggtgcacacgccgaattctcgcagataacacgatttatcaagcggccccgttagacaaactgattagcccgacagcccagagatcttctacgtaatatactttattttacaatacaaatactacatatgcggggtgtcttacgaacctcttccagtaaaatattaaggggaattaatgcacgggtttactcgaaacctttttaactttgagttaacaactaaaacaaaacacccctcttggaatgccacagtcgttttgtttgcattcctagccaatccaataacggcgaaaccgatatttctgggacacccctgagcccgtctagaactcgtcgttgaacgggtagtacttatggcccgacattcccgaaaagggtaccgtgcgctgcccggtgtgatactgctccatgccggcgacgtcgtctggactcagctcgaagtcgaagacgcggaagttctcctcgatgcgggccttgttcgacgacttgggcagtggcaccacgcctagctggaccagataacgcaggcagatctgtgccgtggtgcggccgtacttcttggccagattctgggcatgctcgtcgtagaggaagggcggccactgccgagcgggctggggacgtgccagggggcagtaggcgcagatgaccagtccgtggcgcttggcatgctcccggagctggcgctgctgaaagcctgggtggcactccacctggttcactaccggccggatgcggcagttggctagcactcgctccgtctgcgcggcgttgaagttggacaggccgatgctgcgcgtcaggcccagatccaccagcttctccatctcgcgccaggtgtccagatagtccacgtccgtcagctccagggttccgtgcacgttgctgtcattgtggaacttctggcccaccggcatgtgcatcaggtagaggtctacgtattccaaacccaggttgctaaggctcaggcggcaggcgcgctccaccaatgcagggtcgtggtggattccgcctagcttggtggtcacgaaaacctcctcgcgtgtgaccactccctcggcgatcttctcggagatcgcctggcccacctcagcctcgttctcgtagacgaaggcggtgtccaggtgccggtagcccacgtcgagggcgtggcgcgttgagtggtaggcgtccgactcgaacgacttccaggtgccaaggcccagagttggcatctcgcgcccgttgttcagccggatggtgggagccagattggtcatcttgtcgctggcgctgataattaacgctgtgcaaattggacgcttctaagtctaaaccagtgctactacgcctttctcgcgatcaaatctctatctgttccagctcgtcgaaagcttcgcggacaactgttggctcgcacagccggtttcgatgattttgtcacggcggccgagcagctgctgtgtcatccggtgacgtcacggacaacgcgcggttattcccaccagcgttgccaagctggccttttcccactacatctagcgtttttcaaaagctcagcgggggaggaattgcgatctaaaatctggcgcgatgtataaaaatatttcaaggtacgcacacaagtaagcttaattttaacgtttaaaaacataagaacgacattaattgaattgtatagcataccagctatgcgaggttttctccaattgctgaatcgatcgcgagtgtatggcagtgttgtgtccagcagcgactagcgggaattattcaaagcagatttttaagacaaatttgaattaaaatcaaatgccgtaaagagcagataaggtgagagtaaatcaaacgtctaatatcatggaccaactccatccgaaaaaagcccaagtagggggcggtttacatagatggaatttagaaaagatcaagacagaagagttggcgggaaaacgagcaggtaattgtttggctaacacaagtccaggagtggtcatctctaaatgcttagacctgatgggataggaacttaaattagtttgaataaaattttgttttaaagcccttacgtgtataaattaaaccaaaaactcaaagcatttttaaaatatcacagattgaactccgattccatattgcccaaaactataaagaacagttaagctttcaaaaataatatagcgccctctgaatacaaataaaaaaaaccagtagcagcttgctaacacataaatctttattcgaatattagttgagttcaaaatgttagacattcaaagatatattttgttacgcttaggttcaacatttagggtattgaaatatctgctctgcattgcacaaatctcacttcggggtatgggttttctggttattagaatatgtaattggtagtacggcta

SEQ ID NO: 6440 - DNA, 1288 bp, DROSOPHILA
cgaagctttcgacgagctggaacagatagagatttgatcgcgagaaaggcgtagtagcactggtttagacttagaagcgtccaatttgcacagcgttaattatcagcgccagcgacaagatgaccaatctggctcccaccatccggctgaacaacgggcgcgagatgccaactctgggccttggcacctggaagtcgttcgagtcggacgcctaccactcaacgcgccacgccctcgacgtgggctaccggcacctggacaccgccttcgtctacgagaacgaggctgaggtgggccaggcgatctccgagaagatcgccgagggagtggtcacacgcgaggaggttttcgtgaccaccaagctaggcggaatccaccacgaccctgcattggtggagcgcgcctgccgcctgagccttagcaacctgggtttggaatacgtagacctctacctgatgcacatgccggtgggccagaagttccacaatgacagcaacgtgcacggaaccctggagctgacggacgtggactatctggacacctggcgcgagatggagaagctggtggatctgggcctgacgcgcagcatcggcctgtccaacttcaacgccgcgcagacggagcgagtgctagccaactgccgcatccggccggtagtgaaccaggtggagtgccacccaggctttcagcagcgccagctccgggagcatgccaagcgccacggactggtcatctgcgcctactgccccctggcacgtccccagcccgctcggcagtggccgcccttcctctacgacgagcatgcccagaatctggccaagaagtacggccgcaccacggcacagatctgcctgcgttatctggtccagctaggcgtggtgccactgcccaagtcgtcgaacaaggcccgcatcgaggagaacttccgcgtcttcgacttcgagctgagtccagacgacgtcgccggcatggagcagtatcacaccgggcagcgcacggtacccttttcgggaatgtcgggccataagtactacccgttcaacgacgagttctagacgggctcaggggtgtcccagaaatatcggtttcgccgttattggattggctaggaatgcaaacaaaacgactgtggcattccaagaggggtgttttgttttagttgttaactcaaagttaaaaaggtttcgagtaaacccgtgcattaattccccttaatattttactggaagaggttcgtaagacaccccgcatatgtagtatttgtattgtaaaataaagtatattacgt

SEQ ID NO: 6441 - protein, 311 aa, DROSOPHILA
MTNLAPTIRLNNGREMPTLGLGTWKSFESDAYHSTRHALDVGYRHLDTAFVYENEAEVGQAISEKIAEGVVTREEVFVTTKLGGIHHDPALVERACRLSLSNLGLEYVDLYLMHMPVGQKFHNDSNVHGTLELTDVDYLDTWREMEKLVDLGLTRSIGLSNFNAAQTERVLANCRIRPVVNQVECHPGFQQRQLREHAKRHGLVICAYCPLARPQPARQWPPFLYDEHAQNLAKKYGRTTAQICLRYLVQLGVVPLPKSSNKARIEENFRVFDFELSPDDVAGMEQYHTGQRTVPFSGMSGHKYYPFNDEF

SEQ ID NO: 6442 - DNA, 5603 bp, DROSOPHILA
aagccgttccggaatttgagggccgtgaccgatggaaactccttgacgcccggcaacttcatggctacatccaaagttgaacatcgttgcttggtacgtggatcccaggcttctacggtgccttctttggtaccggctaccagaagatggtgctctggattcacttcacaggcgttcaggcagctgccatccgtttcaaagggttgcaggaactgaccgcgctccaaattgagtcggaaaatgtcctgaaatcaaatctttagaataaactagacattagatagacctcagttcttaccctgcccactcccacgatgaacatgtcgcagctgggcttgtggtacttcatgtcgcgtccaaagcgcggtatccttagtctgtagtgccgcccgtgggccgcatggatctccacatagcgatcgcattgcaggaacaccatcttgctgtagtcgtcgctaatcacctcaaaggtggtcacctcggcgtcgaagcagcgctcgaatttgatagacaggttggacacctcgaagcacttgacgcgcggcttgtaagtgccggtggccaggatgtactgttggtcgggactcatgcggatgctggtgcagacgccgggcatatcgaagtcctggatgagctcgatctgtctccgggagtccacttttttcatgagctgtgaccgctttcgccgatccgtcagccactgtgaaggagatactcatgagttaactgcttggcaacgggtttatcttgctactcacatctggcaccgacttgccggcgctcaggttgtagatcttcacatcgttaacttcgtttacgaacatcttgagggacgatttttgctcaaaattaaaacataaacaaacgaagtccgcaacacgtgcgccctctatcgatagacacgattgtcgatagcatctggctgcgataagcacctatcgcggcagtgtgacccttggcttgccaattgctcagtgtgaccgcaggaaaccaagcaaaacaagagaacgcaaaagcagtgaaaaaagactactgatttgcatcgacctaccaattgaaaataatcgcaataattgcctctcggtgcagccccgcaaccccgcgaagccagtgtgcgtgctagcacgaaagtgaactgcattttgcatcgccaaattgcccaaaaattgcaatcgaattccgcacagccaaacaacaatacgcacacatacacacagtaccccccgctctgcgtaaccgccctacgttacacattccgttcgctccctaaggtggactaaaactaaagtgatctaaaacggtgagtaatattcgttgtttttccttaagccaattaaacactgattaaattatgcgaaatggaaaaccgtctgcgaaggggtgacgcagtgcagctgtgggtgctccgcaactttcccttgtgctctcgctctctcttgtttttgtcgttaggcagcagcactccattgttgttgtatacaccccctgattgctttgataccctgcaatggggagttactgttttgtgaccaagttaagaaaataaatatgatttacaaaaatcgattaattctggggatgtttcaggtttttatggtgtataatttattttttgaatttttaggggatggtggggcaaaaacggccgccactctacttaaaaatcggtaggtgaggagtttgtttagtatacgctataaataaatactctaaattagtttttataagatggattattatatgagtgtatgagttatcatagaaatatttacctgtgcttatatattaatttattatatgaattatgcaaacaaggttttttcaaaatgtaggcgagcatgaataaaaaattataataaatcagaagttttcttagtagttgttatcagttattaatatatttctttttcattttgttgtgtcttattgcgttgttgtcttcaatgcgggcttattttattagtttgaatggatgtgcgcttatttgtagatactcaaatatcaaatcgtattcagttatatcttagaaatggaatataaagcgcacatttataaaagtatatttatatttaagattttttgccaaagggtatacatacttcgtctgtgtataaatatatatttctcatactcctttcgttattttccctgttatgggtgcgccgctgtgttccttttatgaggggcaatgatgatccacttccattcaacacattttgcaaataagtacatatgtacttcgcctccattgattgctccactgatgtttggcctttggcgcttgactgataagactcgagaccgagacctactacttagttagtctaaactgcccgtcatagagcctattaaactgatatgcacttgtcactttgacaagcaatgataagcgattataactgtatttgatgatttaagtatgagcaattaagaatccataattgatactcatcttttcacactatatgctgctaagtcacattcttttgtatgaaattcattcatatgaagtaaggcaggatgattaccctaaatacaaactaacttgatgaataacttcgcgcgtactgctcttaataattgaattcccacgattgcttgctcggcgaccttgatccaaatcgctttcagcttgggcgaagggttcaattcactctcttcagcgccccttaactgcggacaaatcaaaggctttcgaacgacacggatactgcgaatggacaaagtcaagtggcatgaagtggatatacccgccgctcttgaagcttgcctctttcttatttttttttttttttggcttcagttggcaggcaaacaaacccggtcggctgttcaaacacaagcaggccttaaaaagaaatatcggggccagttcgagaaaggggaacaaaatgtggtgtcgacgcagaacaaattaatgcagcgcctcggtttgttgataagcagcgactacggttggacattcaaatgaggagctgatagtagtagttaacactgtttgattgggtcagagttcatttctgccggtgtcaagatgagcaaagtgcgcagcgtggtgaacaaactgcacgaacgcatagactactttattgaaaaatgtgtgaaatattctatatactcaatgactctgcaatgtaataataataataatttcgcttgctttttaggtcccaacatgactgcagcgccatacaactacaactatatctttaaatacatcatcattggtgacatgggcgtgggcaagtcctgcctgctccaccagttcaccgagaagaaatgtgagtagactgtgctgagtaataatgtatgtaataagaactaatctctacttgccgtcctgcagtcatggccaattgtcctcacaccattggcgtggagttcggcacacgcatcattgaggtggacgacaaaaagatcaagctacagatctgggacacagcgggtcaggagcgattcagggcagtgacacgctcctattaccgtggagcagctggtgcgctgatggtctacgatattaccaggcggtaagcgaagcaagctactatttgagaaattgctttacaacttgaccattccagctccacgtacaatcacctgagcagctggcttaccgacactcgcaatctcaccaatcccagcactgtgatctttctcattggcaacaaatcggatctggagagcactcgggaggttacctacgaggaggccaaggagtttgccgacgagaacggcctaatgtttctcgaagcgagcgctatgacgtgagtttcaactggaagcatagtgtttgagcatatactgattatctttttttttatcgcccaaacagtggccagaatgtggaggaggcttttctggagaccgcacgcaagatttaccagaacatccaggagggtcggctcgatctgaacgcctccgagtccggagttcagcacaggccatcgcagccgtcgcgaacttcgctgagtagcgaggctacgggcgccaaggatcagtgctcgtgctaaatgaatgatggaacctaactttacgcaaaacctagttatacaaatcaacttttatttttagccgactcgtaatctaccgatgcccaagcaaaaaccaatgtatgtagttaaataattcgattaagcatcaatgtgtgagccaacaacagcgacagcaaccacaaaaaaaaaaaaaaacagaaaaagaaaatataaagtcctttcgcttaataagacgcaagcattgcaacatttattgtatcggttaagcataaatactagaaaattaaacatgtttgttggcgcaaactaaagttttgaccatgaaatttcgaaaagtttatcgcactaacaccatccttcggtctcaatttatagatgaattcgtttgagatatagatcatgtttttgttggctgatgaatccctgtatataatatatatatgtatgaatttttgtatctccctaattttttgttgagtatttgttgttgtcgcgtgcaagaattggaggaaacgatcaatgttatatgaatatttacgatgtattaatggcataatgcaataggaaataaataaaatggtatttataaaacccctaccaatagaaatgaatttctctttcaaataatttaaattttaatttgcatatttaaccattcgtttatatttaattctacaccaaatcgctggataattttataatttaccggatttccatttaatagatttaaattttataaatatttgggtacttacgatttacttaaatattttgtaaaaagcttttttaatccatttagtggaataccctcaactttgacttgcgcataacttcattcttgttttatttagtgatgctaacgttgggttggaaatcagctgattatgactatgaacaataaagtttgtaagtcaaacaacgatttttcgtatactgttcttttgtttgttgctggttgtctaattaatcattttaactggttatcagtccaatttttgttttctacactacactattctacactattttcgatttccttgaaatttagcgggaaaaactctgagctagcatcttcggtggcatcgctgtgtgcgcgcttttgtgcgaatgccatggtatgcaaattaaatttaatttattccgatcatcatgaaagtgacaaagtagctgcttaagtagccagggaagcgcacaacgtaatctaatctcgatccatgatgcaaatcaagcgcctcctgtgcaaatcctgcggcctgggcacccttctggtggcggtcgtctggctgctggcgctgcttttctactcgcacagcctgcgcagctccatccgctcggcaggatggaggatcgacgaagggaacgcaacgccacgggccgagctgagctaccaggccagggtcaccgtcggatgcactccaaatgccagcattaccactggcgaatcgccggcggcacccaagccgcccagtgatccggagcaattggaactgttgggtgtggtgcgcaacaagcaggacaagtacatacgcgacattggctacaagcatcacgccttcaacgcgctggtgtccaataacataggactcttccgggcgatcccagacactcggc

SEQ ID NO: 6443 - DNA, 1549 bp, DROSOPHILA
caagagaacgcaaaagcagtgaaaaaagactactgatttgcatcgacctaccaattgaaaataatcgcaataattgcctctcggtgcagccccgcaaccccgcgaagccagtgtgcgtgctagcacgaaagtgaactgcattttgcatcgccaaattgcccaaaaattgcaatcgaattccgcacagccaaacaacaatacgcacacatacacacagtaccccccgctctgcgtaaccgccctacgttacacattccgttcgctccctaaggtggactaaaactaaagtgatctaaaacggtcccaacatgactgcagcgccatacaactacaactatatctttaaatacatcatcattggtgacatgggcgtgggcaagtcctgcctgctccaccagttcaccgagaagaaattcatggccaattgtcctcacaccattggcgtggagttcggcacacgcatcattgaggtggacgacaaaaagatcaagctacagatctgggacacagcgggtcaggagcgattcagggcagtgacacgctcctattaccgtggagcagctggtgcgctgatggtctacgatattaccaggcgctccacgtacaatcacctgagcagctggcttaccgacactcgcaatctcaccaatcccagcactgtgatctttctcattggcaacaaatcggatctggagagcactcgggaggttacctacgaggaggccaaggagtttgccgacgagaacggcctaatgtttctcgaagcgagcgctatgactggccagaatgtggaggaggcttttctggagaccgcacgcaagatttaccagaacatccaggagggtcggctcgatctgaacgcctccgagtccggagttcagcacaggccatcgcagccgtcgcgaacttcgctgagtagcgaggctacgggcgccaaggatcagtgctcgtgctaaatgaatgatggaacctaactttacgcaaaacctagttatacaaatcaacttttatttttagccgactcgtaatctaccgatgcccaagcaaaaaccaatgtatgtagttaaataattcgattaagcatcaatgtgtgagccaacaacagcgacagcaaccacaaaaaaaaaaaaaaacagaaaaagaaaatataaagtcctttcgcttaataagacgcaagcattgcaacatttattgtatcggttaagcataaatactagaaaattaaacatgtttgttggcgcaaactaaagttttgaccatgaaatttcgaaaagtttatcgcactaacaccatccttcggtctcaatttatagatgaattcgtttgagatatagatcatgtttttgttggctgatgaatccctgtatataatatatatatgtatgaatttttgtatctccctaattttttgttgagtatttgttgttgtcgcgtgcaagaattggaggaaacgatcaatgttatatgaatatttacgatgtattaatggcataatgcaataggaaataaataaaatggtatttataaaacccctaccaatagaaatgaa

SEQ ID NO: 6444 - protein, 215 aa, DROSOPHILA
MTAAPYNYNYIFKYIIIGDMGVGKSCLLHQFTEKKFMANCPHTIGVEFGTRIIEVDDKKIKLQIWDTAGQERFRAVTRSYYRGAAGALMVYDITRRSTYNHLSSWLTDTRNLTNPSTVIFLIGNKSDLESTREVTYEEAKEFADENGLMFLEASAMTGQNVEEAFLETARKIYQNIQEGRLDLNASESGVQHRPSQPSRTSLSSEATGAKDQCSC

SEQ ID NO: 6445 - DNA, 6139 bp, DROSOPHILA
gccagctttagtttgtccttaagtgtaacaatctcccccttgaccttctgttttacattcacaatgttgtccaacgttttcgtcttcttttcctcaactagaaaagtatatatctaatgagtaaacattcaaaatggtaatcagctcatagttacagtcagtgtcatgggttagcaacccattggcgctctgttctgaaagcaggagataatgctgcaagatctgggtgggctcctggaacactatttcctcatacgactccgagaccaggcccttcttagtgtccatagtggtgctagaggagagctcgccatcgaccacaggcgattggaagagcttaaggatgtggtagcaggtaaccgggcgctctgattgatcgttgaagtatatcttgatgatcacctcgaattcaccccatccggtctcggtaatctcgtagggcggcttaactacgatcctgttcggattagcgtagctctcgtgcagcttgaaatgcacctttttcacgtaaatggacatgtcctcgttgaaatagggcttcaaatagactttccactgatgcgtgtgtccgtcctcctcgcgcttcttgccgaaggatctggcaatgtttccatacactatgggctttactatagttacgccctttagtcggccacccgagtctccgccaaagtcagtcataattcaacgattttaagttgtttatgcttcgttaactaaatattgttttggttcttcttcttgcttttcggctagcagttgttatcgatatatggatgcactgaataccagggctgaatataattatggacatgaaaaaaaagaattaattatttaattaatttattaattaattaacgaaaattccacaataattaatttaaatattttagctgtattttatttcttttaagtttaagccactcttatttcttaattgcatcccttgtttccgattgcgtctttcgattgtttttgcactgtattgtgggttgtggttccatcacttgtatcaatcggacgctttggtcaaattttattgtttaatttaaaattaaatgatttgaagccatatttaccagtgagacagtcaaatacataaaatgatggcgcgtcgcggtggaaagcgcatacgtatggatgatccgccgccggactacgaggaattgcacaggtacagttctccgttttcccaccattcgtgtttgcctataagaaatatgtaattattttttagcgatgccctgaatgagagcacctcggatgcggacagccccaccaaacggatgaccaggctcagagcgcggggcggagtgcgggacaaaccgcccataattgatgatgacgaggatgacttcttcgcgccaatcgcgcgcaaacgaaagactcccgccacccgcaaggggccaacagaacgcaaggaacgcgttgaacgaccgcgcaaggagcccgtcgacaagggacatcacgagcggatagacagtgagcgggagataaccacggacgagaatagtctctactatattgtgcgacactcgaagaaccctattgctgtaggagaaacaattgcctttctatttcccaaatactaatcacacgttcttttcagagcattgttgaccaatggattgagcagtataaggcaaaccgagaaacggccctggttgcactgatgcagttttttattaatgctagtggttgcaagggaaagatatccgaggacattcagtatcctgttgatcacacatcaattatccgacggatgaccgaagagtttgacgaagtaagtctgctggagatgtgcctgaagcttcttattcaatcgtaaaatattttaggaaagcggcgaatatcccttgatcatgagcggaacgcagtggcgaaagtttaaaaataatttctgcgattttgtgcaaacccttgtgaagcaatgccagtactctattatctacgaccagtttctgatggacaacgtcatatccctgcttacgggcctctccgattcgcaggtgcgagcttttcgacacacagccactctggcggccatgaagttgatgacggctttggtggatgtcgccctattggtttcgaataactttgacaatgctgcgaagcaattcgaagctgaacgcgttaaggtacgtttgcctataactacttggaattaattaatgatcctaaaattgtttagtcccgagatcgtcgtgcttctgaccgtttggactcgcttatgactaaacgttccgaattggaagagaatatggacgagataaagagcatgttgacctacatgttcaagtcggtgttcgttcaccgctacagagacagtctgcctgatatacgagccatatgtatggccgagatcggcatctggatggaaaactatccgcaaaactttcttgacgactcttaccttaaatatatcggttggacgctgcacgacaagatcggagaggtgcgcctgcgatgtttgcagtcgttgctgccgctgtacgagaaagatgagctcaaaggaaaacttgagttgttcacgtcaaagtttaaggataggattgtggccatgacgctggacaaggagtttgaagtgtctgttcatgccgtcaagctggttatcagtatcttgaagtaaattacatttttttgttttaaggaatgttattcaccaagctcatgtttattttcagaatccacccagagattttggctgacaaggattgtgaaattgtctacgagttggtttactcttcacatcgtggtgtggctcaggcagcagctgagttcttaaatgttcgcctgtttcacttaactgccgacatggaagagacgaagacaaaacgtgggaaagtgcgtatgcccaatacaccgctggttcgggacttggtgcagttctttatcgaatccgaacttcacgaacatggggcctaccttgtagactccttcatcgatagcaatgatatggtaagggactgggagtgtatgacggatctgcttctggaagagccgggacccaatgaagaggtccttgacaataagcaggaatcgacactcatcgagatcatggtcagcagcgttaaacaatcagcgactggagaagttccagtcggtcgcgctagcaatcgcaaatgtacgctcagtgccaaggagctaaaggctattcaagatgagaaggcgaagttgaccgaacacttcattgtcaccctaccgtccttgctagaaaagtatcaagcagacagcgaaaagctggccaatctccttgcagttccacagtatttcgatctcaatctgtacaccaccaatcgtcaagagggcaatcttcaggcactgttagatcgcatcaatcaggtaatgagcatgcacacaggtcgcgaggttctggaaacttgtgcaaaaacgctagaatgtctttgtgccgagggtagtgccacgtacaccagatgcaatatcgccagatccaacatcatcgagagcgctgtcaacaagtacaaggatgcaatcgaggaatggcgaaacctcatacaaggtgataaaataatgacacgttttagcttgactatattacttattatgttttgtttgaaggcgaggagacccctaatgaggatgacatctacaatattaccatcacccttaaggtcctttccattctgtactcctcgcacaaccttaatccctgggagctgtttaagtccctgttccaggacgtagaggaggcgcagtctaaagagaacatcgatcgctgtctgcccaacgaagccttagtctactgtatagaagcttgttacttttccataagctggggactgcagtatgtggaaaacgaatgcgagtcagttaatgtgaccgaggtggtggctgagctgcgcaacaatttggatacctttatgggagcctgctttgaactaacccgcgatggacccacagttcagattcaagaggcggtacgttttgaaatgtacaaatcactatttggaaaactttaatatcattataatttacaggcgtaccaatccatttgcgatctgctcatcattttctccgacaagttggctcgcagtgagatcgaacatatacgcggcttggagtacaagtcgcgcatggatgagcacctaatcttggacaatttcgtgcagcactatgtattctcccttaaacaagatgtggcacaggatgaaaccagaatcgaggagctgcataagaaacgtaatttcttggcctgctactgcaaattggtggtgtacaatataattccaacgatgcgtgcagccagtatatttaagtattacgttaaggtaagtgagcacgagaaaatatctgaaagttctatgtttatccattatctttctattttcagtgctacaacgactatggagacataattaaggccacgttgggaaaagcccgtgagattaataaggttaacttcgctatgacgctccttttgagcctgatcacagtctttaagagtctgcaggagcagagtgaggatggcatagtttcaaagagttcgcaagagtttgtggacctcaaggagttggccaagcgatttgcgctcacatttggtttcgatgccatcaagaatcgcgaatctgtggccgccattcatcgtggtggcatttatttcgctgcgaacaaggagccagatgatccggtgcgggctccaactcgcttgctcttcctggaggttttgaacgagttcaactacaagctactgaagcaagacaagaaggtcataatgagctttctggacaagataataccacccgcaatgccatccagccgagctgaggaatggcagccgctgatattatatcgcaattccttgctacatggcgaaactgatcaagcgcccgtcgccagcaaacgagcctacacacgtaaacgtcgagatcatggtaagaatttcatagctttcattttatttagaatcaacattatgaaaaacatgtttttaatttagatgaagaagaggaggaggaggaagacgaagaggaacacaatgatcctgattacaggggctaggacccatcaggcaatcagccatacacgcggcttaagtgcaaaatctaattttccggaaaatcaagtagttgtaagattaaagctaatattatgtacataaatacgtttaaattatataaattactgtatcctaattgatttccgaattgctaaagctaaagttggccttcatgagcaacattttggatgcactttcggggctcaagcccgcctgcatgtcgaaatacaagtgcgttgattttctaaataagccttcactaaccacacttgctgctggtgctgataagaatttcctaacaatgccatacaaggatatgtattttatgttgctcctccaccaaatcaggggatccatgttcctatcgattctgggttcggagttgtatagatatagcagattcttaatctgagactgggagcccattgacgtatttggctgttgagtgttcgtcgttccagttgtcagtatgctatccagaatgctatcgatctttgattcattcttctgggacgatgtggatgacactttgattattttcagcggtggctgaccattgcaatcctctggcactccagcgagctgaagcagaacttcattggccaccaactgctcctcacgttcggtgaaaaatgcttgcttatatctcggatccaaatatgtggccatcaaaaagttgatgtcgctagtgatgtgggcgaacttcatttccagttcttcaagcaactttctggcgaaactgcatatagtctagacattcgaaatattagacaatactttatggttttatctactgcaacttaccacagatgagacaaagttatggacatctgttcggagggaatcccgtaaagcggcaaccagcgggattacggatgaggtggtcgtagatggattgctccatatcttgattgtttcttcacaaggctgcattactttgctgcacaaatcgatctctatccattcatctggatatatttggaccagactatactcttcgcagtacaaggatagagcatctttcattcgaaacacgctgctcatcatctgaaaagcggaattccattgacagggatcgtaaggtgtaagtgtgcacgggtctcgcgtcaagcggatctcttg

SEQ ID NO: 6446 - DNA, 3607 bp, DROSOPHILA
ccatcacttgtatcaatcggacgctttggtcaaattttattgtttaatttaaaattaaatgatttgaagccatatttaccagtgagacagtcaaatacataaaatgatggcgcgtcgcggtggaaagcgcatacgtatggatgatccgccgccggactacgaggaattgcacagcgatgccctgaatgagagcacctcggatgcggacagccccaccaaacggatgaccaggctcagagcgcggggcggagtgcgggacaaaccgcccataattgatgatgacgaggatgacttcttcgcgccaatcgcgcgcaaacgaaagactcccgccacccgcaaggggccaacagaacgcaaggaacgcgttgaacgaccgcgcaaggagcccgtcgacaagggacatcacgagcggatagacagtgagcgggagataaccacggacgagaatagtctctactatattgtgcgacactcgaagaaccctattgctagcattgttgaccaatggattgagcagtataaggcaaaccgagaaacggccctggttgcactgatgcagttttttattaatgctagtggttgcaagggaaagatatccgaggacattcagtatcctgttgatcacacatcaattatccgacggatgaccgaagagtttgacgaagaaagcggcgaatatcccttgatcatgagcggaacgcagtggcgaaagtttaaaaataatttctgcgattttgtgcaaacccttgtgaagcaatgccagtactctattatctacgaccagtttctgatggacaacgtcatatccctgcttacgggcctctccgattcgcaggtgcgagcttttcgacacacagccactctggcggccatgaagttgatgacggctttggtggatgtcgccctattggtttcgaataactttgacaatgctgcgaagcaattcgaagctgaacgcgttaagtcccgagatcgtcgtgcttctgaccgtttggactcgcttatgactaaacgttccgaattggaagagaatatggacgagataaagagcatgttgacctacatgttcaagtcggtgttcgttcaccgctacagagacagtctgcctgatatacgagccatatgtatggccgagatcggcatctggatggaaaactatccgcaaaactttcttgacgactcttaccttaaatatatcggttggacgctgcacgacaagatcggagaggtgcgcctgcgatgtttgcagtcgttgctgccgctgtacgagaaagatgagctcaaaggaaaacttgagttgttcacgtcaaagtttaaggataggattgtggccatgacgctggacaaggagtttgaagtgtctgttcatgccgtcaagctggttatcagtatcttgaaaatccacccagagattttggctgacaaggattgtgaaattgtctacgagttggtttactcttcacatcgtggtgtggctcaggcagcagctgagttcttaaatgttcgcctgtttcacttaactgccgacatggaagagacgaagacaaaacgtgggaaagtgcgtatgcccaatacaccgctggttcgggacttggtgcagttctttatcgaatccgaacttcacgaacatggggcctaccttgtagactccttcatcgatagcaatgatatggtaagggactgggagtgtatgacggatctgcttctggaagagccgggacccaatgaagaggtccttgacaataagcaggaatcgacactcatcgagatcatggtcagcagcgttaaacaatcagcgactggagaagttccagtcggtcgcgctagcaatcgcaaatgtacgctcagtgccaaggagctaaaggctattcaagatgagaaggcgaagttgaccgaacacttcattgtcaccctaccgtccttgctagaaaagtatcaagcagacagcgaaaagctggccaatctccttgcagttccacagtatttcgatctcaatctgtacaccaccaatcgtcaagagggcaatcttcaggcactgttagatcgcatcaatcaggtaatgagcatgcacacaggtcgcgaggttctggaaacttgtgcaaaaacgctagaatgtctttgtgccgagggtagtgccacgtacaccagatgcaatatcgccagatccaacatcatcgagagcgctgtcaacaagtacaaggatgcaatcgaggaatggcgaaacctcatacaaggcgaggagacccctaatgaggatgacatctacaatattaccatcacccttaaggtcctttccattctgtactcctcgcacaaccttaatccctgggagctgtttaagtccctgttccaggacgtagaggaggcgcagtctaaagagaacatcgatcgctgtctgcccaacgaagccttagtctactgtatagaagcttgttacttttccataagctggggactgcagtatgtggaaaacgaatgcgagtcagttaatgtgaccgaggtggtggctgagctgcgcaacaatttggatacctttatgggagcctgctttgaactaacccgcgatggacccacagttcagattcaagaggcggcgtaccaatccatttgcgatctgctcatcattttctccgacaagttggctcgcagtgagatcgaacatatacgcggcttggagtacaagtcgcgcatggatgagcacctaatcttggacaatttcgtgcagcactatgtattctcccttaaacaagatgtggcacaggatgaaaccagaatcgaggagctgcataagaaacgtaatttcttggcctgctactgcaaattggtggtgtacaatataattccaacgatgcgtgcagccagtatatttaagtattacgttaagtgctacaacgactatggagacataattaaggccacgttgggaaaagcccgtgagattaataaggttaacttcgctatgacgctccttttgagcctgatcacagtctttaagagtctgcaggagcagagtgaggatggcatagtttcaaagagttcgcaagagtttgtggacctcaaggagttggccaagcgatttgcgctcacatttggtttcgatgccatcaagaatcgcgaatctgtggccgccattcatcgtggtggcatttatttcgctgcgaacaaggagccagatgatccggtgcgggctccaactcgcttgctcttcctggaggttttgaacgagttcaactacaagctactgaagcaagacaagaaggtcataatgagctttctggacaagataataccacccgcaatgccatccagccgagctgaggaatggcagccgctgatattatatcgcaattccttgctacatggcgaaactgatcaagcgcccgtcgccagcaaacgagcctacacacgtaaacgtcgagatcatgatgaagaagaggaggaggaggaagacgaagaggaacacaatgatcctgattacaggggctaggacccatcaggcaatcagccatacacgcggcttaagtgcaaaatctaattttccggaaaatcaagtagttgtaagattaaagctaatattatgtacataaatacgtttaaattatataaa

SEQ ID NO: 6447 - protein, 1116 aa, DROSOPHILA
MDDPPPDYEELHSDALNESTSDADSPTKRMTRLRARGGVRDKPPIIDDDEDDFFAPIARKRKTPATRKGPTERKERVERPRKEPVDKGHHERIDSEREITTDENSLYYIVRHSKNPIASIVDQWIEQYKANRETALVALMQFFINASGCKGKISEDIQYPVDHTSIIRRMTEEFDEESGEYPLIMSGTQWRKFKNNFCDFVQTLVKQCQYSIIYDQFLMDNVISLLTGLSDSQVRAFRHTATLAAMKLMTALVDVALLVSNNFDNAAKQFEAERVKSRDRRASDRLDSLMTKRSELEENMDEIKSMLTYMFKSVFVHRYRDSLPDIRAICMAEIGIWMENYPQNFLDDSYLKYIGWTLHDKIGEVRLRCLQSLLPLYEKDELKGKLELFTSKFKDRIVAMTLDKEFEVSVHAVKLVISILKIHPEILADKDCEIVYELVYSSHRGVAQAAAEFLNVRLFHLTADMEETKTKRGKVRMPNTPLVRDLVQFFIESELHEHGAYLVDSFIDSNDMVRDWECMTDLLLEEPGPNEEVLDNKQESTLIEIMVSSVKQSATGEVPVGRASNRKCTLSAKELKAIQDEKAKLTEHFIVTLPSLLEKYQADSEKLANLLAVPQYFDLNLYTTNRQEGNLQALLDRINQVMSMHTGREVLETCAKTLECLCAEGSATYTRCNIARSNIIESAVNKYKDAIEEWRNLIQGEETPNEDDIYNITITLKVLSILYSSHNLNPWELFKSLFQDVEEAQSKENIDRCLPNEALVYCIEACYFSISWGLQYVENECESVNVTEVVAELRNNLDTFMGACFELTRDGPTVQIQEAAYQSICDLLIIFSDKLARSEIEHIRGLEYKSRMDEHLILDNFVQHYVFSLKQDVAQDETRIEELHKKRNFLACYCKLVVYNIIPTMRAASIFKYYVKCYNDYGDIIKATLGKAREINKVNFAMTLLLSLITVFKSLQEQSEDGIVSKSSQEFVDLKELAKRFALTFGFDAIKNRESVAAIHRGGIYFAANKEPDDPVRAPTRLLFLEVLNEFNYKLLKQDKKVIMSFLDKIIPPAMPSSRAEEWQPLILYRNSLLHGETDQAPVASKRAYTRKRRDHDEEEEEEEDEEEHNDPDYRG

SEQ ID NO: 6448 - DNA, 12010 bp, DROSOPHILA
tcttctttatttggctctcctcaacgtaattggttcattcgcatatcgcaaataaattgataagtgataaatgactagcaaaaacataccggttccgtgttaaagtgaatttcatcagtagaaagttgtagaactttggacgtatttacctgctgttgagcgggtggaaattattattgaacaacgtgagagagagcaaaaagttggataaatacgtaaatattgtggttatcttgttcgattcccagaacttaaacaacaccgaaacctaattgctgatgcaatgctgtttatcaatttcgtgcaaggatcttaccgcttctacccgcagctccaactttaaagtttcgcatttccggcaagtctaaaaagtatatagagtttgccacgcttatgaaagccggtcttagatttcgtcatccaaaaagtggagaaggcccttgccctttaggatttgcggaatatacatatctcgcttgctcttctcaaattcagcgcatcgtgtcgctgtccttgtcgtcctttcagccgtatttatttttttctcttacccggcttttctctttctctgcatttacaagctgtttgttttagcgggaaaaaagccagatcggattttaaaatttcataaatcaagctgtaaaatcagatacgtacttgccttacctaatttttttgtgtttactaagaataattcattaagaagtaaaaatattctaataatcgtagccattttgacaaaaattccttaagtggcattttgttgtctttttacttaaggtagttaaaaaaatatttataaatatttataataaaaatcataattttcctaaaggcataatctatacctataatttattacgtattctaaaatataatatttttacatcttgccttataaaataaagtaaaataaatgtcggcagcactgttgcgctctctcagtatttatatttaagcagggactgtgtttctcattttagttgctgtttggtgttcgcgcagtccgcacggctttttgtgtcgcgggagatatctccgattttttaactgcccaaactgttggcattattacaacttttattcgcctaaaaggcgattgaccgggaggagtgtttgatttgcgcggcattcaccaattcgtcagcacttcagagaaagaaggagcaattaagtaagcataaattctgaactactgtacagtcgccggatttaagacaagggaagcgaaaagagggcaacacttgaagcacatggcagaaacacagaataaattgggtttgtctgaaaatagcatagtgcaactgctgctataacagacatgtgttatgtattcaaaaaaacattcgaaatagaagtatagaattatagaatgatgtgccatgttgtagatgagaaccacgaaagcagacgaaaaacaaaaagcaggagaaaaaaacggctttagcgaaccataaatagccgaagtgacaattaaaaccgaaaccttttcataaaaaccgaaaaattcgacagtcaaaaaaaaaaaaacgggacacgcgtgcattttcgacgtcaacgtaaaacgaacacgttgcacctgtcccgttatttgcattacggctttctacatttttttggctgatatgtggatatttgtggatatatttggatgatttgttttcgggcattttataaagaatacgtttttcctgagtcatgaatggaatataaacatttcctcggttgcccgcgctttccattgcagtttgatgttagtgcttttatacatgtgctatagttcaatggctgcgaataggtttctccccaatttgacttgctgatgctccacgtttcttgctaaatttcaatacgtaatttacctgtaattgagcacttagccaagggaaagttcgcccgatgccagcgaaacaaatataataaaaaacaaaacgaaattaactgttagcagagcacgcataaaagaaaaaataaaatggattactatcatagctgtctgcacacacacgtcaatgcaactgccccacccacactgaactgctgcacccacgcccacacacttttagaccgattcgaactgagtcatcaaggacatggccgaaaggagctcgggccaaaatgggatgggtgcactgagagaaatgtgcatccaaaatctaccttgtgcttgaaatcgctctgttgcttttaaatctattgatgaagtaaactaacttctatacactttgaattcgttaatcttagatctatctatctatctttggcattgaacgtttaatactatttatgacaattattatttcgcactgtatgtgtatctcatcacttttgccgactgaggtgcgcctgtttttggccatatctttacgatgtaaccatttcctcgctttacgcgctcgttttctgtttgtgttattgattttgttgctattgtcgctgttggtaattagcataacagaaatttacaagctaaagtcaaagacgcagtaaaactgtgacgtcagaggctgggagtccaagggagaggcaagtgtcaaacaaagtgaaaaagagaaaggtgctaggcagaaagagaggggcgcacgtgggtgcaacatgttgattgcgtgggcggccttcgggccatttggcatattccaagaataaatctgatttacatatcttacgattttgggattatgaatattaagtacggattttaagccaacgattttaaagtggaattgaaattgtatcatagaaacgggcattcagatatagtaggtttataccttatatatttattcaaaatatatatatatattatatattatattattattcaaaaacctatctttatttctttttactgttctggctgtcaatcggcttcgctaatttgcacacatgtgccacttgcgcaattttccaccagaagcagacattacacttgaccgccttccttcccttcatttgccacaactgacccgacagaaactaattatttttagacgcaactaatttccgtaacacctgagttcgtttctgttatcatgttgccatttttgccttcttaaatcgattggaccattgaacggcagctcaataaacactgttccacataaagtgtcgaagaaaacaattaccaaaaatacagtccaataaaacgaagttcatattcgtatcgtcgcacattatctaaaacgataatgtgacctttgtggcggcttgcttgggtttttttttatcaggattgacattatgcaacaaccgcatgcaaactctccaattgcgggtaattattttaaacaccttgaacaacagggaaaattgcatttatctctgtagataggacaaaacaacagatagttactaccatttcattttttttttttttttttttttttgacgcgtgtctcaattttgataaggagactttttagaaacctattgggagctgtatttaatcagcagtttcccccgttcatatgcacatggaggctataacctttttctaatgacgtaaatgtcaaacagatctgaaatctttgacgttcgaaaacagctgcttaaatatttttagagatttcaaaattgatgaagagaatttaccaaacaaaaattacataaaaagaattgttgagtttttgaaacaatttcgaaatatgtcactccacttcacttacatttccggtagttatatcagctttttcgctttttccatgaatcatgttccactatcaacaaaaattctttaaaaaccgcagaatgtgagacaattgctgaactcgcaacatgattcccccaaagtgaacacctatgtataagaaggggaaaccaaacaccgtttcgatgataactcactagataaggagtgtcaacataacgattccaaaacaaacaaaaagcaaatgcaatccattcgcacaaaacagaaacgttcggctgatgaaatgctaaaaaagctttgcagcatgaagcgctgggataaatataaaccgattcttctaagaataaaagtattgtatgatgcttactcagaatattccaaggaatgtcggaataatctcatattgggttatgaccagaccagaactcacaacatttaagggctataaccatataattttgagcaattgtaagtgtaaaatcccaaataagaagactttactcggttgagtttttgtaagaaactgattttatttggaaatatcttcggtttaaataggtgacatgagaatcgcatcttaaagtaaatggcctacgcagaggcctaagtaaatagtccccgccttatcgaggtcccacgctcgggcacatctgcctatcttgagcggcgaggaccttatctgtggtctcccactaagggactattttaggaggcggggaacgatctcaagtgactgactcatgtagtgtgcacttaaattacatgtttttgagcaatgcacccatgtcgccttagataacaaaatcctaaatataatttatcgctctcgattcatttacataagatatgaacggagcccaaaattgtaagtctttaaatatattcgtgttcatgtgtgaacagtaaggttaatttgaagttcatacgtctggtacgagtatcttaaaaaattataaatataaatgcacagcaacgaaggcgaaacacgtggttttcacttatggccgaggggctcgaccgggtggttttttgctatatatgtatctatgtatgtatattagtcgggatgctgctgaatatagcagagaattgaattgagagtttaagagaaacgcagaatataaagagttcatttttatgccagatgttcatgtgcttgtattgcagcaacagcgtttttcaaaaaaaaaaaaaaaattcccacgcttgaatgccgcaaacaggattctttgttttcatacagcattactttcccgagattcctgaaataatttgcatttccaatactcaaggttctgatttggtttttagagatttgtcacgtttggcaggcagatgataattggctaagataaaatatatagtaaatcattcaaaaacaaaaatatattatctcaaagatgtgcgacttaacaaagtggcgatttgtgtggctggcggtagaaaccatgaaacatttgttaaattaattagagtatttttcatacttgataaactggtaaaactatcctatgataagctgaactacggattttgttgttgctacaatagtaataatttgatatatatacacttttgtgacatgtttatcgcttttgcaggataagtgatagtatcaatacaaaggtcaacgaacttttgatcgtgtaaattttaaactacaaagtagaggaaagagggaaatcccgcgcacatctgacaaattgaaatgatgcaatcgatttatttttcggccaatttcactggtttgtaattgctcccaatggcgaatcggtttgtatatcttgtggttcgattttagccaagtcatgctagttgctcacgcaaccgaaataaatgataatgccgagcaactatatatatgtatatatatgaataggtgtagtatatcttccgataaatcggatgaaccagtttgcactggtttttcggggcgaaaatagtgcaaaaggtatgtatgtatgataagagcaaatatttggcatgacaaacgccaagcacctacaactaaaaatatagaagcagtaaaacaaaaccaaaactaaaacaaaacactaccaaatgtgtgccaagttttattcttttttttttttttctgttctttactgggtgaaggctttttactcgtgtctgtgttgccaaaatattgtgtgtgcctcacgcagttattgtgatctcaataaatttagttcattcattgagcgatgataatgctgaccgatgttgtgatcctatatcttatcgtggccattgagtgctatgtgcgtgatttcgctatgacgctttgagtagataacgtatgatatggcaccgattccaattgtcattgcctttggcttagggctttggctttggccaacttccatcgcttgtaaatggctgtaaaaagtcaactatagctttgcttggagttgattttgctttgccaaatggatatgttgttcgtgctcttcagagggcttatctccggcattccccggatccccgagaacagaggtcaggcgaagtcaagtgggggtcgttcaaccttgttgcgaaatacgtcgaataagcggcgaaacatggccaaaacaaactaacaaaataacatatttatatatatgtatatatcttgtatatatgtacaagatattcgaaactgtctacgcagcgtctgagtgctgaaaattgatatgcaaagttggaaagaaaagaataaatatatcatttgtcattcggtgcaaaagacgaacctcgatttgggttcttaaaagcgcacaacgccctagataatttatttggcggccagtccaaagtttgaaaagccacccactgagctcacatactcgacactctatttactgtgtgaaatatggcacatgtgactgggatttaagggattaataatagaacggggacacaaaaggccgaaacgcaaaaggaaaaaccaattaaccgaaatatgtgcacaatacttgcggcatccaagcgactaaaaataaaactcattagaggaggttttaaatgaacccaaattatgttcaatttgcatacaaatggccaaaaatgtcttcgcctttttgaaacgaatttaattgcatcaattgtgaggagagtcgtctgaaaattgaaagtgagtcgcacaaaacaattagttggcaattgaacttttgcatattggaataaatatttcagtcagaaatcgcagacaattaaatcaaatcaacagatgcattctgttcgtttactcaatcatgaatggaattctattagttttgctttggaagaatacagtttgtgaaattgaaatcgtctggccgccacaatgccaatttaaattcattattaaatcaatggagacatgcttgtcttacacactactaaatttgatcacaagtggtgatcaattggcaattaatgtgattttgatactaataatattttcccgtccgatctcgttgcagtttctacactgagggaaagaagaagtagctctcaaaatggttaacatagtggtaagtgcgaaatgcttagatatcccattgagcaattacctatactcattgttgaaactcttcatgggaccttttaggacagcgggtcgaagcatgcgccccaggaaatggagcaattcctgcccggcgaaggaaaagtcatgtgagtatctcatccggtcaattggctaaaaatatgtcgcccaaattgccggcatggcatgtttgccaattaagtgtacgagtagattaagtgtatctatgtcgctaattggcctttgatgtggcaaagtctcttaattgaaactaaaaaaaaaacgctttgtaagagtttaaagccaggcacttcgacacgagcagctcagattgattacaattatcagttagcttgagagatttgaaaacattagacgtctagtctaacacgagggcagcaatgatagccgggtttggttgcccacatagataaacgtataatcaagcaggctcctgccttctaataagcgcaaatcacgtaagcctctctcaaggcccaatgtaaatagcgatcgtatagaacgcaattgaagcaaatcaatcccaaagccacttacgtactacttactactactactgactacactactagttcaaagtgcgttctcaaaaaatatttatacatcaaaatatttatgcatccgcatctgctgacgttggtaaaatatcgaatttcctgatctgccctcagatgtaaattgtattgttgccaatgcaaatgcgcaaaacaagttcaaacgaatggaaaagtcgtgaaataaattgacaaattttacgacaatatgaggctttgcacacgtgagaattcatatgcatattatgaacaaaaagaaagatgactttcaatgctcttatgcactttgaaccaagtaatgaaacctcgtacctattaaaaaaaaatatttcaacgatttttgctcttggcattaaaaaacttattttgatgacgctgcgataattaaaaattgaaaaatatgtgataacctgcgcgttgctcttgaactgataggaattgaattgatggaaaaataatcgcacaatttaaatataattccatatatattccatatacttaggattatatttccggaaatcttatttgaaaaaggggtttcaaatatcagcaattacgagtgtgccatttgaatgatttacatccggtacttgtagccattcacaattaaaactaactaaaacgattgctttaaattatagcttatctaaaaattttctttcatatgacttgcgattctgtttatttaaaacttaaaattccaaatttatgtgacgttgaagtagttagaagttagacaaaaactattttaaaaaactttaacatgtctaaatatattgacaaacgcaaaaatcgagctttataaaatatgaagttaattctcatggtcttcaaaatccatagcatagcttgaggtgcttttgaaaccgggaatgcataaacatttcgagcataaagccaggctgaagtcacatctattgtgtttcttttatggctgatgcaactggattggcaatccgagtcagtcactctggaatggatcggagtccatagattccgtcaattggccagaccaggccaatcagaaacggcctgaccaaatttagcagcagttttttctttccattttacccgatcgacattaagttacaagtgtagtattttgagccgacggtggcacgacaagtgtaattgcagatgcagcaattccgtggcaagagaatttcactgtcagcatataagaaaccgcttcgattccgtggcgagtttcagttgtgtacagacgatcgcaacaatcagcatgaaaatgagcgacttagaacccacaaatgtggaattgaggtgaccatctacagaggatggggctccaaataagagctatgccttactaatacgtttatttcttttgacctctcttacataggtacaaaatccaaccccgaaagtcggataccgagcaggccttggctggaaatgactttgatcctttcgcattgcgggacaatccgcatccaacaacgtaagtggcattgtgttcaatgatttttgaattcaacattaatgagtacatggttattcccttgcagcgataatgaaactctcacgcatttgcttaaggcctccttgggaaccggtatcctgggcatgccatttgccttcatgtgctccggtctcatcatgggaatcttctccaccattttcaccgcctttatatgcacgcactgcagttacgtgttggtacgtattatacaaaaaataactctaataacaatgtattgaatattttttttaaactactaataggtaaaatgcggacacaagttgtactacagaactcgccgcaccaagatgacctttgccgaaattgccgaggctgccttccaaaaaggaccaaaatggtgccgtggcttcgcgccagtggccaagttctccatcctgtttggtctgttcctgacgtactttggcacctgctcggtgtacacggttattgtggcctcgaactttgagcagttgatttcctattggacgggaacggcagtgtcgctgcgcatgctcatttgcataatgctggtgccgttgatcctcatcgcctgggtgccaaatctcaagtacctggcacccgtgtcgatggtggccaatgttttcatgggcctgggactgggcattacgttctactatctggtccaggatctgccaccagtggaggagcgcgagtccgttgtttggagcacactgccgcagttcttctcgatcaccatctttgcaatggaggcaatcggtgtggttatgccgctggagaacaacatgaagacgccacagagtttcctcggaatctgcggtgtgctcagccagggcatgtcgggcgtgacccttatttatatgctgctgggattccttggatatctgcgttacggttccgccaccggtgagagcatcaccctgaatctgcccatcgaggagtggcccgcccagacggtgaaggtgctcatttccctggccgtatattgcacatttggactgcagttctttgtgtgcctggagatcatctgggatggcattaaggagaagtgcaagaagcgcccgacattggtcaactatgtgctgcgcacagtcctggtgaccgctgccgttgttctggccgtggctgttcctacaattggcccatttatgggtctcatcggtgccttctgcttctccattctgggattgatcttcccggtaagtcaaagacagcactagttcgtttgtgtcaacaattaactatatattttttcgatttctaggtggtcattgagttgattgtccattgggagagtggctttggtaaatacaactggatcctgtggaagaacgcaatcatcacgttgtgcggcattggcgctcttgttttcggcacccaggcagccatcaaggatattgtgaaagcctacagtaataatgaaaacgtcggagaatagatacttcaccatttaggagagaggctccgctttctagataaaatctaactattgttagatataaaactgcgcccacattttgtacattttgtctgttgcttagtgtgtctgttttgagaaccgaaagggaattaactagggatttctacaatatatgtatgtagcacactaccgagcaccattatgccgttttagcacgttttagtacactcgcgattatataatgtagagagtaagctagttgatagccgttcagaaacacttttagaacagttctgaacgattcaagcggcattcaaactggaactttactaagtgcactttaatagtttcctattgatttcctattaataccatttagtatggatctgtaagaggcttagttacgtaccatcctccaaaaatccccaccctttcctctctgttctaaaatagtattactcctaaagcaaaaaaaaaaaaccaaaactaatgttatcatgcctttcccacttttactttgttccgtggcaaattcgcgtgatttgcgtacattatttaacattttagcatgtttagtaagtaagcgtaagaattaggattgtaaagcctattttgcaatcgatcagttccaaatatgttgagctaaattactcagagaatacatttttttatacgaaatctagccgagtaataagttacattgaattgccccgatattcactatgtgtaaacatacttattttgttgcatacatatttttgtattttaattatagctattaaagagaaatacttagcgaaactatcaagtaaataaaacaagaaacacaagttgaaacattttattttgcatttaaaagtctgtgcagacaacgaagcagatttacttgtaaaatgatgaaaagttcgagccgcagaattatctgtcatctgtatgtaaatatgtatattgatatatgaacgcaacgagtactaagtatatctgcccagaaaagtatttagagttgtccatattacatattcagaagaacaaagattgatatgaatgtttacttttttgaaaaatgtttaaagtgtaaaccaagcaaagatataaaatatatacaccgaaataaaaagatataagagaatgtcaactgaataaatgcattaatattttactgatttcgaaatgggtaaaatcaattaagtaacttattgtttaattttcaatttcttactgacatgaccctgaacttcctttgccatttctggcctgcgggttcaacgcgtggcacttgctcagatcatttcggaataaccattcgctgaatggccaaaaacctgatcgagcaacttcaattaccaagtgtgcatagtcatttgttaattggtaacaagtgcacagtggacaaggcgtc

SEQ ID NO: 6449 - DNA, 2007 bp, DROSOPHILA
cgcagtccgcacggctttttgtgtcgcgggagatatctccgattttttaactgcccaaactgttggcattattacaacttttattcgcctaaaaggcgattgaccgggaggagtgtttgatttgcgcggcattcaccaattcgtcagcacttcagagaaagaaggagcaattaatttctacactgagggaaagaagaagtagctctcaaaatggttaacatagtggacagcgggtcgaagcatgcgccccaggaaatggagcaattcctgcccggcgaaggaaaagtcatgtacaaaatccaaccccgaaagtcggataccgagcaggccttggctggaaatgactttgatcctttcgcattgcgggacaatccgcatccaacaaccgataatgaaactctcacgcatttgcttaaggcctccttgggaaccggtatcctgggcatgccatttgccttcatgtgctccggtctcatcatgggaatcttctccaccattttcaccgcctttatatgcacgcactgcagttacgtgttggtaaaatgcggacacaagttgtactacagaactcgccgcaccaagatgacctttgccgaaattgccgaggctgccttccaaaaaggaccaaaatggtgccgtggcttcgcgccagtggccaagttctccatcctgtttggtctgttcctgacgtactttggcacctgctcggtgtacacggttattgtggcctcgaactttgagcagttgatttcctattggacgggaacggcagtgtcgctgcgcatgctcatttgcataatgctggtgccgttgatcctcatcgcctgggtgccaaatctcaagtacctggcacccgtgtcgatggtggccaatgttttcatgggcctgggactgggcattacgttctactatctggtccaggatctgccaccagtggaggagcgcgagtccgttgtttggagcacactgccgcagttcttctcgatcaccatctttgcaatggaggcaatcggtgtggttatgccgctggagaacaacatgaagacgccacagagtttcctcggaatctgcggtgtgctcagccagggcatgtcgggcgtgacccttatttatatgctgctgggattccttggatatctgcgttacggttccgccaccggtgagagcatcaccctgaatctgcccatcgaggagtggcccgcccagacggtgaaggtgctcatttccctggccgtatattgcacatttggactgcagttctttgtgtgcctggagatcatctgggatggcattaaggagaagtgcaagaagcgcccgacattggtcaactatgtgctgcgcacagtcctggtgaccgctgccgttgttctggccgtggctgttcctacaattggcccatttatgggtctcatcggtgccttctgcttctccattctgggattgatcttcccggtggtcattgagttgattgtccattgggagagtggctttggtaaatacaactggatcctgtggaagaacgcaatcatcacgttgtgcggcattggcgctcttgttttcggcacccaggcagccatcaaggatattgtgaaagcctacagtaataatgaaaacgtcggagaatagatacttcaccatttaggagagaggctccgctttctagataaaatctaactattgttagatataaaactgcgcccacattttgtacattttgtctgttgcttagtgtgtctgttttgagaaccgaaagggaattaactagggatttctacaatatatgtatgtagcacactaccgagcaccattatgccgttttagcacgttttagtacactcgcgattatataatgtagagagtaagctagttgatagccgttcagaaacacttttagaacagttctgaacgattcaagcggcattcaaactggaactttactaagtgcactttaatagtttcctattgatttcctattaataccatttagtatggatctgtaagaggctt

SEQ ID NO: 6450 - protein, 471 aa, DROSOPHILA
MVNIVDSGSKHAPQEMEQFLPGEGKVMYKIQPRKSDTEQALAGNDFDPFALRDNPHPTTDNETLTHLLKASLGTGILGMPFAFMCSGLIMGIFSTIFTAFICTHCSYVLVKCGHKLYYRTRRTKMTFAEIAEAAFQKGPKWCRGFAPVAKFSILFGLFLTYFGTCSVYTVIVASNFEQLISYWTGTAVSLRMLICIMLVPLILIAWVPNLKYLAPVSMVANVFMGLGLGITFYYLVQDLPPVEERESVVWSTLPQFFSITIFAMEAIGVVMPLENNMKTPQSFLGICGVLSQGMSGVTLIYMLLGFLGYLRYGSATGESITLNLPIEEWPAQTVKVLISLAVYCTFGLQFFVCLEIIWDGIKEKCKKRPTLVNYVLRTVLVTAAVVLAVAVPTIGPFMGLIGAFCFSILGLIFPVVIELIVHWESGFGKYNWILWKNAIITLCGIGALVFGTQAAIKDIVKAYSNNENVGE

SEQ ID NO: 6451 - DNA, 3758 bp, DROSOPHILA
aattaaatgcgaatacaaacaattaattcaattattttctatgaatatatgcttagcatcctaactttgaataaattgcatatattttgtgcttcgaaacccgtgaaacgttcatttttttttttttttttaccaatttcccttgattcgcgaattgtcacctttatggcacgtttattttcccaacttcagatccagcgaatgcgaaaagtaaatgaaagaagccaacacaatcaaatggcagcgtgctaatgagactctaaacaagctgcagggccattaacccatgtgccaccccgtgccgaaaaacgcatgccagcacgcttctcataacccttaacacttgctgcccggaaaaatgagcggagctgcaaaacaaacagcgaacaagtagcgtggcgtgcgatggcaataaaatctaagagcgtgattattttcaacaagccaaagaaaatatatatgtatatatatgtaaatgggtttgggttaaaaaataaacggatttaaaaagctttcattgcggactaattatgatttgtggcggctaaaggctaattgcaactaatttcgcttgcctccacaaaaccaaagaaaacaatacagaaaaacacaaaatcgaccgccaaagtaattaaatattttgaatttgaattcaaatgtgttagctatcgataacatgtgacattctcgctacgcagtgtgtacacaccaagtatacagttctaataagaacgtcccatgcgactggtgcttgcatcggctaaacaaaaaattgatgcaccatttatcgatggaaaacaaaagcaaataaaatactcaacaatagtatttaaaataaaaagaatagaagaaactttagatcaattttttagtactctaaccgtgggcagcagtataaccgttgctcgataaccattgaacaccagccagtgtgaccgtaggtgcgcagatggacgtgcaaccaatacttatttattaacttgttttaaggcgatttaccgtggatttcacaggcagcgggcatcatgggcgacgtggacaagtggatagaagacgtgaagaaatgcaagtacctgccggagaacgagctgaagaagctatgcgagatggtctgcgatatcctcctggaggagacgaacatcctgcccgtgagcacgcccgtcaccgtttgcggtgacatccatggccaggtaagcggtcatctcctccgtcttcgtctcctacgtcattgcaatgtccactaacgcaatgccatcgcactccacccccaaattgcagttctacgacctggagcagctgttccgcactggaggccaggtgccgcataccaactacatattcatgggcgacttcgtggacaggggctactactcgctggagacattcaccagactgctcacgctgaaggcgcgctatcccagccggatcaccctgctgcgcggcaaccacgaaacgcggcagatcaccaaggtgtacggattctttgacgagtgcttcagcaagtacggcaatgccaatggctggaaatactgctgcaaggtcttcgatttgcttaccatcgctgccgtgagttgaactatgggatacttcatgtggacaacacccttttaatcatttacatatatgtttaccccactgcccctaatgtacacagatcatcgacgaggaggtgttgtgcgtgcacggtggcctgagtcccgagatcattacactggaccagatcaggacgatcgatcgcaacggcgagataccgtacaagggtgccttctgcgatctggtgtggtccgatcccgaggacatggagtactggggccagagtccgcgcggcgctggctggctgtttggccacaatgtgaccaaggactttatggcgatcaataatctgaacctcatatgccgagcacatcagctggtcaacgagggcatcaagtatatgtttgatggcaaactggtgaccgtgtggtcggcgccaaactattgctatcgctgcggcaacgttgccgccattcttagcttcgaaacggcggagaagcggcagacgaagatcttcctggctgttccggatgcggagcgtgtgatacccaagcagaacacaacgccctacttcctgtaaaacgttctgatgtgatgcgatgtgaagtgatgcaacgcaatactataccacataccataccacataccgatccaatacgatccgcccactgttccggcatcgtggctaataatcatatacgcttgtggagagcagagcggagtgcagccttcgactgactgatccgtttcatttgaccacccatgaactcaacgccttaaactcaaaacgtgcgcaacgagcaccccaagcatagcaaacactcagaacagcaaacacaagccacacacaccacacacacacctgtaacttgtaattttcgtctctttttttgtatggcaaaaacacatatctaattcttaagagcacagttaaaaaaaaactttgttattagtttccggcaagtccaaagagaggggaacacgtgaattgatttctttaagttgtatatccaagtattgtatttactgataacggatgctaatggaagcaagaagtatatagagattcactttgttattttgtattccaaacctacatatttatttctgtgaacaaacacaaaaatcatatactttgtacattttgtattagtaatgctttgaaggaaataagaataactaagaataacccaattgtgtgatcccgatcaaaacgatatgattaaaacaaaaaagacaattcgaaatgcgttgtccggtaatcagtgggaaaaaccaggtgtcccttattccgctcccaaaatgtccatcatccgtctctgtcgttttcgcgacacggctccgatattcaaagttccactgaaataatttcgattatgagtttcttacataaatatcatttatttcgtttcgttttcgttcatgaatcattctcattctcatgctttgcaacatctcaacaattgtgttttcatatatattggtttgctttgccccaacatttattctagcgtcccaactcaaaaacaaatatgtataagtactagactttctattaggggcgaaaaagaggtaaataagtgagtgactttcgcattctggggtcggtcatcatcatgtggcattcataattcctcgcaacttgcttttccatggcacctggccatgctcacagtgttttggatacttctctatttgtatatatatatacgcgtgcgtttccgggtcaacaattacaaaaaaaagaaaactaaataatcacactagcagagtagtgcatgttaggaattaaaagaattctcaacaacaacaacgatttgtttaaacgatagagaataaagaggttccaatcgattggctcatatcatgcattttcttacaaaaaaaataaaataaaagaggagagaaaaactgagagttgagcagcaaatacgtggtgcattaatgttgttgtagtcgtttgggtgtttgtcttcgcctgatttctatgatcatccacattctggttagtgttttgccccacggtcagccaacccactactgttccactactgcggcgatatatagttgtgctcgaagatgtccagctcgttctgtatgtagttggccttgttgcgaagcagcttcaattgcttctggttcgcctccaggatgttcagctgcgagtccagcgtcttgagctcatcattcatgtccgtggtggcggtatcaaccgtgcggcacaa

SEQ ID NO: 6452 - DNA, 1582 bp, DROSOPHILA
gtggatttcacaggcagcgggcatcatgggcgacgtggacaagtggatagaagacgtgaagaaatgcaagtacctgccggagaacgagctgaagaagctatgcgagatggtctgcgatatcctcctggaggagacgaacatcctgcccgtgagcacgcccgtcaccgtttgcggtgacatccatggccagttctacgacctggagcagctgttccgcactggaggccaggtgccgcataccaactacatattcatgggcgacttcgtggacaggggctactactcgctggagacattcaccagactgctcacgctgaaggcgcgctatcccagccggatcaccctgctgcgcggcaaccacgaaacgcggcagatcaccaaggtgtacggattctttgacgagtgcttcagcaagtacggcaatgccaatggctggaaatactgctgcaaggtcttcgatttgcttaccatcgctgccatcatcgacgaggaggtgttgtgcgtgcacggtggcctgagtcccgagatcattacactggaccagatcaggacgatcgatcgcaacggcgagataccgtacaagggtgccttctgcgatctggtgtggtccgatcccgaggacatggagtactggggccagagtccgcgcggcgctggctggctgtttggccacaatgtgaccaaggactttatggcgatcaataatctgaacctcatatgccgagcacatcagctggtcaacgagggcatcaagtatatgtttgatggcaaactggtgaccgtgtggtcggcgccaaactattgctatcgctgcggcaacgttgccgccattcttagcttcgaaacggcggagaagcggcagacgaagatcttcctggctgttccggatgcggagcgtgtgatacccaagcagaacacaacgccctacttcctgtaaaacgttctgatgtgatgcgatgtgaagtgatgcaacgcaatactataccacataccataccacataccgatccaatacgatccgcccactgttccggcatcgtggctaataatcatatacgcttgtggagagcagagcggagtgcagccttcgactgactgatccgtttcatttgaccacccatgaactcaacgccttaaactcaaaacgtgcgcaacgagcaccccaagcatagcaaacactcagaacagcaaacacaagccacacacaccacacacacacctgtaacttgtaattttcgtctctttttttgtatggcaaaaacacatatctaattcttaagagcacagttaaaaaaaaactttgttattagtttccggcaagtccaaagagaggggaacacgtgaattgatttctttaagttgtatatccaagtattgtatttactgataacggatgctaatggaagcaagaagtatatagagattcactttgttattttgtattccaaacctacatatttatttctgtgaacaaacacaaaaatcatatactttgtacattttgtattagtaatgctttgaaggaaataagaataactaagaataacccaattgtgtgatcccgatcaaaacgatatgatta

SEQ ID NO: 6453 - protein, 303 aa, DROSOPHILA
MGDVDKWIEDVKKCKYLPENELKKLCEMVCDILLEETNILPVSTPVTVCGDIHGQFYDLEQLFRTGGQVPHTNYIFMGDFVDRGYYSLETFTRLLTLKARYPSRITLLRGNHETRQITKVYGFFDECFSKYGNANGWKYCCKVFDLLTIAAIIDEEVLCVHGGLSPEIITLDQIRTIDRNGEIPYKGAFCDLVWSDPEDMEYWGQSPRGAGWLFGHNVTKDFMAINNLNLICRAHQLVNEGIKYMFDGKLVTVWSAPNYCYRCGNVAAILSFETAEKRQTKIFLAVPDAERVIPKQNTTPYFL

SEQ ID NO: 6454 - DNA, 28360 bp, DROSOPHILA
gaacaattgtttgattgcattttcattgagagatctaacaacgactatttggataaatactccccatatttaaaacacagttgcacgtgtaataaatacatgtaaatatttttcgtatttctatatatgtatgtatgtacataactacaactaataaggtccctctccagtgtttagttatttgaatgcacttgcatttgcactttcttatctaatgtagcataaaaaaggcatccactttctacaaaataaaacgaatttgggctgtgtgtaaataaatattaataaatggtttcgtattttatttccaagttgccgtaaaaggagatggggtgacggaataccaaatgaaaataagattgaaaactataaataaagtaacttatccgctacgtagcttacttgttaataactagctgtaactagactgtttaatagttggttttagtttagggtttataaaaatatagattccatgctctcgaaaacgttgtacaactttacaaattattctaccagctcgcgcgggatttatagagtaatggtttgtgggaaattatgctgtatagttgtgtttgttttgatgttgcctcctataaatgtttagtatcacacacgtccaagtttagtttttattcgtttcggtttccgcggggaattgccgaatttcaaattgttttccatcttttccatcgttttgtactaaagcaaaaagtttctcgtttgcattaaaatgcgtttgggtttcagttcattagaagattgagatagttcctagtcgggtcgtagatatagtacactgtagcttaggctaatgcggatgcggatgcggacgaaagttggtccgggctgtggtggccgtggcccaattggctttcggaaagcaacaacaacccggctaagctcataactgtgcagctaattgcggttgattaacacacactagggttagacacttaatacgcgctacaggctaattggatgacagctccacaagggcttagagcttcctggtgggctccaccttctgggacatggcggtgagtacccgctggttgtcgatgacgcggaagctgctgatgtacgacctcacctcgccctcgctcttcggggacggcggctctagtcctgttccaaatcgaaatcgatgagcaaattaattttcaaagggggtttattggtcttacccagactcctggagcgacaaaagcggatggtgcgcatcgtctgggccatcatgtgcatcttctcgaagttcaccaggccgtccaggctggtcttgttgccctcatgggcgaaggtcatgtccttgagcaggagcggcatgaagggaatcaacggcggctgcagcttgcccacgaacactcggtacgccctgtggttgcgactggggtcgatcagggcctcgaactcctggaagatcttcctgaacttcgacggaatcttttcccaggtctgttgcagcctggacaccgccatgttggacagacccattaccacagcgaagaaggcgtttaggttctggtactccttgcagctgtaacgagataaagaagctagcttactactctgtctttggctggaatgggtgtttctctaagcctaaaagtggtgatagtgtaataagaatatgtattcagcatttaattaatactatggtactaatttattctaataggagcctatagtgggtctagatctatagtagttaagatcatgattttttgtcttcaatatacaaatatgcttccaaagaaatatactccaattttatgttcatggtagctcactacgcagtttaattaatatctacaacttactacgcggccagcttgatgaacttccggaccagaccgacgcgtttgctcagactgggagtggacaccagttcggtgacaatccagtactgcacctcgttgaatcggcgcaggaacacatccaagttggcagtgatctgcgggtggaagtgtgaaattcagtcagcatgaaagttgtgtattctaaacgtatgtccccttagctttgggccatctttaataagttcgactggtaaaactctgggctaactcaatttgcaagcagatgacaaatggctgcattttgcggtcagagcctggcaggataattacccaaacgagacttctgagacttttcggcaaagtttgccttcctaccttgccaaagtgatgccgcccgaaggtgtggtagagcaattcgtattcatggacggcccagaagaggtcccactcgaacagggtgatgtggtaggccagctccttggtgctcagtatctccaggtcgatgtccacaccctcggtggggcactcctgctcctgcagttgggtctgcggaatgagcaagtataaaaaatggtcatccaacatccaagttggtcagcgcttaccaaggcatccaggtggtccttgacggagacgaaaaggcggccgttgagcgacagacccgtgggtatgctgacatcgttgtccttgaacacggaccgctccccgtttgacttgacctcgacgaggacgagatcttcgggaccccgatttagctgcagcttgtcggcggcacacgctttgatgagctccgccgtggtgtgcatggggaatcgcagggtacagtaggtgtggtcggcgcagtaaacgcggaagatgacttaaaaagcagagttgagtttacgataagtgatactagtgtattaaatcactattgaatgaacacctactatcatcatctggtcggatgaccgtctttgaaggcgtcgcattgccactgaaaaggcagatgggctggccgttgggcgggagcttccacttctggccggcgttctggttgcggtcctcctggtagcgcgccatctgggtgagcacgttgtgcactatgctggtctcctcgttcaggtcgggatcggcctccacctcggcggcgaggtcctcgataaagtcgcacacgctgggctcctcgaaggccgcgtggcggacggccatgacccacttttgcatgaactggatcacgcgcttcttaaagttgattatatactcccgatcctcgggcgtttgggcgtcctcatgggcatcgcagtggaaggtgcacggcggttaaggcggaaaccaatttcttttgtgattgtgaatcgtatttagaatgggatttgctgggttatgaaaatctgtccggcgcaacttcttactcgctaccttacagggtcagtcagtcccaaattgggcttcccatcttgggaatctggttattgatttcttccaaccttattgctccgccctgcctgcttattaaactcatcacgtatttcgatgcagattgtgagattagtttcaggcatcattgaccagagctctccaccccccccccccccccaccgtgcccgcggacctctggcaaccatccaacatccaccttcacccccattgaagcaccccgaaaatgctgacccaagtcatctttgcggctttgtttcaactgaagttggaagcggaagtgttgcttgttagcattttctgctacactcgagcccaaaagccacccgaaagtccaggccacccgcacccactcccgctggtcgggatcggggtcatgtgtggaggcttgcgtgctggcggcacttaaactgtcgctgtggaaatgttttgaattcccacccaggagaacgtgactcgggcgcgagatggacgacatgaagagtgcgtttttgcagtttaagtgcagcctgactgtcgaggacctagctaaacggaccttggaaacgctaggcttcctacatggggatttaaagagcttcaaggcggggattaagctggaattgaaagggggaaaacctaaaaggcttacggaatttttttggtgatttttgttgttttaaaaaggatattaattggccaattcatcaaccagctgaacgacgggcatgaaaacgatgtgtgtgagcaggaagtcgtccaagaacggatccattccacccacggactggcccagtcgcgtctccagcaggtgctccagcatcttggccggagttcccgacatcaccgtatatctgtgggataagatattcaaatgtatctagattttaaggcaaaaaggccaggtatctgggtttagaagttaaatgctgctttaactaagggtgctaaatgggatgtattttcttcaaccgaagatgccagaagggagaaacaaagcctacattctgtcacacaaccgtaacccatcaaatcaaattcctacttccatttaaatttgaaggcacattaaaaattgattagacactcacttaaatgccgaatgctgtccacgttgcttagccacgcgctcgagcactaaaacatccttgccgtgctcctgcaatctcagagtattggcctccacatcgcgcagtatccggttgaagtgttccttgtccacgcgcagcaagtggcaattgttctccttcagtacgatggtagcagctctgcgggaagaaggtcggggaattagatgtctcaaggatctacctatgggatggatgtgtttcgaggaatgtttgaacagcagtcttgtgacttcgtcctggttagccacacattcatatggtgaaaacgcgtaaatagccataaatgtgaggcagccctcgtgcacttgatggtttgccaaccccccgcagagtcggaaatattttaaattggatttcagcggcagatgcacatgcagttggcaaataaactcaattgatatatgcagaattattgccggtatgctgatacgagcgacgtggatggaagcgcgatttattatatttgttgaaggcaaacaagctctttgactattttaattaacacaaaagccgagtgggagcttaaactagttatcctttcattggagcattaaaaacggaagtgcacgcatacggactaataagcctgcagacaaacggatcctgacagttggatttcctctgctcagctggggagctccccacccatgaacacaatggaaacgaattccattctttggcaactctttgatagtttctgcctttgccatccgctcaagcgtcggctggcgaaatggcttacaaattggacgggggccttggccgatactttgtttctatttgaattgtttgccttaaaatcgcacacaatgccgcttgttgtctgtcgctgttgcggaggagcttgtggccagttatctcgaccgttgcaccaagtgggctgtggtataacttgtttggcccattgtggctatgcggccattgtccgttgagctgtcagccaggaggaggaggtgggaaccacagaagggttcagcatgaagggttttggtttctcacaacttttggccggagagacggaccagccagttaacaattgctcaatggaatcgtcgcaattggtgcgccatcactcacctgggtgcgtcgtttatcaaggccagtttcccgaaatcatccccagtcttcagagtggcaacagttcccttgccgtgtatcacaacgtctaccgatcccttgagtaagatgtaccaggagcgtccttcgtcgccttgattgaatactgttaatgggttaagagtgttaagggataagactcgttgttagtacttatagctgcgtcggtgtgggttggctgacccattattgagccataattagccggggcttaattaaaaagttttccaacttctcccttccctcccttttccaccctttctccgctttggagaatctcaactgcgccgcctgggagctattaatcctgcggccggatactcacatattgttcccgcctgggcatgagcctcgaacacgaaaatcgacgacagttcccgctttatgctggtcgacaagtgggagagtgcggcaatgtggaccagttcctcgaagaccagctccagctcctccgatgtccgttcgtgagaactgcgaattaaggaatataagaaatgaagggatcttaatcgaatttacaggtgagaattcattatgcggacgcagtgcaatgtcctttttatatatatttatatttgagtatcggacccaactaatggcagtaaaagactcatacctatgctaatattaaaatattttagatttattatctaaagtatctatctttcattactctgccaatgcaatatcattgaagtatctttgtagtaagttcaaagaattaaaattgtaacaactgtcttgaatacgagaatgtgtgagtatgggaatgtatcgttggtaaggacttaatttgtgttaattggttcaccgcgttgtttcaatagttctgacgtctgtgtgcggaagtaattatgcgtcacaagtaaattatccatattgcaaacgtccgtgggaaacggacgtaaattactcattgaattatagtatattgcacggttttttattacttttataggaatgttagtatatacattaaatgctttattttttaaccctaaaacctattcccattaaagccgccgtacttacggtttgcgcaatatcatacgcagtgtggcgtccggtccgcgctggaagagtgcgctgagcgcctcgcggatgtgctcgttggccgctccgaggtcctccgcctggggcacgcccgctgccgccgtgccgccctcctcgtcgatgcgaaagcggtagaggaagcacttgtccttgaagggctgctctttgttgactgcggaacggcaccgattagggaattgagcgcgtggagtctgatggaacttaccgtgtgcgagtactccttcctcgaggagcgcttgccacatgccagccgcctgggctcgggtgtggacgatgggcgagaggttgaccagccagtcgacgagctcggtgccgggggcgcacttacggattagcttgccggagacctattcaggtggcatgattagcatcccaatgatgacacctcccactccggcactccgggcacactcaccttgcgatccttcagacagctcgagttgtcggcgacgagtagtgtgcgtagggcccagcccatgcggttcatagcaggactcggtgtctggaaatgtcaaactctttcaacttccgttctcgaaagtccggagcgagtgtcaaaggcagaggaagtgtcccgaaaggagacccttccccgcgcgcccactcatggaaaccacataaatattttgtaattcccctgacggcctctggagcagcaaattaactcatttgtcgtcgtcaatgtcaggacattacatttgtgttatttatgcgagttccacggtgggactccgttggtttctttgtgcccttggctcttacctcggtgatgggcagcgctgggtttgggtggtcggggctgaggggtcgtttcgtgggcgatgtggctgcggctgtcgcttgtacgctcggtccaaaacctggagaggcagccatagttcaagttagtcagttaagttactttagtgttacgttcgatagctgagcacaggcagtttcaaaatgatgtgaatgccgcattaatgaaagttctcaaagccaattatcggattaatggagtgttgagcatgacgccagtataaaatatgtttttcaaataataacaaaagcagatactctccaaccattaatcaccgagtgcatttggagtgttagtcatgcgaaaactttgtgatagacttaattggatcttttgtctacataccgttcttcaacttgcagttggtgaatatgtcattcattaactccttgtttttctgcaatggaaagcgtaaatggccattagtattgggtgtttcagcctggttcagctctgcgattcccattacgttgctcatttcaaatgccgtcgactgcggacgcgtcatctgcccacgctccagctgcctacgccacttgacggcggcggaagtggcgccagttgcggccttggtggccttggaggcccctaatgtggcccccacctggtcatccccgccgctgtggcgtcggtagcgaagcagaaggacgccgggactccgctcactgccggccacgatctgcgtggaccagcgctgcctgccggctgccatgtggggaaacctttggcttcactttcacttgggagcggagttcaagctcgcaggtaattgctggcaaacgcttctccaggtactgatagcgtcaggaggcaacaatcacacgaacgccgcggctcgctgtttgcaattacttatcaggcacaagggttgtcaaagccccaacattgttcatgattcaaacaacatctttaacccaagaagtgacaacattctaggaaccttaaaggtcttataaaaactttttaattaagaaactttaaaaactttaaaagtttcccctagctcgcataattttaaattgatacatatttaagaaagtaaggatagcaaaattagttaaatatatactgataaagggtccatatatagtatgagcaattcagctggtctaaaagcgcaattacttaaaatctaattataaattgtaaaattatatggatgtaactgtaaaaaggatgtacatttcacaaaagtatatggtatgtactaaacttttactggtttcaacggtatctgacagtcgaggcgatcccttctgtctattaattaaacatgaaagtcaaatgttgtactctcgcttttttcgatttcccgcacttaacgagactcattagcttgaaatgggttaaaatcgaagccaagacgcaacctggcaacacttcgtgttccgcccgtcgataagcgacttacgctgcgttggcgtcgccgtcgaagctaattaaactcgcttgcttatcaaacgcacgccgaaatgaatgccacccactgggtggcgtagggctttcgaggagcggtgtagcaagagttccagatttccttcgccttgaaagtcggacgtggtaatagaaccgtgatgtttcctggtaaaggaaactttacattggcattgactgattaacggtccgaggtttcattaatatgtatcatattgagcaaactgagcaaactgtaggaaaggaagacctttattctaaataggagaagaattctcatcatgccaatgttcttattggtgaaattcagcaaagaattttgtttaactaaattttagtcggtaccactatctgagactaaagctatttgagctggagtgaatatttcttatcagcctaaatgcaaacaagtttttatgaggcgtggtacattgtcatttttaagtgtttttcggtgataaaattgatattctcgtaacttgtagtgcaagaggatgaaatatattggttggaaagcatgcaaaagaaaagaaacaaatgtgaatttacaaatacttatctaactgcaactggtttaaaaccagtgaatacactttcctgcttattgtttttgcttagcattgaattaagctcggcttaaagagtttcagtttttcaagggaaagagagcgaaaaatactttgttgttattaaattattaagacgatggcccatttatttcttttcacttccgcaacgcagtagagaaaatcacaaggagcttttgagcaagcaagcgaatgctttcctggtagacatttaggtttatactttccgttcaatggaacaaggaatccgaaccatctgcactaatagaaggaatttcttgtttctttccggcaacttaaccaaagggaaataacactgcagagtgctgcaggactttcgagaaaatcccaaggatttaccgagagtgtgttcattgagcagtgctcgaaacattgatgaaattaaaattgatcgacgcagcatgcacgttgatgactccagtgagtttgtgtccctcctcgctgaaggctttgaaatcctttggagatccagccctctcctcctcacgcaactggctcccttgcgggttcacatgtgcaacttgtgtttgtgcataaataaataacctcgtgaccatggacatgcaactgtgcatgccaaggggctctcaatggagccggctgcaatatttatggcctggttattacgcagaccacatgtttggcaatgccgtggttgcgacggcgggcagaacatataacacgcccggaattaaatgcaaatatttcgcaagcaagtggcattgaatcgcatcaatcgcattgagtgtgaaagtagcacattcggcggcaatctgggaatttactgcaagtggcaagtgtaatttccaccattgatgcaacttctgcatccgacctgagcacaaatcggaaccggctactcgcatttttccaatcccaatccctatcgcaatagcaatccctatcccgatgccaattccaatccgagtgaattgcttgtccggaataattggcagccattgaatggtaagtggctgtagtagctacttggactggtattcggatttgtgccccgggcttcggtgaaatgagactggtaattaacccgaaattccctttcacccgccacatgcgactacaatggctttcaaagacatttttaatttggtcctcacaagcaaatatttgcgcacaaatcaaatgctcgactatgctgcaaagtgggcgggacgagccaaggatgacaagttccatgaactcgatggcgtatatcccttgcgctcttgcgaatatttctcttattccccttcaatttgccccctgattttatcgcatttacgcagtgccattcgcagtggcaaaacgcccccagttcgaatttttatggtcttgcatccatagcatccacagcatccgccatcgactttcacttcattgttgcacactgcgtatacgtgacatgtggtggccctgctgtcgcagctactttgttatcgttcagttcagttcagttcagttcagttcagctcagctcaactgggctgcctctggggtaagccaatgctggcataatgttgcaaaatgctattcgccccgaattggggcttgctcccgctcctgctcctgctcatccttctaacaaataaggtaaacagacgaacctcactaattctggttgctcgcctgtgtgccgggctcatatcttttgtggctgccgcaggagatgacttggggtcctggctgaatggcattgttagtggggtttctgagtacaacacacacttttcacattgagatttgcattcggacactggcagaaagaaggtgtcgagttgttggggatactcgggatatcaggtcctcaaagcgatgtattttgtgtttggctggcatcctatggcttactatttatttctagagtatttccagcttccgtttcgctcagtgcacattttgccgattgtgtgtgtggtcctctcaaatatttacattttggcatatgtaagccatgttgtgtggttgactgtagtcaaaaagatgcttaaccacattccagccttgtggcatgccaaatgcaaatataattcattttccgttcaaaggcatttccatggaaattaggccaatcgaaccaatccgaataaccagctcggctcaccagcaagcctttccaattaattatccagcccccagagtcctgtcaatccagccaagtgcgcgggaacatgcgacgcggatacaatgatgcattgcaatgctaagctaagcccgccattaccttctaatgccattatccatatactcgtaagtaaaggcgaaacaaagaattacttagcccacgggggaacttggcttaatgccccactctgtggcaaagccagagcacttaacaaggccaagggcccaaattactagccatgtgttttaggacttaggccggggttcgttgggtaatatgtcctcgggcccaggcatcattaaatgttaattgaaattttaattaaatattttccacaatgacgaaggaataccgcaaatagtcgaggcccgcttctcgaatttctgcatatcattttggcaactcattaaaagaacagaagtgcgcgaaacagacggattgattcctttgacagaagtggaatgtgcaagaacaggggcgaaaatcgatttgcgtaacttactaccccaaacttacctcccagatgagtcgaaagtcctgctgctccacccgcagcagctcgcaggtggtcttcgtcactacggtgctgtcccgcggcaagtcatgcagtacggactccccgaatgtggcacccacgcccaggttgcacagagtaactgcgctctgaaaataaataagggcagaatataaagttagacagcgcccaggttggacttaaagtatgctagtttctgttccaggtactccccgaatggaaagagcttaaataatagtttacccaaggggaagagaagcaaccgacatttgcagctcagttttgatatttcagcgatgtagccacgtttctccataagcatttctagctcaaattaagaacttttattagcaaatacctcataatttattttgtagaaccatttagttgaaccattttagtagaacctaccctttttgtatacctaatactttatcaactgaatgattccacaacccagctaagaaacatattatgttaaaatctataaatggtattttgcaccaccactgcgaactcagccatgggagagtgagggtatccgcaagttggagttcgaaaatgcccacctagatacatctctgcagattaagcactctgtggcggcatggctgctccagtcttgggcttgtctttcgctggcatcttacccaattaacgcaaatggccgcaatttgctcgtggtggcagggacaaacatttgcttaaaactctgtaatcgcttcattgtcgcatttcccgcaaaaccacgggcactgaagcaccacagcgcccaaatgcaagccgggaaatggggccgaggaggaagtgcagcccacttcactgcttcggatgtaacgaacgcggattggagctgtctaaccgcaacattgcaatgacattttcaattacccagctgcgtttgcatcggactgtttgttttcccaccagacttctcggagttctgggccacacttcttgatgcttggcacttgaaggcccgagggcttcgcagacccatttctgtggtgaatccgagaacccgagaattggagaagcgaagaatccgagaacacgggaatcttggcccttccgtgtaattggcttaagaagacttgcgagcgaccgcagaaattgttaaactcacattagccgacacatgtgtgcacagttattacggcgcacggagaccataaaatacactttaattaattcccggtctgtgtaattacaaagctgctgctgtggcacctttcttttggccaacatcgcagccgcaagtctcactcactcgcttttctgctgatttattgcggcttttgttttttgacaagtgtcaaaaagagtctgccacgccccttcccgcttacaagctgaatttgattgctttctaatttattgcagcattaaaagttgacctacagacgcaaagggagagggagacggtggatggcggcagaaagagacggctacagacgagccgaaagagacggagcgctagtgaaaagctgccaacagaccgagttttgtcaaccagcatttcccttttcgcaatttcctcgagccggcgagaactgaattgaatttacgcccaaacaataatatttggaaagctgcccagctttgtgtgtttgccagttgggaaaaggctctgtgggcgtttgccttagcttaattttatttaacgtgcggaagattgagtttaatataacaagcttaaaacaacgctatattcattgtggtgtatatatttttgcagttatcaaggagagactggccaatagaacgatatgtaatatgaacttttgtgaaatccacactgaccatttgaaattgttatattgagaggagttgtaaatcgtatccaattttattttcaattcatagttgggtacatatttaaagcaaatctctgcactttctgcgttgcagtagccagaaaaacgattaccctgctgcagccaatttctcatgtgtgtcaatgccacgataactttggtcacggggcttaaatgctgttatcgaactatttggcttcccaacctaacttgattgcttttttaaactaaaagctttaaaaaagaggttatgttctggttaaagttgaaggtcgaaataacaaaactgccatcagaatgttttcatatcctctttttttttggatttttctattgatatttcaattgaaccgtaagattgttatactacgtgataatcaattctataaaatgaatacaacccaaaaaatattctccaaactgaaaaaattgtaaaaccatttttaattaagctttccagaacctagaatattgaggaaacaacccaaacttatttctaaatctgtatgttctatgtagcttgctattgctataatgatggctgaattacattgatgattcgttcatcatctcttctgggtccggattacactctcccaaggattctccactgacaccctgggtgatgtcaagggctgtgataataaaacgtttcggaaacactgctattgctgtggggaaaatacggttattgccgccagcttatatctacggatgatatggagtcagaaacacggctattgcccgctgttatcaacggatgggatggcttcggtatctatgttatagccgtgtgagagcacgtacatttttctcgtttcgtgttcgccactggatctttacataaatgcggggttgcaatgcaatgttttacctttgcataatgtcgcgttgattgctccacgttatacgtacaactgcgacgaaatagcattttccctccttgtctctcgtgacgccctctcgctcactcactcactcacggtgccactggaattcagtttgtggatttcggacactcggccagttgtgcatattcaaattgcgctgagcgacatttgaaaatatgagcagcccacaaaaacaacgaaaaatgcaacacgttacccggattaaatggaattgttgatgggtttgcttggtctgttgcccgctgctatttctgattgcaggttgtggacgtgcgctcacaatagtgacctcccactaactaggctaaaagcaagcacgcgctgccgaaaatattgccagcattccggacccacatgctccggacccacagctgccattgataaacgacgcggacgcgtgtcacttcgggcctcaattaggaactcttttagccggcttcccagccagtttcagtttcagattcagcactcgagacccgactccagttttcccaaccgcgcggcgacgactcgcaaagcgaactgaaatcgaagtagccgccaactgagcagcggctggatgtcagcggaaccggcagagactctgttgcatgtggccggctctttgtgcaacgtgatgttgcaagttgctcgagtgtggccaacagcaacagcaacacctgcaacatcagcagcagcagcaagctaggttggacggttaaattggaacgctctgtgcgatgacagctcaattgaccacatgtgtcaaataagtgactgccaaatattagctatctagaatggaatccgaaaatgggagtgatttatgtaacagggagtgacggaactactcttttcttacactcataggtcggaacttggaatgaacgttcaagggagttcaaaaataaataaactttcgttaaactttagcaaactaaacataagtgatacaaaggccattttaaattcggtgtgcagcagtgaggcagcgcctcacatcccgatacggtggcatggcagactttggtgacgcttggtgcatgcaattaatccgcgcaaaagttccgggcgcagaccgtggccatgtccatgggcatatccatgtcggcggacatgcccgtatccatgcccacagctaaggcaatagcgatagcgatagtggcggtgaaacctaagccctgtccctggccatgccacatgcacccacggcattgtttttggccaaatgtccagtatcccacgtccaagtcgactttttgttcactggcgcgcttgacaaactatttacgcacatatgagcacgcttccgtccgtcgcagttgcaattgctgctgcttctgctgttgctgcaacatttgatgccgctgcagttggtctcgcattgcagcactcgttccaattcagttgggcaaacaaggatgtggacttaactttgggcgatggcgatgcgtgcttcttgctttgatggtgctggggctaatggaatttcagatgagatgctgctggttgggaattgaaagttttcgggccaaacaaccttaaagttgcggctttaaacagtcgaaatgctttgtggcttgggttgaacaaccttgacacttttatttcagttatgctttatcttcatgtcggtggttttgcacttgttttttgtttagccgcacttgtttcttgcgggctagtaattaaatttagttcgccctcccacggcgaaggtagggccaagtgccaggccaagtcaaagatttctcgaaatgcttagaaaaaaccgagcgttgtatgctcaggcagcgtgtatccgccagatacaagtatcacatatttcattcagaaaaactatttgcttacggcattcgcgcggtttgaataaatcactgactacgttatttgtttaattaattatgataattaggccatcagttattaattggaaaatattcacttgtttgtggtttttaatccggctataggttcataaaacgtgtctattaccggatgatgagctagtgccaataagagagtatataattagttttatcaaactacattttgtgttcccataaccgttagattcacgcccattacagagcacaatttacacgcccccgattttcccacctttagacacttgcctcaatttccacgcgttgcatgcgccgctgacgttagataaacatttccctaccagcataattaaaataagatgggatactattaatccggaggggcataaaatacattttaaatgactgttccaatttccgcgttacaagccagcccaaaaagtagaatatacatacataaaaatgtatttaaagtttgaaatttatacaagaaattttcaattctcgaattaattagttgtttgctttcaacttcaataagttcgattgtactcacattgctaaatataaattattctttagaatgaactagacagactgcttagcgtcattgaccggaaacttaaatcactcaatcgtacactaaacgaataaagttctggaaatgaaaacagtttccagctaaaataagaaatatactactacgtttgccattgagaataaataaaacaaaagtcaagtgctgacaactatagttcttgttcgtgctaactagcccagacgatctagccatgcccgtctcgatgtctgtctgtccgttatgtccgtatgtccgtctgtccgtttgtccgtttgtccgtttgtccgttcgttcgtgtgaaagtcgagatatccgggaaccataaaagctagaaagttgagacttgacaacaggtatttaatagaatctaatagctgccctcaagtatattactatcttgtttttgaatacacgaacaaaagcagtgttatttaataattcagctacattatacgatatcaccaaaaaaatctatgataagcgggcgaaccaatcagtgactaatccgtaaaagttatctcatagtctggccgaggcattgacatttgcgaacagttcgacgtggtaaagtcattatttcttttcaggtagggcttacctcaattagccgactcgtgttgcatgcttcagcaccatattttaatttggggttttcgctgctacggttgagcaacctaacgagtgtggcatgaggtatgcaaaacattagagcgtctgggaatagtaattattttcgctcagctatacagaggaaagtcattgactctaacaacattatgactagtcaggtggcgattcgcgtggcatgttgcaacttaagccgaatgcaatttatgaacctgcaaatctgatgggaacaacatttgcctgaatgcatctaactggtagacaattagatcttctaaactgtgaacataagtgatttatcacaggccaataagttaatatggctgtttaggttaaggttatttaataattgaacagtctaaaatgtacatcactttagctttggatcctaagctatatacatgggagcaacgaatatggaggttagatgcgttccactcgcaagtagatgcccccaacggtgcccaaaactatggacatgggactatacttcagtgggatctctgtcgtatcgcagacggataccctgaaccggctgatgatctgagccaaaccgatgcgagcctgcatttgtccaaaccgcatcccgatgcagttccgcggcccgtcgccgaagggcagccactccacggactcccgggcggccactttctccggcgagaagcgctccggatcaaaggtctccggattcggataaagatcctcgtcgcggtggtaggcgcaagcggggattatgacctgtgtgcccttctcaatcacaagcttttcatggcccggcaccacgtagtcgttgagggccttccgttcgaggtggggcaccagtgtgtagagcctcagggtttctgaagagcaatgttgggtaaaaccagttacaatccctcttggggctgtgcttcagacagaacacctacctgagatgacctggttcaagtaggtcatggctttgatggattcgtacgttagctgcccctcctgttcctccagcaccgtttggatctcgttgcgcagcctgtcctgaatgtcctgattctgagccaactcatacaggcagtaactcattgtcgaggaggaggtctcaaatccggccacataaaagacgaacacctgggcggccagttcgccgatgtccatgccctcgatcacctctccgttgtccagggtgacgcgccccttctgcttcagttcaatcagcaggttcatgaagtcgttcctcttgaagttctcccgctccctgagggcaatcgtgtcgttgaccaggcgcatgaagaactggtggacgtcctcgggcatcatgcgcattctcaacctgctggccagcttgggaaagctgaacacgaacatggtcagcagtttcccgtggcgcatatcggtgaacaccttctgtcccatggtgcggaaatcactgacaggggtgcgcagcgtgttacactcaatgccgaaggcacaggtgccaatcacatcggtggtgaacctggccatcagctccttgatctcgagcacagcgccgttctgggcggcgggcacctgctccgtgatcaccttgacgaactcctcagacaccttgatcaccgtcgggaacatgaacttcatcttgcccgaggtgaaagtcggcgtcagcctctggcgcatgtccttccacttctttccgtccaggttgaacaggtgctgcgtgagcgggtcgtcgcgcccgttgtgaaactggccacgatcggcaaagttcgagaaatccttgatcaggatgttcttggccagctgggtgtccacgatgaaggcggccggcttgtgcagaaagtaaaagcccacgaagggaaagccgctcttccggtacttgttgtagtagtcgtagaagaagtcgtgcatcacccggttcttccggaacccgaccatgttgccatacagtgggtgaggagcatcgtgtggcacgccgcggcgattccagtagttgaagttgcggtggtacaagtaggccaaaagcgaggagatcgcgatcaacaggtatattagaacaaacattttgcgtagctgctcccttttcgcaatcgtcgtgctcgacctacgacgaattactgatcaccacaatatgttcgcacactttttataagattcccctgcgacgcacaggcatgacagcatgtgagctagctagctaaatatttctatcaccatgactactacttttaagttgttgtcatgattacagactcggcgataatatgcaggcacttttcaaaccgatttaagagcactttcaaagagatactcatacgcttgactgcaaaaatgctcgcgaatcaaaatataaacaaatgataacgagattgttgttaaacaaaccggttggtgcttgggtaaaaagtgtcccatcaggttttatcactcatttataagctcggcatgtgcgaaaagtagaggtagcattaaatggtaaatacacatcgatatgcggaaaatgtatcaaatcattgtattactataaaaacgcaatgacacggtcattcaaagtagcttcaaatgtacaggacgatcccacttgtaactaaaggtaaaggtgtttaagtaatgggtatttgatagccgagcgttccatctagctttcattatcagcgacaacaccaagctcttttgctttttatgagagattcaagatttgacataagagatattctcttgatgttctactgttctattgcagtggatctacatgcaaacaaacgattacaagattgttattaaacaagctggttaaggatcataaaggtttttctcctatgcgattcaatatttattagaaaacagagcaaatataattaaatgagtttttaagccttgggaatcggagcgaacattatcgcatgaaattgttaatgacataatttcccgtagataaatacatacacggacatacacatttaaaatgtcacccatttatttcagtaattagcaccccactacaacgttaatgtttggtgttccacggcgataaaacgaatgaattcgctgggagaaccaataactctttctaagagctatttaaacgcttcactgtttgaatgacgatcaaaatataaacagtagataacttgattgtcgttaaactggtcgcggttggttttaaacattataatcgcatcgggttttattgctcatttggaaacaacacatcaactgtgctgtgttaaattatatttagcatatatgtgattaaaatgtattcattcgaaagcaatgtcgcgtagttaaatctacatgtcacaccaacatttaaaatgactaataaatttagtttgttgccttatctcgttttattttcagaaatcagtgctaatgtacaacacaagatctaattaaaggagcattttttctgcagtgttcggatttttaaatatgttttgagatgagagaagtttaactgtggttaacacaaggaagtattccacattaatctgggtgcttagagtatcgcttatgaagcccaatagttaataagggcacattattgtaatgatatctcatctgaattaccagccacacaattgtgtgtgcttaacgccccgattaagcttacggttagccgctccctaagtcgcgttctaaaagggtataagccgattaggatgtgcatttgtgccgggaaatctccttattttgtcggttgggaaagcgggaacactaacgcgattatggcggatttattttctccgattcgagggagccaaggcaatattgaccttgtgcatttcttatcacaagctgctcgaattattggcacagccccagggcagatcagagtagaccagagacttatctgggagtgttcttggctgtcattgtcttgaactggtcgtgttgcttagtgcttagtgctgcaactgacacttccatgtcccactctgacctgggagtttagacagcaagtggcgcgaaaaggtgagcaacgattcgatttgaatctaatcgccgatacaaatcaagtcctcctgcccgaccttgaagtgctcagtctcggcccacatgggtcagggtgttccatacaagcccgcattaagatgggaaacaaatataacgcaaagcgcgtcgttcttggcataatgaagcgcccgacgagaagaaagaaaggcattgaggaagcggcgaggaaaaactagattgcctctctggctgcacttatgcgctaaataaaaatgcaaatctaaatgcagctaagagccgagaagggcccaagaagccaggcgagctcacaaaggaaaccccacgccgacggcgcacaatgcagattcttaaagaatgaagaacgcgctcgagggccctctaagtcgacatctgactgccgcagtctctggcggattgttgtctccgggtagacggcctagctaattgcagatgcatctcggctgcatgtcgcggacttcttgtaaacagtcgcctaattgtttgctccgcagaggtgttgcgccccaaagacgcagctctttcgaatgcaaatgctgactgagaaggggtgccccgagtgcctgtccaagtcccaaccccaatcccctcaaggctgggtacagcatgagcgagcgccttgaataaattagttttatttgtgtctggatgtggggcaatctaaacaaatcgtgagcggagagcatgggattctgcatttcctgtggggtgacaacagtgacgatgtcgcgtctgcgtgttatgtaaatcacaaggaaagccgaaatggaggggcgcagttgggggaatcccctacgtcaatacagaaacacacgcctctgcagaacccaacctttgcagcataatcataatcatcacaagaagcatcttgatgaattgtaataggctttaagccttctgagtgcgcattcgagtgaaacagcacccactccagttaaatacgcgaactccccaggcagcggcaataattagccagattccactttgtcgcaggatgacaatggcacattcctcctgcgggatttttcaatcaccgccagactcttggagcagcgggatgatggctgattgaatttctgggctgacatattcgagccgcgattgtgattgcgattgctattgctgttgtgattgtgattgtgattgtgtggcatgtgtggcagctgctgctccgtattgattcggtgctgattgtctgccgagggctttgtttcatcgcagctctactgtcttcggcggaagccataaaaagatgaccgggtgtgatgtactgacaagtgctgggtcaatgtgtcaaaagagagagcccgatgcggctgttcatcaggcgagatgacacagattgtccctcgcacaccggccaagttgcaaattgttgacttatgctgttgcaactggagcggactggcagtagttgccacccagagatccgcgtttacgtggcgcaataaaacgctcgctggtgagcaccgtgaatatgttttatgtgcccagatggcaccacgtggcgtatacgcactttaaaccaaaattgccttttgtgccgtgaatttagaagaggtacacgccagagctttgggcaaataaatgacaaagccatttgtaatgaaatattaaggccggcagtaaaaggaagatctggaggagtggttggggcgttggacgcagcgggaaatgggccggaaaacatcagcattatacttattcattatgctgctggtctaggcgtgggcgtttacgcattcgcattccagatcgtgggcggagcggtgctagcatgagttttattggacgcacatcacataaacatgatgcggtacgggcatttggagcgtggagcacatggcccgaaggcaggaggaaaatcgatacccacatggccacatgagcaacccaaagatctggccaaaagcgaggcgttgcagtttccatggcgcaggtagcagaatttaaatggattagggtaactgtgtcagaaatcaattattcaaatggagtcgcatgcacgcatcaaattaaatttccactcaaacgaaaacaaagtgtattttcaaaagcaaattaattgctctgtgcttcccgttttggcaaatctagttttgtccccaggcagcagcaaaaataaatccaactagatttccacgatgacaacagcaaatcacgattgccctttatgggcatgccaccaaataagaaacgggtatgattgtgaataaaaaccctttcaagttgtcactactgaagtggttggttggttgctttgctcgacttttgctggcaactgtggctttaagccacagccacagccagagtcccacgcttttagccaccgaaatgtaaattgggcaaaacgcatgccgagcaaacttcttttcccatggctggcagaacgggggaaaaggtcgataagaatattgtttaactcaattcagcacgcgaatctgaactcagcccgatttgttgataaaaagtgaaagtggaaagtggaaagcgaaaaggcaacagaacagcgcggggtggggagggaaggggagtcgattcgcagccccgggcaatcaaattgaaaattctccattgtgcaaatattgattttgttcgctgcataaagtttatgcgtccaaatcgagaaactcaagtagaccagggaaaattcggcttgtaatttcctctgcgataagcaagaagttgggagccattctcaatccgtctgcgatctcaagtgtctggggcaaggtcgctttttgtggcagtctcgttccgtctttttttttttgcccggctaattcgacgcccttgccagtggagtcgtgtgttgcgagttttatatttttcccaacatattatttatggtaatcgacatcaaatgccgccattaagcttattgccatggcaagcggcaacagcaaaggcgttttcttgctgctttttgctgctttttttgggctctgtgcttctgctgtttataggcttccaaagctaaaaatattgtacatctgcatgggtaaattctaaaaagatgtggaagtacatgaacagatttagtcgaacttttctatacactatctgttcatatctattccctgataatatgaatagaacataaatttcagttttgaattgtgtacccaataactttttttttactattaatgcacttgaatattgttttgatattaataattgttgatattaataattatctattgtccattttaaattcattctaatgaatattatatatatattatacacagcatcgaattgagttgctcgattgaaatctgaagattctacgaaacattacatcttttcgccgaaaagttttaatttttttttttgtcagggtattttaacagcatttgcataccgtgtaggcgatttctcatattcgaagcgttgaatttttgaatgaatttatgacaagcacgtccctccgctgaaaatctccctctcgtttggcaataatttgtttgtatctcatatttgatttgcgttatgtacgcactgtgtgagttggcgagggggtgtgtatcttttggcaccttatcagcagattatttgcataatttgagaatatttttcgaatcgaacattggctttccacgaatcgctgctcgagcttacctaatgaagcagtggccagagataccgattagaaatcgtcctattccgatggcgcgtgttcagccagcactgaatgtgtgtgtgtgcttattaaattattgcagagttgctaatggaaaaagtcgtgcgataaaaatgaatttattgcatttttcggttaatttgccattgtaaacttatttaattacgaactttttccatgctaatgcaaacttttcagcgagcaaggagtaaactacctaaatggggatgggagatgcccgctgatggataattgccccgagctgaaagtgccccatttcatccgctgttgttataaataaataaacattatgaaaccacttttatcctgattaatatcatcatgcgctcacctccgcacatgcatgtgcatacatacacacgtacgagagtataaacatttttgtttaaggccccggaaaactgctttttaaccgcccactcgaactccgtcctccgcccaagctattaaagattattaaaagcaccttgatctcgggagaaggagttccctcccatgtggcgctgatgctcttgctctgtggcacgcagaccaaacgtattgatccataaagcgtataaaacacgagcagtatttgtatcttacgttgggatgcgatgaggtgggcggattgcggaccgaaggggttgttggtggatggagatgtgcatgcggatgatctttgaccttcggcaaggttgtacccccactttctattttaggcccaattaggttgcagctattctctttaggcataaccccggtgaacataaatctccgtatgtacacaatgctcatcgagagtgagccatgtcttcatctgcagaggtggttccctccccgggcattatcaatctttcatcttcgtctgcatttgttatagtcgagctcccctagttgagcactcatttatgcattttattggctcttggctagcttggagcaccatcaatcatctcgatggctattcagttgcgatctactctgccttttgtgcttatatttattatttggacgggccgtcataagtggtccacctgttggccgaatagcctgcccagcagtttgccaataattttaatcaattatgcaaatcgcatttattggcccatgatttatgcgatatatatgcatatcgtgcatatatgtataagatggacgaaatggagcgagaagagctgtgttgacagtcggaactgatttggagcccaaggagccattactcatctttccggaagttctgtgtgtgcccactcacatcactcagcccaggtgaagtgttctgttcgtggtgctaataatatacatatacccatataagaagaagaacccattctggttcacgtttacccaactggctttgcaagcagttctttccagataagaaggcgataagaaccctatacgagtacgagtatatgaggccaatgcaaatagcagatacgcaccagaggagaattcgctgctctttccgctgcaaccttccagcagatttaatgaatgaaatcaacttgaattaaattcctccatattgcggctttgtttctggctttatttgtttacacacactgcagctgttgaatcaccagagaggcgagaaatgtgttttcggctgccttgctttgtttcgcttggaaggtaataaatttttaacacaattgcattgcataaacaatttcaaaactgcactcgaaatgggcctgtttacactccgttgtcgtgtcgattacatttttggccaatagccaagcactcagatttaactggtttatttcgacttggcgaacgcccgcgcgcgaatctttcagcacagcccacgcactttctgcagcatggttaacttgaagatactcgaatcgcacagggaaacagatacggatgggctccaatggaggtgatatagaggcgtaaacagaggcagagattcaaaccgaaccgaaccaaaccgaactgaacctctgggccagcgatcgagttgtgcgccgctggagagctcggcacgtattaatttctgcggcagcactaaagtatccgaaagatacgttccgctggtcgcgcaccagcgcacatagccgccacatatgtgggcaacttcgctgccggcgtcgccaacttgtttgacagcgaggtaaacacaaccggagcacagatctgcctcgtcttcggcccttctggatgtttatatttacacgtcgggtcggatcggatcgggcgggggtgatctcgatgggtcagatgcgcgacgggtgtcgttgatttcaatgaagagccacaatttgtcgtctcaagtggctcgtttatctgcatccgacgcggtttattctaagtctgagattcagacatccgacagctcccgacagtttcccccagcccctatctgtttgttgggcaaaatgattggattcaacagtaacattaacattagccctaagttagctggttcttgatgccatcgtatgcaaatggctcccatcggaattggacagaattcggagtttttggctaattaaaagtttcgtcgaacggggccacaaatgaggtcgaatgaggccagtatctgcgatttgtatttgcccaaagagcgaatgcttccgctttgaggtgtcttgacggaaatggctcttacaaatcaaatcaaatgttttgtggcttgaggcttttgtatcccacaaaacgagtagagtgtgtgtgctctatttaagccgagagatttcactgctcatccaattatttgtggagatgctttctccgagcgcgggtcgcacagatcaaacacctacgaattgagtgaacttgaatatcgatgctgctgggtcaccagggtggccgtggcccgaaactggtctggaggaagccccgatcacctgcacctaatgatacataattacatgtgggcaaagtttcagtttccaaagcattttcattagtttgatggcctttctgccagggaaggcctgctcgggcgttccggctgtaattatataatcatttta

SEQ ID NO: 6455 - DNA, 3566 bp, DROSOPHILA
ctctccagcggcgcacaactcgatcgctggcccagaggttcagttcggtttggttcggttcggtttgaatctctgcctctgtttacgcctctatatcacctccattggagcccatccgtatctgtttccctgtgcgattcgagtatcttcaagttaaccatgctgcagaaagtgcgtgggctgtgctgaaagattcgcgcgcgggcgttcgccaagtcgaaataaaccagttaaatctgagtgcttggctattggccaaaaatgtaatcgacacgacaacggagtgtaaacaggcccatttcgagtgcagttttgaaattgtttatgcaatgcaattgtgttaaaaatttattaccttccaagcgaaacaaagcaaggcagccgaaaacacatttctcgcctctctggtgattcaacagctgcagtgtgtgtaaacaaataaagccagaaacaaagccgcaatatggaggaatttaattcaagttgatttcattcattaaatctgctggaaggttgcagcggaaagagcagcgaattctcctctgagcgcagttactctgtgcaacctgggcgtgggtgccacattcggggagtccgtactgcatgacttgccgcgggacagcaccgtagtgacgaagaccacctgcgagctgctgcgggtggagcagcaggactttcgactcatctgggagatggcagccggcaggcagcgctggtccacgcagatcgtggccggcagtgagcggagtcccggcgtccttctgcttcgctaccgacgccacagcggcggggatgaccaggtgggggccacattaggggcctccaaggccaccaaggccgcaactggcgccacttccgccgccgtcaagtggcgtaggcagctggagcgtgggcagatgacgcgtccgcagtcgacggcatttgaaatgagcaacgtaatgggaatcgcagagctgaaccaggctgaaacacccaatactaatggccatttacgctttccattgcagaaaaacaaggagttaatgaatgacatattcaccaactgcaagttgaagaacggttttggaccgagcgtacaagcgacagccgcagccacatcgcccacgaaacgacccctcagccccgaccacccaaacccagcgctgcccatcaccgagacaccgagtcctgctatgaaccgcatgggctgggccctacgcacactactcgtcgccgacaactcgagctgtctgaaggatcgcaaggtctccggcaagctaatccgtaagtgcgcccccggcaccgagctcgtcgactggctggtcaacctctcgcccatcgtccacacccgagcccaggcggctggcatgtggcaagcgctcctcgaggaaggagtactcgcacacgtcaacaaagagcagcccttcaaggacaagtgcttcctctaccgctttcgcatcgacgaggagggcggcacggcggcagcgggcgtgccccaggcggaggacctcggagcggccaacgagcacatccgcgaggcgctcagcgcactcttccagcgcggaccggacgccacactgcgtatgatattgcgcaaaccttctcacgaacggacatcggaggagctggagctggtcttcgaggaactggtccacattgccgcactctcccacttgtcgaccagcataaagcgggaactgtcgtcgattttcgtgttcgaggctcatgcccaggcgggaacaatattattcaatcaaggcgacgaaggacgctcctggtacatcttactcaagggatcggtagacgttgtgatacacggcaagggaactgttgccactctgaagactggggatgatttcgggaaactggccttgataaacgacgcacccagagctgctaccatcgtactgaaggagaacaattgccacttgctgcgcgtggacaaggaacacttcaaccggatactgcgcgatgtggaggccaatactctgagattgcaggagcacggcaaggatgttttagtgctcgagcgcgtggctaagcaacgtggacagcattcggcatttaaatatacggtgatgtcgggaactccggccaagatgctggagcacctgctggagacgcgactgggccagtccgtgggtggaatggatccgttcttggacgacttcctgctcacacacatcgttttcatgcccgtcgttcagctggacgcccaaacgcccgaggatcgggagtatataatcaactttaagaagcgcgtgatccagttcatgcaaaagtgggtcatggccgtccgccacgcggccttcgaggagcccagcgtgtgcgactttatcgaggacctcgccgccgaggtggaggccgatcccgacctgaacgaggagaccagcatagtgcacaacgtgctcacccagatggcgcgctaccaggaggaccgcaaccagaacgccggccagaagtggaagctcccgcccaacggccagcccatctgccttttcagtggcaatgcgacgccttcaaagacggtcatccgaccagatgatgatatcatcttccgcgtttactgcgccgaccacacctactgtaccctgcgattccccatgcacaccacggcggagctcatcaaagcgtgtgccgccgacaagctgcagctaaatcggggtcccgaagatctcgtcctcgtcgaggtcaagtcaaacggggagcggtccgtgttcaaggacaacgatgtcagcatacccacgggtctgtcgctcaacggccgccttttcgtctccgtcaaggaccacctggatgccttgacccaactgcaggagcaggagtgccccaccgagggtgtggacatcgacctggagatactgagcaccaaggagctggcctaccacatcaccctgttcgagtgggacctcttctgggccgtccatgaatacgaattgctctaccacaccttcgggcggcatcactttggcaagatcactgccaacttggatgtgttcctgcgccgattcaacgaggtgcagtactggattgtcaccgaactggtgtccactcccagtctgagcaaacgcgtcggtctggtccggaagttcatcaagctggccgcgtactgcaaggagtaccagaacctaaacgccttcttcgctgtggtaatgggtctgtccaacatggcggtgtccaggctgcaacagacctgggaaaagattccgtcgaagttcaggaagatcttccaggagttcgaggccctgatcgaccccagtcgcaaccacagggcgtaccgagtgttcgtgggcaagctgcagccgccgttgattcccttcatgccgctcctgctcaaggacatgaccttcgcccatgagggcaacaagaccagcctggacggcctggtgaacttcgagaagatgcacatgatggcccagacgatgcgcaccatccgcttttgtcgctccaggagtctgggactagagccgccgtccccgaagagcgagggcgaggtgaggtcgtacatcagcagcttccgcgtcatcgacaaccagcgggtactcaccgccatgtcccagaaggtggagcccaccaggaagctctaa

SEQ ID NO: 6456 - protein, 957 aa, DROSOPHILA
MAAGRQRWSTQIVAGSERSPGVLLLRYRRHSGGDDQVGATLGASKATKAATGATSAAVKWRRQLERGQMTRPQSTAFEMSNVMGIAELNQAETPNTNGHLRFPLQKNKELMNDIFTNCKLKNGFGPSVQATAAATSPTKRPLSPDHPNPALPITETPSPAMNRMGWALRTLLVADNSSCLKDRKVSGKLIRKCAPGTELVDWLVNLSPIVHTRAQAAGMWQALLEEGVLAHVNKEQPFKDKCFLYRFRIDEEGGTAAAGVPQAEDLGAANEHIREALSALFQRGPDATLRMILRKPSHERTSEELELVFEELVHIAALSHLSTSIKRELSSIFVFEAHAQAGTILFNQGDEGRSWYILLKGSVDVVIHGKGTVATLKTGDDFGKLALINDAPRAATIVLKENNCHLLRVDKEHFNRILRDVEANTLRLQEHGKDVLVLERVAKQRGQHSAFKYTVMSGTPAKMLEHLLETRLGQSVGGMDPFLDDFLLTHIVFMPVVQLDAQTPEDREYIINFKKRVIQFMQKWVMAVRHAAFEEPSVCDFIEDLAAEVEADPDLNEETSIVHNVLTQMARYQEDRNQNAGQKWKLPPNGQPICLFSGNATPSKTVIRPDDDIIFRVYCADHTYCTLRFPMHTTAELIKACAADKLQLNRGPEDLVLVEVKSNGERSVFKDNDVSIPTGLSLNGRLFVSVKDHLDALTQLQEQECPTEGVDIDLEILSTKELAYHITLFEWDLFWAVHEYELLYHTFGRHHFGKITANLDVFLRRFNEVQYWIVTELVSTPSLSKRVGLVRKFIKLAAYCKEYQNLNAFFAVVMGLSNMAVSRLQQTWEKIPSKFRKIFQEFEALIDPSRNHRAYRVFVGKLQPPLIPFMPLLLKDMTFAHEGNKTSLDGLVNFEKMHMMAQTMRTIRFCRSRSLGLEPPSPKSEGEVRSYISSFRVIDNQRVLTAMSQKVEPTRKL

SEQ ID NO: 6457 - DNA, 9295 bp, DROSOPHILA
tagtcctaccgtattggttgaatccggagagattgtaggcccatctgcccagatttgctgtggggaaaaattcgcattacatatttacgtaatcataatattccggcgtactgcactacgaaatttgttgcatgcaacgtgagtccgattgttgcccgttcgtattacttacagagaactgcgggtccctttctggcaatatagttcgacatggtttacgtaaaatcagaagtcgggaaagagatattcctccagcctttttattttaggtatgagaacgttggagatgggtctctcgatagctatcgcaccccgttatcgatcaacgagcactacggttgcgtttgtacaaatcgatttccgaaatgtaatacagacacactgcacctatcgatatatcgcactcaagaaaattcgttattctttagttttagagctattaaatatattatcttttaacattttacccttttgtatttgtatttagattgttcaaaaacttggtggagacggcaaccgaactacagtataattacatctccaaagttggtcattttgcaataactttttgtataaagtaaataaaatcaattcaaattcttgtaaacccatttaagcccatgtaaaaatccgccttcataaacaaaatacttgtagtttatcaaaccgaatgattgtggctttctccttttgtaatttgttatgggaaacactcaaaaaaggtttttaatttgggttaagttataatttatgttaaccaataacctcgattaaattaattataaaaatgatgcctgaagatatacaactttcacttaacttgcaacacgggtattgtatattaaacagcaaacaaaaaaggcaaaaatgttggtaattagcggagtgcttcgacaagcggaaatccctacttctcatttaaataatatttccccaattttttgcgataagcccccgccaacggtaaacccttcattaaaatgattgatagcgtttttattttaaagtacataccttcgctttattatgactacaaaatatcaatttatacaaattaaagaacatatacaaattctttatatatacagtgccctcccttaagagtgaacactcgaatatgtgaactttttagtaaaagtgaacgattaatttatgaaattttagaaactttcgcttaacttagtaaaaaaattaaattttttcaaacgtggtgtttttgaaaaatatattaaattgtttattttttctgtgattcgttatagtgaacaaattcgattcagtgcacacccttggttctcaatagtccactgtttcgagtgagcactgtacatacactaaggctggcacgaacacgacactaatttaagtttgtttcggtttttgtttctgatttctgaacacacgttatatatatacatatgtataacattgagacccgttccagccttagtttatacatatatcactgggcacataatgtagtaactcccaatgcgctgagtggccgggagagagaaatcacttattgttcttagctgcagtcaatgacaaaaactccacctttcgagccaagtactcattataacgaagaaatgcatagctaaatggggcgaataaaaaattggtcattagtatcgattggttgtaagggtcgtaattgggggaaaaaaggaattgcagggtgcacaataatataataaatccattataatggccgtctaatggttgttgatggatcttatcaaacaaaactgatatatatactgatgatatatatctatatatctaaaggatttatcatctaattgcatcgtgcattcccaactcaaagttacagtccatatactatgcaacacgcaccctacgtagtcgaaatcgatagtggaatgctcggcttgcaacagggaccacaccgtccaaaagatatgcgatgccagcgcaaactgattgacctggacatagagcagttcgacttcgtcgttttgaatgttgctgcgctgtaggtactcctcaaggtagaccctcagccactggagctggaactcgcgcttcggatagcgcgaatagtcgacctcatccacgccgcacatctccgcaaagtggttgccaatgtcgaaggcctggaaattgtaatcggcatactcgtagtcgatgaagttcaccgtattcaggctctgcgtatagatcacatttcccagcagaagatcgttgtgggagaagacaatcggactgtccagagcctcgaggtattcatatagcttgttgaactcctcgcgcaggcggccgataggtagaaacgtttctttcactctgcaaattgcaaatcaaacaatgagcgaatgaacaaaggaccgaagatgcaaaggatgtctggtgtcgttaccttttgtgtttttcagcatcactaaaacgttcaggtactaaatcaagaaagctctgcgtcttcttccaaatcatcggcatgggtttggtcgccgaactatccccgtgctttctcaccttgcgatgcatctcggccatgcgacgggcgaccaagggccaaatttctggacagagcacactgtccgtattcagggtggttccaggtacgtattcgtagacgagaccgttcttgaacgtggcatacagcgatggcgctagcccatacgtatgcagtagaagaaagttttgcgtctccgccttgcgatctatcagtaggtccgttttgttaccgtatatcctgacgagcactacgttatcggagtactgtacaggtgacccgtcgtccgctgcccgatcgtctgtgaactcatcatcgtcctccttctcaatgatgactggatcctcggactgaacgggcgacaaaccctgcgtcttgataggtaaatacgatccgccgttctcatcgttcagtttggagatctccttatgaaaacatccgaccagtttgtttgtgatgccatcggtaaaactctaaaataagcacacagagaacagcaccattaaatcgtatacataaaaacataatactcatcgatgtagatccagtgaatgggttaggatggattaattagtagagtagctacatgatttgtgtgctttgtttattgtaagtgaagttattgcatcatcacctaataccaattgctatacggtaaggttcattagtagcattcaatggaacggtttcgggaattcgccttttaagccacagctcaagagctacagtaaagggcttatggccacttccttatcgactccacatgcttcttatgtacatatgtatgtacatatataaaagagtgaagcacatgggtgataaactttgtgacaccagctatttgcgtgctaagcgtctcagaaagaccaccttcgtcttgaattatatacgcatacggtgctttttataatgaaaacacagaaacagataagataatgaattgctaaacaatttaaattcatataattcaaagcgaaaaagcccagaatgtgtgaaaggtgaatgaaataaaagtgcgaaaatagtaattagttcatttcaatcacttcgatctgccctggttttattcattcactgagaaaagtttatttattgcatttaatcaatatttcccagttattttccctttgctcagtgttcaatgcacttaagattaaagtagtgctgtacaaacacgtgtgtttcagatcgctggcgatatagtaaattttccacttcatatatagaacgacgtctctagcggctataaaaatgtcaatagttaacccattactcgcatgacagttgtgaggcataaataaccgtgaaacttgaagtaaaacttaaacatttggtttatggttgagaaacgctgcctatgacgccatggtccatgaatcaactcagatttgtgcaagtattcatagtattcatagtagtcatattgtagcatttattatcacaatttcgcctgactggcgccaaagatttgtgactccccataaggatgcctcccctccacttgaatcctgaatcacgcgacaaattatctatagcttagaaaacggacatgacacgatttagactgtgtaccatgtacccatgtactatgtacaccactcgctgatcaagggatgaaccacgttttattgcccaccagcgatttggcaagactcagcacttggcaattccgactggagctgccataaagctgataagtgagttacggacaagctgtgtacaccaattagacgtcatgcctatggtgcggcatatacagatagcgaggtcaaggcgtacaagtggcttccgataaggcaaaaacgccccatttcaaaaaaaccggagtgattaaaggcagcctcaggcatttgtacatacatacatcaatcatactcctctaactcgacagcgtgaaattatcaaatcgggccaaacgaaatcaagcccctaaaaagcgagggaaaaaacgtttttttttcggatcatccgtaaattacggacggacggacggatggacggtgtgtcggtaatggttatctgtaaaaacactcgagtcaatgcacctgctgtcaacaccttctatgtcaggcatttaaagtattgtggtaattagagaacgtgcgatttcattagaactaaggcgactaattggcacgaaggcctatttcttggctcacacccgtttccaacccgctccgtttggtagggtgtgtgtgtgtgtgggggggggggggcacttattattattttcccccccggagtcgagggctagattagcagcaaactggtttctactgcgacgcggggtctgaagtctccatagttcgcttggcgactcggaaactcagaaacgctgtcctaatacaccaacaccagcgtagtgaataatgttaatttcgaataacaatcctatgcgtctctctcttcattgatataacaaagtctatttacaattatcatggcggcgcagcagcgaatatatatatataattactatttgaaggttggctgttgtgcaataaccctgtttcaaacaatgttagcaactactacgactctatatctctatatatatgtatatgaatgtatatagtaaagtatatatcccacgttccgcacaccagttagtgatcgtaataaatgataaggaaacatacagcgtcatcatcaccatcgcattttgggccggataacgatcttcgatctgcggaactaccctgatctgatggagaatgtagagaatatgacattgatggtttcgtttttttgcattgtatagtgtgttgtttggctggtgatttaatttgatttgctttgatttgattgttggtataatgatattgtaggggggttataattttgaatgttttgatgaggtttacgttaccttaaactcgacgtggctgaggtcccaggtcggtcgtataaccttcaacagttccttggccccttgaattacgtcggcctcctcaacaaatatgggtacaaatggtacaattgcctcttttctggatttatcctccggtttggctcgaatatcgcgcgaattttgttcgttttcgtttttgttttcgctcccgcttggatttggatacgaattggaattcgaatgtgaattcaattggttctggacctggttcgattgcgatagcgatagcgtttgctgattgaccgtctgacgaactaaggataaagaatctttcatcactttggggttgccgccacttgttgaaatctgtcctgtgtaactgttgctcttggtttctgtgcccattctattgtattatatatgtgaaatacgaaagtgtcaggtcgggtcatacatatagaacgacaataacatcagcatgtaaaatgagtaggtaggtaggcggtagttaaaagctaatcatccgaatgcaaaaccaaccgagaacccaaccaaaccagcaaagatatcctctcacccccccacgcaacgaaccgcagccaaatgaaaaattaaaaaacccagtaagtatactacgtccatgtcctctcactcatgcgcaccgaaaccagagttttggatggagatgaccgcacccagttagtaggatctgcgtaccatgtgggaaatagcccaaacacatccacttcaccaccacacgaatgaaacattattgtatcgttcatactaaatttaatctcagtttaaggtttatttgtttatatatcagatatagaagattgtgccaaagtaaagcaaaatctacctcctaaacaaaaacttatctacataatgatcaacacttttagagtcccaaatgtgtaattaacaattatacgagaaaatattcgctaatttgacaagcaaataatatatatgtacgtatattccataaaaaatgattacggaaaataaaccttgaaattgtgatagtcaattcgttaactggttttcgcttgatacaggaagttcctaatttcagttatagataaacatgctcttttaccctcattaaacaccaaaattcgcaatatagataaaagctgcctcaatgatacttattaatcattaatcacgatgtaatgaatgatacaatttgcaaactaacaacttgttaatagttaataataatacataatgcagctctaactacacaaattcatgcatgtgtgtgtatgtatgatggacgctttttgattaccattcttcttagaccttatcgttgacattatctactgactagatccatcatcttgtcttcattttcgactatatcacgaaaagctgatttaaaaataaactttttattcgtttatgataagcaaacatctcgaatattatagaatcaagttggtaatactgacaacggctattaggtgctattatgttaccccgtgctgtattatgtcttcgaatgcggcacagccgggcggaaagtacacgtagccgtgtgtactcgaattatacgaaggtgcgtaaggcgatgactataaatcggagaaggtaacgagacaacatacgtatatgtatatgcatgggataaggtaagggggtcaaaataagtcaataagatcgccgtgttaagccaatgtcttaaaatacagggccggagcgagagggtggctaagtttttaatttgatcaaaggcaattttaaatcggaattatgctgtatccactaaattttattacaattgaaactgttttggggggtgacgccccaaaatgaccccgccgactccgctcctggagccagggaatgcacccacactcgcgcacaaataaatagggcgtaaaatgctaatcttgtgaatacgtgaatgtacatacatgtgtatgtacatactccacgcaaatcaagtgtacattatgtacatgcgaacgtatgtaagatcggaaatcaggtgaaaagcccagggcccaatagcacaggtgggggcgggcgcgttagcacgggacatttgctttaatattaacatgttttctgtttcgcactttcttcattttttcatctttattttggttttttagccaggccaaaagtttacgcatacagtggcaatgtgtgtagtacgtgcaagggtacaactgcatgtgtgtgcatagtaggtgggattagggctcatctgcacgggctaagtttcccttatatcccgttatactactcgaattctgtaaacttaaatgttgtgaatgaaactaaaatataaataagctacattactttgccagtcacattatagacctcttttaagcctcaaaagcggcgattccatgcggaatttaggtcgtgcgaaggggccttaagcgcgttctgggttaagaacccccgcccacgacccccttaccacaacgacccatcccacaatccgagcatcctttttcctgaacccggtgcgatatttgttggttgattcgaaggattcccataccagattttgattccgattcggtggttctgaattcagatagtgattcgattggattcgatttcattcgactggatttgattcgtgtttcgcatgcaatttgagttttgaaaacgacaaacaaggtaaaataataataaaatgtgtaccaatatgtcaagcgtcaacgaatgcaaacgcacactgaggtgaattgttagttgtctacacacgttaccttcgggtattgattgttttttaaaagaaaacacaaaaaaaaagccgcgaaaatcacacaaccagattatcgattttggcccccgctgaaattggcgcacacaacacacaaatttgactggggaacgaacagcgggcgatgcaaacgattcggttccgacttggaatatatagctgccgaactatcggtgcaacaatcggatcgctcaaccggtcgctccatctgcagggaataccaaaacgcctcagttaagtggcgcgcgaatgaaggtacttgcgcttagccaccagctgggcacactgcacgagcctgcatagagttttttacgaaattatcacaatttaggagttttccaattagaattggaataagttcgtactcttaacttgctaacaagttgatttttaatgcaaaacttttcgcagacaacttttcgacaagaacagtgctgccagactgtcagaccggcaccttactggcgtgtttttatcacattttctaatatttccaagctattgaaatattccaaagctttctatctgcacattctttttatataggtgttcccagaaaatcgccttagcatggagagtcgtgctaatacggcgttgccagactgtcattgcatttcttgttgctctttgcaagagcccgccaaatgaaatttttatttgaatacaatttatttttttcttcccccgttcttttgcttgtataatatcccaactggaaaatgtgtacttttcaattacgaaacatgtacaatatatagcaataaagtccagtaaaatcgtggtatgtttacaattacttttttgggcctgatgatacgttgccattaaagtgcaatgtcataccactaatgtaagttttttaaccctttataccccccaatagcttgcccataatcctcccgtgaacaatcttgaatcccaaatgcaagaacaaagttcgaatattcaacaggagctccgcctaatgtatgatgacgcatgtattttatacagatcaaatattttcataccgttttacagggttccgaagaatagaaagtggtaattaaaaaaagtatgcattcggttcaccgaattcaatttgaatcgttttccaagtcaaatcaggttggctacaatgagcagacagaatgtgggcggcgacaccagatagtgtcgccgaatgcatggaaagcgattcaatgcaacggccttccatcgaagaagt

SEQ ID NO: 6458 - DNA, 4631 bp, DROSOPHILA
tggagcgaccggttgagcgatccgattgttgcaccgatagttcggcagctatatattccaagtcggaaccgaatcgtttgcatcgcccgctgttcgttccccagtcaaatttgtgtgttgtgtgcgccaatttcagcgggggccaaaatcgataatctggttgtgtgattttcgcggctttttttttgtgttttcttttaaaaaacaatcaatacccgaaggtaacgtgtgtagacaactaacaattcacctcagtgtgcgtttgcattcgttgacgcttgacatattggtacacattttattattattttaccttgtttgtcgttttcaaaactcaaattgcatgcgaaacacgaatcaaatccagtcgaatgaaatcgaatccaatcgaatcactatctgaattcagaaccaccgaatcggaatcaaaatctggtatgggaatccttcgaatcaaccaacaaatatcgcaccgggttcaggaaaaaggatgctcggattgtgggatgggtcgttgtggtaagggggtcgtgggcgggggttcttaacccagaacgcgcttaaggccccttcgcacgacctaaattccgcatggaatcgccgcttttgaggcttaaaagaggtctataatgtgactggcaaagtaatgtagcttatttatattttagtttcattcacaacatttaagtttacagaattcgagtagtataacgggatataagggaaacttagcccgtgcagatgagccctaatcccacctactatgcacacacatgcagttgtacccttgcacgtactacacacattgccactgtatgcgtaaacttttggcctggctaaaaaaccaaaataaagatgaaaaaatgaagaaagtgcgaaacagaaaacatgttaatattaaagcaaatgtcccgtgctaacgcgcccgcccccacctgtgctattgggccctgggcttttcacctgatttccgatcttacatacgttcgcatgtacataatgtacacttgatttgcgtggagtatgtacatacacatgtatgtacattcacgtattcacaagattagcattttacgccctatttatttgtgcgcgagtgtgggtgcattccctggctccaggagcggagtcggcggggtcattttggggcgtcaccccccaaaacagtttcaattgtaataaaatttagtggatacagcataattccgatttaaaattgcctttgatcaaattaaaaacttagccaccctctcgctccggccctgtattttaagacattggcttaacacggcgatcttattgacttattttgacccccttaccttatcccatgcatatacatatacgtatgttgtctcgttaccttctccgatttatagtcatcgccttacgcaccttcgtataattcgagtacacacggctacgtgtactttccgcccggctgtgccgcattcgaagacataatacagcacggggtaacataatagcacctaatagccgttgtcagtattaccaacttgattctataatattcgagatgtttgcttatcataaacgaataaaaagtttatttttaaatcagcttttcgtgatatagtcgaaaatgaagacaagatgatggatctagtcagtagataatgtcaacgataaggtctaagaagaatggtaatcaaaaagcgtccatcatacatacacacacatgcatgaatttgtgtagttagagctgcattatgtattattattaactattaacaagttgttagtttgcaaattgtatcattcattacatcgtgattaatgattaataagtatcattgaggcagcttttatctatattgcgaattttggtgtttaatgagggtaaaagagcatgtttatctataactgaaattaggaacttcctgtatcaagcgaaaaccagttaacgaattgactatcacaatttcaaggtttattttccgtaatcattttttatggaatatacgtacatatatattatttgcttgtcaaattagcgaatattttctcgtataattgttaattacacatttgggactctaaaagtgttgatcattatgtagataagtttttgtttaggaggtagattttgctttactttggcacaatcttctatatctgatatataaacaaataaaccttaaactgagattaaatttagtatgaacgatacaataatgtttcattcgtgtggtggtgaagtggatgtgtttgggctatttcccacatggtacgcagatcctactaactgggtgcggtcatctccatccaaaactctggtttcggtgcgcatgagtgagaggacatggacgtagtatacttactgggttttttaatttttcatttggctgcggttcgttgcgtgggggggtgagaggatatctttgctggtttggttgggttctcggttggttttgcattcggatgattagcttttaactaccgcctacctacctactcattttacatgctgatgttattgtcgttctatatgtatgacccgacctgacactttcgtatttcacatatataatacaatagaatgggcacagaaaccaagagcaacagttacacaggacagatttcaacaagtggcggcaaccccaaagtgatgaaagattctttatccttagttcgtcagacggtcaatcagcaaacgctatcgctatcgcaatcgaaccaggtccagaaccaattgaattcacattcgaattccaattcgtatccaaatccaagcgggagcgaaaacaaaaacgaaaacgaacaaaattcgcgcgatattcgagccaaaccggaggataaatccagaaaagaggcaattgtaccatttgtacccatatttgttgaggaggccgacgtaattcaaggggccaaggaactgttgaaggttatacgaccgacctgggacctcagccacgtcgagtttaagatcagggtagttccgcagatcgaagatcgttatccggcccaaaatgcgatggtgatgatgacgctagttttaccgatggcatcacaaacaaactggtcggatgttttcataaggagatctccaaactgaacgatgagaacggcggatcgtatttacctatcaagacgcagggtttgtcgcccgttcagtccgaggatccagtcatcattgagaaggaggacgatgatgagttcacagacgatcgggcagcggacgacgggtcacctgtacagtactccgataacgtagtgctcgtcaggatatacggtaacaaaacggacctactgatagatcgcaaggcggagacgcaaaactttcttctactgcatacgtatgggctagcgccatcgctgtatgccacgttcaagaacggtctcgtctacgaatacgtacctggaaccaccctgaatacggacagtgtgctctgtccagaaatttggcccttggtcgcccgtcgcatggccgagatgcatcgcaaggtgagaaagcacggggatagttcggcgaccaaacccatgccgatgatttggaagaagacgcagagctttcttgatttagtacctgaacgttttagtgatgctgaaaaacacaaaagagtgaaagaaacgtttctacctatcggccgcctgcgcgaggagttcaacaagctatatgaatacctcgaggctctggacagtccgattgtcttctcccacaacgatcttctgctgggaaatgtgatctatacgcagagcctgaatacggtgaacttcatcgactacgagtatgccgattacaatttccaggccttcgacattggcaaccactttgcggagatgtgcggcgtggatgaggtcgactattcgcgctatccgaagcgcgagttccagctccagtggctgagggtctaccttgaggagtacctacagcgcagcaacattcaaaacgacgaagtcgaactgctctatgtccaggtcaatcagtttgcgctggcatcgcatatcttttggacggtgtggtccctgttgcaagccgagcattccactatcgatttcgactacgtaggctatgcatttcttcgttataatgagtacttggctcgaaaggtggagtttttgtcattgactgcagctaagaacaataagtgatttctctctcccggccactcagcgcattgggagttactacattatgtgcccagtgatatatgtataaactaaggctggaacgggtctcaatgttatacatatgtatatatataacgtgtgttcagaaatcagaaacaaaaaccgaaacaaacttaaattagtgtcgtgttcgtgccagccttagtgtatgtacagtgctcactcgaaacagtggactattgagaaccaagggtgtgcactgaatcgaatttgttcactataacgaatcacagaaaaaataaacaatttaatatatttttcaaaaacaccacgtttgaaaaaatttaatttttttactaagttaagcgaaagtttctaaaatttcataaattaatcgttcacttttactaaaaagttcacatattcgagtgttcactcttaagggagggcactgtatatataaagaatttgtatatgttctttaatttgtataaattgatattttgtagtcataataaagcgaaggtatgtactttaaa

SEQ ID NO: 6459 - protein, 171 aa, DROSOPHILA
MGTETKSNSYTGQISTSGGNPKVMKDSLSLVRQTVNQQTLSLSQSNQVQNQLNSHSNSNSYPNPSGSENKNENEQNSRDIRAKPEDKSRKEAIVPFVPIFVEEADVIQGAKELLKVIRPTWDLSHVEFKIRVVPQIEDRYPAQNAMVMMTLVLPMASQTNWSDVFIRRSPN

SEQ ID NO: 6460 - DNA, 6057 bp, DROSOPHILA
ttttaaatgttaagatatacaaatatattgaaacaattacttcttaggcacgtgccctagaaaataagtagtactaattataaaacaaattatcctctgagaaaggcctttcaagcattcaccaaaaaccaatccactttcacaataccttcaaggcctttcgatcgccaataaagcgccttatttacaaaaaccgaactcttctgacacgaaaagaaaacatcaaaaccctctcgagacaaataggcaatacaacagcaagtggctgccaacaacaaatgaatagaaaaaaaattacacaaatatttaaaataataacgaaaacaatcaataaatatgaaacgttcagcaaagtgttgacttgagggcgcaatcagttgtttaactgcaaatggccaaaaacaaaaggcaatccgaaccaatccaattcagccattcactttcgtggcaagaaaaaggttgtagtgctaccataaaaaattgccatgtccaagaaaccggcgtaattacgtataacatagatgtacgaacgggcaccaagggatctcagcgagactttcaagtcaagtagccggggacccatcaacccactatgaattcggattcggttttggatttggatttgggtttttatatggtaagggaaggggggcgggggttcatagagattaattgaggcaatttggctataacgattttgctgccacttccagttaaaaccgcaaataaaactaactatggcaagaagttggtattatattaagtagtagtgccaaagtaaaagcaatggaaaatcattcacagtttcagagtctacaaataaatacgtctgctcactatgcttttcacgatgataatgatagtagctatgacgatcatgatcatcatgatgatggtggggatgacgatgatgaacgcgtcggcagaagtcgtcggcagagggcacccgctggtggagatcggtcttatgcatttgcattcattatgtttggcaccgtcgacgcgaccacaacgtaactccaagatcggaaccaagtaatcgcggcgtctatagatatatatatatatatagacatcgatatagtacaaccgtataaccagctaacaaccattaccagattgctttggcaacccaatcgtgtcacgtgatcgtgtcgcgatcgctcattctgctcgtcattcatctgtcgccgcgtcttgtgcaatttggctgtcgaatgtggaagaatgtcttgcatctggatttgtgtaccgagctcttaacgtttgtctgccgaaatctgtgatcttagtgtctttcaatcgatccatcgaacaacttgaccttttgagttcgccgatcaggaaattgctaaaaaataaaaaaaagattccttaaatacaaaacagttgaaaatgtctacgccatatgtgatcttgctgatcggtttactatatctttgcgtgggcccattcataattgcccaaggctcggagtttgctgagcgcaaccacaaggtgtgtaggccatggcatcgccactaaacgtatacgatcataaataatactgtcgaaaaaccaatttcaagaaacgccaaatctatcgggaacaagtattgccacatgcgggtggtaagatacccgacaccgcctttgagacggatcgattgtttttgaatcgcctgcagaaggagggcatcgcagtgccagatgggatagttcccgagcagcggaatccgcaggtaaggatcagcgggatgcccagctggattatagcccttttcttgggttctttgggcaagggattaggccaaagatcggcaaatgtggcagttcaagtaaatttgtgttttcgcaaaatatccttcagcaggtcctttttagaagggatcagcaacctatcaaattaagcgaaaattctttagcttgtacacaaagattatgttgctcagtgtagtcaggattccaaaatatgtttacggaaatagcttgttttttttcaaatagatgccaaaacctcaattcggttgtgagggaaataaaaagttagcaaattaagcacagatcaattaatcatttagtaatgctttttatatatttaatccgtgcgttcatttttcaagtttaaacaaattgttataacagcataatccgaatttagcatgcatttatgttttagttgttttcatagatgttcaaaaatgttgtgctcttaaaagtaagtaaagtaaaaaaaactgaattcgaacaagtcaaacatgcttagatgccataaaaattaaggtactgaaagtatcaaccagctatagcaacttgtatcctaaagttgcccaaccacggacatttacataaagcttggagagccaaatagacactcaaaaaccgtatgttcccatccaggtgtatcagtactacagcaagcccatgcgcaccgtcttccacatcgccctgagctcggatgggaggtatacgccgcgggagggacgataccactaccgccaggtgccaacggtggagaccacgtacctgtacccgcaggcggtgggccgccagcacgtggtggtgccaccgaagcacgccctgcccatctaccggcagcttcagttgcacaatccgctgctcaaccaggtcaagttgcagccaaagaagggtgagttgtcggaatgattgaggagtgcaagcaatggctgagctttcgtccaatttagcgcccaattttctggaactggcgcccacggttggcaagagtcagtcgcatccattggccggttcggccaaggcgcagtcttatcagaatgtgaatcttctgcatggtcacagtccggtgctgcccgctttcaagaaaacctccaggggcagcaagacctatgtggacagctatggcacaacccatgtgagtcgagagcaatctaatcccagagcgcttttatgtaatcatttttgggtcttattattacgttttttttctctttttttttgcttagctcttcagcgagtttgacgatctgctgaacaaactggacctgcagcaaacgggacgaaagaattattagttttaatacccaacatgtagtagaatttatgaatatgacagctatgagatctatctccagttaagagttaagtttacaagtggttcgcatccattatctaaccatgtgcatatcatttcaaaacctttgccatacgcccgctcaccgtttagtgcacatccattcccattcccatgtttgcaagccattcgtatccagcccatgcaccgtgaaaaaatgtggtcacaattgaggtaaaactaatgttaaaaccaatacacaacacattttcaaaacattgaaaatatacttcttatttggttattaaagcgtgaagtgatatgcaaccgttttgttttctattgaataaaataaaatattaaattaaaccttttagataactgaagctgtttagctttctaaatcttttcaagttttttgttgtatactctaattgaatttgaaaactatatcaacaggtatttagatttcttttgcgtgcaggcagttgcatccaccacccatcgcttgccaacccacaacccatccacatattgtaccatctaagcttggccaggtgaaatgggaattcatcgcttttagctagttaagcgtaaacaatttgtatcttgcaaaataaaaccatgcgcgtgtccgtacattgttgtatgttgcatttcccacatgaatggtatacttcactatttatatcataattatgtggggagcaggggagcattaagcttcaagccgttcgtttactgtggcaataattgaagcagagctaagttaatttgccgattttggggaatggaaaagcttgggcgggcagcttccaatgcgaaaatcgtaatcgttacacaaatcggatcggtacccttgaaagctccatgctcaagtggctgccgctgggaaaactgcagttcagtgtgattttcaaacccaactcgatcggtcgtctctgcagctccaaagactccaagctaccaccaactagcgacaaagtaggcggaaaagatacatacatagatacttttgtaaccgacataatgatgccaaagctgggctgtttctcattttggctaatgttcgttgtcggagccgcggtggccatcgaagttcaggtgaggattgggtatcggaaaacgagtgtataattatgctagggagtcgattgggaggagtgtgtgccaccccaattgacaaagctctgggtgtcttagccacgttcacttttgacccaaaaattgtagcatgcaatgtactcaatgtgtacactgataaaaaatttatgatttatgatgtgaaaatatactatttaacaaatattttatttacttttgagcataagaagagtttgatgtctgaaagtaaatatgattacagtctcttgaatatttctatcaaagtatatctatccacgagtattgttataatgaggctgtgtcacgcggggatttgggggtactaagaccaaaccggattggggcacgagcagtggcatgtcttatgcaatagaaacatttgatatggttacagaaattcggatatctattcaatccaccgcaaccggaacacccgcagcatcacgagaagaagcaagacttgaacaagatacctggagttccgggcgttgattatccgatttaccacgaggtgccacacacccacttcagttgccacaatgtgccggccactccgggaatgtacgccaacgtggagacgggctgccaggcgtaccacgtgtgccacgatggacgcgaaggtgaccagggcgccaagttcctatgcaccaacggcaccatcttcaaccagaaggaattcgcctgcgattggtggtacaatgtcaagtgtgaggaggctacccacttttaccagtaagttgtatggttaatttgtatatattattttgtttaaactattggtatttcttacagcttgaatgccgatcccgagcacaatccctacattcccaaaaagaaacctgagctggaaccttatgcaaatgatattcatgatgctagcaaatttctgatacaagcttaaatccatttccgttctcattgtgttgttgttgttcccaatcttgtaaataaaaaacataacattataacaaagagtgggtagcccctttttcaattgcatatttgatattttatatgcatatttgatataaacttaaatcgtacatacgtagctagatttttcttttcttttacgcacttttattttttggaattcacctataaaaaactcaccaacgctaatttgacgcacatgtaaaataactgtaagatatttatttatttggtatgtttattttggtatgttttcatggtttagtctgtggtattttgtggctaaacaaggcgttttcagcatttccatgagctgacatcacagtcttattaaaaacaatagcaatattctcgactataatcgctccgctcgaaactagtaataagtataaacgagaaatatgaatctgttagacttgccacaaacactaattcaggacattttggagttgctcccctacgacgaggtggcaaaaaaacgagaggtgagctaataaatgacgtcccaggagtccctgatccatgactaaaactaaacgtttccaatccccaggtgtgcactctatttaattatcttgggcagcaaatattaaacaagggttttaacaagatcattatggcccatgccaagaacttcaagcgcatcaaatccatgctgccacgacgggaatcggaacgcaggtaagtcccctatcacattcgcgatacatcgagatgtttctaatgacttcatggtttttcccccgtcaggaaccacattctatcccgccactcggacatacttacctcgatcgaaacacggatctcgatgctgaccatgacgtactccaagtttattgacctcaacatctgctgtttcatacctggtcgcgttctggacgagatcaacagcatcctgcgcattttgagcacctccactaaacagctgcgaccacatgaagtgctgcaggagctgcgcgacatctcct

SEQ ID NO: 6461 - DNA, 1838 bp, DROSOPHILA
acgcgaccacaacgtaactccaagatcggaaccaagtaatcgcggcgtctatagatatatatatatatatagacatcgatatagtacaaccgtataaccagctaacaaccattaccagattgctttggcaacccaatcgtgtcacgtgatcgtgtcgcgatcgctcattctgctcgtcattcatctgtcgccgcgtcttgtgcaatttggctgtcgaatgtggaagaatgtcttgcatctggatttgtgtaccgagctcttaacgtttgtctgccgaaatctgtgatcttagtgtctttcaatcgatccatcgaacaacttgaccttttgagttcgccgatcaggaaattgctaaaaaataaaaaaaagattccttaaatacaaaacagttgaaaatgtctacgccatatgtgatcttgctgatcggtttactatatctttgcgtgggcccattcataattgcccaaggctcggagtttgctgagcgcaaccacaagaaacgccaaatctatcgggaacaagtattgccacatgcgggtggtaagatacccgacaccgcctttgagacggatcgattgtttttgaatcgcctgcagaaggagggcatcgcagtgccagatgggatagttcccgagcagcggaatccgcaggtgtatcagtactacagcaagcccatgcgcaccgtcttccacatcgccctgagctcggatgggaggtatacgccgcgggagggacgataccactaccgccaggtgccaacggtggagaccacgtacctgtacccgcaggcggtgggccgccagcacgtggtggtgccaccgaagcacgccctgcccatctaccggcagcttcagttgcacaatccgctgctcaaccaggtcaagttgcagccaaagaaggcgcccaattttctggaactggcgcccacggttggcaagagtcagtcgcatccattggccggttcggccaaggcgcagtcttatcagaatgtgaatcttctgcatggtcacagtccggtgctgcccgctttcaagaaaacctccaggggcagcaagacctatgtggacagctatggcacaacccatctcttcagcgagtttgacgatctgctgaacaaactggacctgcagcaaacgggacgaaagaattattactccatgctcaagtggctgccgctgggaaaactgcagttcagtgtgattttcaaacccaactcgatcggtcgtctctgcagctccaaagactccaagctaccaccaactagcgacaaagtaggcggaaaagatacatacatagatacttttgtaaccgacataatgatgccaaagctgggctgtttctcattttggctaatgttcgttgtcggagccgcggtggccatcgaagttcagaaattcggatatctattcaatccaccgcaaccggaacacccgcagcatcacgagaagaagcaagacttgaacaagatacctggagttccgggcgttgattatccgatttaccacgaggtgccacacacccacttcagttgccacaatgtgccggccactccgggaatgtacgccaacgtggagacgggctgccaggcgtaccacgtgtgccacgatggacgcgaaggtgaccagggcgccaagttcctatgcaccaacggcaccatcttcaaccagaaggaattcgcctgcgattggtggtacaatgtcaagtgtgaggaggctacccacttttaccacttgaatgccgatcccgagcacaatccctacattcccaaaaagaaacctgagctggaaccttatgcaaatgatattcatgatgctagcaaatttctgatacaagcttaa

SEQ ID NO: 6462 - protein, 480 aa, DROSOPHILA
MSTPYVILLIGLLYLCVGPFIIAQGSEFAERNHKKRQIYREQVLPHAGGKIPDTAFETDRLFLNRLQKEGIAVPDGIVPEQRNPQVYQYYSKPMRTVFHIALSSDGRYTPREGRYHYRQVPTVETTYLYPQAVGRQHVVVPPKHALPIYRQLQLHNPLLNQVKLQPKKAPNFLELAPTVGKSQSHPLAGSAKAQSYQNVNLLHGHSPVLPAFKKTSRGSKTYVDSYGTTHLFSEFDDLLNKLDLQQTGRKNYYSMLKWLPLGKLQFSVIFKPNSIGRLCSSKDSKLPPTSDKVGGKDTYIDTFVTDIMMPKLGCFSFWLMFVVGAAVAIEVQKFGYLFNPPQPEHPQHHEKKQDLNKIPGVPGVDYPIYHEVPHTHFSCHNVPATPGMYANVETGCQAYHVCHDGREGDQGAKFLCTNGTIFNQKEFACDWWYNVKCEEATHFYHLNADPEHNPYIPKKKPELEPYANDIHDASKFLIQA

SEQ ID NO: 6463 - DNA, 4046 bp, DROSOPHILA
ggttgaatcgtgtaccgcggctgcagcgtcctaatgaaatttacgaatcctggtccttcaatgaactcaaaggagtgatttagtagcatgagggccaacttctcatcacagcgtttgctgtaggatatatcctcggtgtccaatggatctgaatctgtttcctaaaatgattaatagaataatttaatgcatcagattagtgaaaaacgcataatttataaaaatataatactaagaccataacagtacatttttaaaacctccttaactacactttataaacacaacacatgtttgccgatctagccaaacgcggataaaaatccgcatccgctgttgctatattagtaaaaagttttaaataagagaaggcataaattactttatgaactaccaaagaaactatatttgaatggaaacttaagtttggggaaaccatctccacatgacagaatatctagaagggcatgtaccccgatttcacataaggtacacttcttgcacagtacatatgcatgtacataggtatgtatgcacatctatatgctatcccacttacgtgcagattcaattctagctgggctgtggggtgctgtggcgaaccgatggagatctcgctcttaaccaggtccaggtactttatgtccccggatagagataggaactccggtgggtgcttgctcttcagatgattccgcagacatgttgtgccgcgtcctcgcctcgagtagttcctgttgcacagcagacaggtggccactgtgccggatgtcttgtagaagtactgccacacattgcttttcttcttgctcatcgctgcaattctttggtaattctcaaattgtacattttttgcggatgtccacatccgcctctacatccgttctgcggcagagttcgacatccctggcagatatcgataggcccatcgatgaccatcactaatatgctgcaatcagtttttggcgcgccaaagcagctgttgttttttgcattcgaggtttttgaggcatttgcaaattcattcgttaactagataatgccctgtgcgatggagctgcccagcacgcccgatgaactggccgcccagcaagcggacagcgctgcactcaaggacttgctcaaggatcccagtcgttggcactcgattcccctgctcaactacacgcctcttcacaagctgaaggatcagactctggtgcgctttcgtggaatgatccaggacatgatggacccagaaatctatctggagcgctacgaagtgaaatccgccgacggcagcaaacgtgtacaggaaggaaagtacagggactgcttgaaaatagccaatggcgaagtgattgactacaacgccgatggaaacgtgcatggagagaggcgtaccatgttcgtggtctctgtgcctggtctgaacgattggagcaaggagcatgagaagctgtgctgtccccagatcgatttggccagtctgggtcaatctcccagttcagccaagaagcggactattgtaggcgaagaagaagccatggatgtggacgttgcgagcgaaacaacgttcaagcgaccctgcctaaaagagattcaaaaagatagcgagccagtcggcgcctccaaatcctctgttcttgggtctgattacctgattaactcgcctctgccggatcgtcccagcatggcatgcatggtaaaggtttacgaggagttcgatacctaccagcttaactcgctggtcgactttgtgggctttctgtcagtggatgcttcactagacgccgctaccctggaaatagacgattgtgaaaacttgagtgaactgcaggcagctcatccatcgccatttcttataccccgcctgcatgccttcggagtccaggtgctgccgcatgccaatccgctgctggacaaaagccttcgacagccaacggaaatatgtgaggagacgtatccaacccaccttgctgtgcacaaagatctgcgcatgcttcttaaactctgcctctttgatgacgatctggctgccgagtatttgctctcccacctaatatctacggtctacagtcgttctgagatgcagagcatcggcaagttcgcccttaacctttgtaatctccctaagaattgtgaggcgtatgcaaccaagttgtatcaaattctggagctgctactgccggccagccattacatgcccatgactctcgtcacactaaacacggcagcctttgccccaaagtaagttggctaagcagaaatagtataaaattgaatacctattaatgagtacttgcaggaaggattatgagacaaacaagctggtttccggcgtactacagttggctccccatacgcatttggtgctcgacgagacgtgcatgcaacagggcaagctggaggccaatggtgttcatgccgttcagcatttagcgcacttgatcaataatcaggaactgaagtgcgactttcagtattaccaaatagactaccaagcaaatattccagttctcgtgctcagtgaagggcgaagtatgttgccggtaagaatataagtttatataaataatcattatatccaatagaaactattaatgatatgttttcagagcgattttgtgctgcccattaatgccgattctaaggccgtggaacttgttgatgaatctctaaaggcagcccaccactatctgcagccatcacgtctgcagcagtttcgcaagtacttgaccacagcgcgcactagcggcttcaacgtgagcgaggagcacactgaaatgatccagcaggatttcgtggacatgcgtaaagctaatgtcaaaagtaatgccgatgatctgcatggattgctggtcctctcacggctgctgggcatcgcccgggggaaggatacgttggacaaagaaacatggcagctggctacggagttcgaagcaaagcgtcgccagcgtattcaatctctgccgaaatcatctgcccaattgcgcaattaagagggcctctcttttataccatttaatattaagtttttataaataaaatagaattttttaaaattattctctttatatttaatttgtagctttacaggcaagtctagtaatttagtactcaagtaaatgggactctaggagcgtcatgactcttggtccactacaacttcatgacttaaatgctcgaaacgcccttcgattagctgactggccaggcaatctccgcacagattaaggtaacaataacaactgttacaacgccattgggtcctggtcacagatgcctcttcgcactcggcacacttggcggccagcaagtctggctcatatccgtcctccatttcccgtttctcgtcctgaatggctgatagaagcttaaggcatagttcctgttttcgctttgactccgcattcagatcggcatccatgtactcggattcgatctttggttcgatcttggatgccggcataaggagcatatcgctcgcaggcgatgggattcgcaggtcgtcaaatgtgaaatcgtcctctggcatttgtagcgatatattatgagcggggaagaaggttgacttgcgaagtttgatcttcggcttactcaaaccaggacgtcgatgcttgggtatgcgaccgggcacaggcattccggcatcgtgcagcttttggaaatacttctggacacgactatacacttgctgtgccgttctgttgcccaaggccttcgctatcttcccgaatctgcgcatttccacttcctctggcggatactggatgagcagctgctccaagcgactctgctcttcgttggtccacaagcgattgaaattctccgaccgtccattgctcctgtcccgattcttgttcgcctcttgcgtccatgaagacgcatcggtcggtgtctcatttgtgcccccttcctcgtcattgggcgacagagttggcaagtccggtagaacggtcgtggtgatgtaattatccgctatcaaaggctcgttgtttcgcagtttgtccagcatatgttgcggattctccaagtagatattttgtgtggcttccaattcctca

SEQ ID NO: 6464 - DNA, 1922 bp, DROSOPHILA
gtttttgaggcatttgcaaattcattcgttaactagataatgccctgtgcgatggagctgcccagcacgcccgatgaactggccgcccagcaagcggacagcgctgcactcaaggacttgctcaaggatcccagtcgttggcactcgattcccctgctcaactacacgcctcttcacaagctgaaggatcagactctggtgcgctttcgtggaatgatccaggacatgatggacccagaaatctatctggagcgctacgaagtgaaatccgccgacggcagcaaacgtgtacaggaaggaaagtacagggactgcttgaaaatagccaatggcgaagtgattgactacaacgccgatggaaacgtgcatggagagaggcgtaccatgttcgtggtctctgtgcctggtctgaacgattggagcaaggagcatgagaagctgtgctgtccccagatcgatttggccagtctgggtcaatctcccagttcagccaagaagcggactattgtaggcgaagaagaagccatggatgtggacgttgcgagcgaaacaacgttcaagcgaccctgcctaaaagagattcaaaaagatagcgagccagtcggcgcctccaaatcctctgttcttgggtctgattacctgattaactcgcctctgccggatcgtcccagcatggcatgcatggtaaaggtttacgaggagttcgatacctaccagcttaactcgctggtcgactttgtgggctttctgtcagtggatgcttcactagacgccgctaccctggaaatagacgattgtgaaaacttgagtgaactgcaggcagctcatccatcgccatttcttataccccgcctgcatgccttcggagtccaggtgctgccgcatgccaatccgctgctggacaaaagccttcgacagccaacggaaatatgtgaggagacgtatccaacccaccttgctgtgcacaaagatctgcgcatgcttcttaaactctgcctctttgatgacgatctggctgccgagtatttgctctcccacctaatatctacggtctacagtcgttctgagatgcagagcatcggcaagttcgcccttaacctttgtaatctccctaagaattgtgaggcgtatgcaaccaagttgtatcaaattctggagctgctactgccggccagccattacatgcccatgactctcgtcacactaaacacggcagcctttgccccaaagaaggattatgagacaaacaagctggtttccggcgtactacagttggctccccatacgcatttggtgctcgacgagacgtgcatgcaacagggcaagctggaggccaatggtgttcatgccgttcagcatttagcgcacttgatcaataatcaggaactgaagtgcgactttcagtattaccaaatagactaccaagcaaatattccagttctcgtgctcagtgaagggcgaagtatgttgccgagcgattttgtgctgcccattaatgccgattctaaggccgtggaacttgttgatgaatctctaaaggcagcccaccactatctgcagccatcacgtctgcagcagtttcgcaagtacttgaccacagcgcgcactagcggcttcaacgtgagcgaggagcacactgaaatgatccagcaggatttcgtggacatgcgtaaagctaatgtcaaaagtaatgccgatgatctgcatggattgctggtcctctcacggctgctgggcatcgcccgggggaaggatacgttggacaaagaaacatggcagctggctacggagttcgaagcaaagcgtcgccagcgtattcaatctctgccgaaatcatctgcccaattgcgcaattaagagggcctctcttttataccatttaatattaagtttttataaataaaatagaattttttaaaatt

SEQ ID NO: 6465 - protein, 605 aa, DROSOPHILA
MPCAMELPSTPDELAAQQADSAALKDLLKDPSRWHSIPLLNYTPLHKLKDQTLVRFRGMIQDMMDPEIYLERYEVKSADGSKRVQEGKYRDCLKIANGEVIDYNADGNVHGERRTMFVVSVPGLNDWSKEHEKLCCPQIDLASLGQSPSSAKKRTIVGEEEAMDVDVASETTFKRPCLKEIQKDSEPVGASKSSVLGSDYLINSPLPDRPSMACMVKVYEEFDTYQLNSLVDFVGFLSVDASLDAATLEIDDCENLSELQAAHPSPFLIPRLHAFGVQVLPHANPLLDKSLRQPTEICEETYPTHLAVHKDLRMLLKLCLFDDDLAAEYLLSHLISTVYSRSEMQSIGKFALNLCNLPKNCEAYATKLYQILELLLPASHYMPMTLVTLNTAAFAPKKDYETNKLVSGVLQLAPHTHLVLDETCMQQGKLEANGVHAVQHLAHLINNQELKCDFQYYQIDYQANIPVLVLSEGRSMLPSDFVLPINADSKAVELVDESLKAAHHYLQPSRLQQFRKYLTTARTSGFNVSEEHTEMIQQDFVDMRKANVKSNADDLHGLLVLSRLLGIARGKDTLDKETWQLATEFEAKRRQRIQSLPKSSAQLRN

SEQ ID NO: 6466 - DNA, 5856 bp, DROSOPHILA
tcaaaacttaactatctctgtttattgtgtgttatattgcttttgggggtatttgctcaaaaatcaacgtcataaaactgaaacgaaattaaatgaaaaattatgacacgaaagaaaaaacaaaacgattgaatacagtgcgcaccagataagctcaacttgagtggtttaagtgttaaacaaaatgtgcgctacaaaatcaagcatgtgtttgctaagtatatcttagagagaacataaactattgatttgttgttcgctatgtcgagagtgcactgtatttggcgaaaaggaaaataccgcaacgcaaattgcacgcacacacacacacgtggtccaattgcgctgcaaacaaatataggcgaaaaaagtataataatctaatgtttttggtttttcttttttctgacaatttacatctgtgtgcgtaaatcgagttgataaagtttaatctgccctctcgctctatcaactaacctgattaatgccactctcgctcatatttgtatttgttttattttatatttgtatttattttcctctccggttgttcgattcttttaattgctgcccctcagctgatgcgttttcaaatggcaaattgtggaaagcgtggttcgaacttccaataaccgtacattgccgactagaatccagttgcagagaagcaatttcacgaaatttagttaatattattaattttttttaaatgcacatgatgtaacgttaaggtgaccaactcatgttgttcgctgacatccggcgttagtgcatttttatgccttcccatgtctagtatatttttatgccagtcgaaagcttaatatggtattttttcaattcgctgccatatttaattgaaattaatttttttcaattactaccacctagcttatttttatttttattgtctaatttaaattttgtctaatttaaaaatagaatttaccctgacaatgattttcactgattggaaatggtcacactagccagtttccagttagccagaatgtaacggcgcctttcccgctccaattggaatccgcgtgtaattttgtgtctcgtgttaattgtattatttcccccgcttttcggatttccgcataaaaagcgatgagtctacaggacgagagttttccgacggacgagctgtttgaccagctgaacaatttgagtagcagtggcgccaggaatacctggttcgcggagcaccataagcccgcagtcttcgagcgggatacagcgccatttttggagatctgctacgcggatccagactttgatgcggatggggatgtggccaacaagagcgccaagacatgcgtaagcgatcccgtgggtcgtgatcaggaggatgaggacgactatgatgaggatgtcgatggtaagaagtgttcgctctctctctacacttgcttaactacaatgggagaaatattcccatcaaacatatctcatatatgtataattttggtacttccatgtctcgatgtataatgggtacttcattcaatgggcacagtcaattagctagtgctaacatgtatcctttcttattcaaccaggcgatgatcataaactgggttgcgagaaggctccattgggcagcgggcgctccagcaaggcggtctcttaccaggacatccattcggcctacacgaagcgccgcttccagcacgtgaccagcaaggtgggccagtacatagcggagatccaggcgcaggaccaaaagagacgcaatgtgaagttcgccggattccagcgagtgaactctatgccggagagtctaacgcccacattgcagcaggtgtatgtccatgatggtgacttcaaggtggacaaaaactgccagactcactccaactccgattcgaattacaattccaattcaaacaactctagcagcagctttgatcgattgctggccgagaacgagagcctgcagcaaaagatcaactcattgagagtagaagcgaagcgtctgcagggcttcaacgagtatgtccaggaacgactggacagaaagacagatgattttgtgaagatgaagtgcaatttcgagaccctgcgcaccgagctaagcgaatgccagcagaagcttaggcgccagcaggacaactcacagcaccacttcatgtaccacattcgatcggcgaccagtgccaaggccactcaaacggatttcctggtggacaccatacccgcctccggaaacgtcctggtcacaccccatcccctgggcgacctgacctacaacagcagcaaaggatccatcgagttggcactgctcagtgtggcgccttctgcccgagtggcccagaatcccgtccaggtccaacgcgcgattcatccacaatctttggactttagcagcgttagcaccgaagctgatggcagcggtagtggtaagcaatcgcaatgctattttattagatctgtagattatttcgaataagattgactaacatggatttttgttggtttctattcaaggcgaacatcgtgtggaaacctcatccagggccttggtcagaagaaccccggcgcccaacaactcggaaaccagccagccgagcagcaacgactcggccatcgaggtggaggcgcacgaggaggagcgacccagctccaggcggcagtgggaacaacagggggagctcatctcgcccaggcaatggggccagcatgagggcatgtactactttgacaagcgcaacaaccgagtcatcgaggtgatgggcttcaatatcagtcaggggcgcaatcagagccatgacaccattcataatcagagcatcaacgatagtcagacgcgtctgctggtccactcgatgtcgatgtcgcatttggaggcgcatgaccactttaggagtaaaaggacgacactgggcagtcggatgctacgattcctggggccctgcgttcgctgccgtaatggtgatccattgaaccgcagcaatgtcacatacaaggatggtttgcctgcgatgcccgaggaggagttcgttgaccaaaggaaccagcgctagtccagccttccaccatccacttttatttatttattgtatgtattatcatatcctgttattttatgtcgcgttatgtcgattcaattagtccaaatttttaatgccatagcattcagttaaccaatatgtgcatgtataaccaaatttgaaattcgttagtaactttcctccaaaggaaaataatctttttggcgaattgtgtagtgaaacgtattatttatttctatccaagcaaatttgtacttgttttaataaaaaaattttgcacacttgcatttatatccgatttgttcgggttgatatatcatgtattgaaatcatgtgaatcccatgcagattcagttacattgacagtggctgctttgcgacttcggccacactggcagtttcaattacgcagagcttcagcattcgtcaccaatgtttcgcaccatttcgcatttttggagatctgctacgcggatccggactttgatgcggatgtggccaacaagagcgccaagacatgcgtaagcgatcccgtgggtcgcgatcaggaggatgaggacgactatgatggggatgtcgatggtaagaagcttttccccctccccatcccactctcttaacttgcttaactaaactaggagaaatattcccatcaaacatatttcatatacagggaactttttctgtgcacgttaccttttgttataacttcatacgctttcatttcaaaatttgtttcttaccattcatacatatataattttgatacttccatatctcgctgtaaaatgggtacttcagacaatgtgcacagccaattggccagtgctaacatgtatcctttcttcttcaaccaggtgatgatcataaactaggtggcgtggaggctccatcgggcagcgggcggtctagaaaggcggtcaactacctggacatccactcggcctacacgaagcgccgcttccagcacgtgaccagcaaggtgggccagtacatagcggagatcaaggcgcaggaccaaaagagcgacatgccgaagagtctaacgcccacattgcagcaggtgtatgtccatgatggtgacttcaaggtggacaagaactgccagactcactccaactccaattcgaactgcaattccaattcaaacaactccagcagcaactttgatcgattgctggccgagaacgatagtctgcagcaggagatcgagtcattgaaagcagaggcgaagcgtatggaggggttcaacgtgtatctccgggaacgactgaacagaaagagagatgattatgtgacgattaagtgcagttttgagaccctacgcaccgagctaagcatatgccagtataggctgagtcgccagaaggacaactcacagccccacttcatgtaccacattcgatcggaaaaggccactcaaacggatttcctggtggacgccatacccgcgtccgaaaacgtcctggtcacaccccatccccttggcgacttgacgcctactgcccgagtggcccagaatcccgtccaggtccaacgcgctattcacccccaatccttagacttaagcagcgttaaaacggaagctaatgccagcggtagtggtaagcaatcctatatgctattgaataagatctgtagattatttctattcaaggcgaacatcatgtggacacctcatccatggcgttggtcagaatgaccccggcgcccattcaatctcctccagccaatggggccagcatgacggcatgtactactttgacaagcgcaacaaccgagtcatcgaagcttcaatatcagtcagcggagcaatcagagccaagacaccattcataatcagagcatcagcgatagtcagaagcgtttgctggtccgctcgatgtcgatgtcttgcctgcgatgcccgaggaggagttcgttgaccaaaggaaccagcgctagtccagcctccactatccacttttatttatttattgtatgtataatcatatcctgctaagtgatccaattagtcgaaatttttaatgccacagcattcagttaaccaatatgtgcatgtataaccaaatttcgaattcgttagtgactttcctccaaaggaaaataatctttttggcgaattgagtagtgaaacgtaatatgtttttctaaccaagcatatatgtacttgttttaataaaaaaaaaatttgcacaatgtgtccgaattgtgcgggtagacatttttgaaatcatgtgaatcacatgcagtttcggtcacactggcagtggctgctttgcgacttcggccacactggcagttccaatttagcagagcttcagcattcgtcaccaatatttcgcaccctttcgctccgaaaatgtacaaacgatctgcgattcaagtttgctaagatttattgtgggttttgctttctcgaatacacttgcacggcgatgaacgaacgcgtttgcagcttccactggtggagttgacaataactactctctatgcattatattatttattgttctgtttttttattgagtttttttcaaatgtttttgttggtttctttacacttgtttgtttgtatcttgtttgcataataaattatagttaaattaaaagtaaaatgttatcaagttagtaatttttttttaggtttttcaggcggggtgggtgctggtgggtcgggcgggctttttgggggataaatcattaaggtcgtgtcgtggttagtccatcgatcggctaagatgaacaaaatataaacataacaaacttaataaagagtgggtatcgtgggcggtttcgggtgggggaaatgctgaacataaacaataggcgcaaacat

SEQ ID NO: 6467 - DNA, 2870 bp, DROSOPHILA
ttagccagaatgtaacggcgcctttcccgctccaattggaatccgcgtgtaattttgtgtctcgtgttaattgtattatttcccccgcttttcggatttccgcataaaaagcgatgagtctacaggacgagagttttccgacggacgagctgtttgaccagctgaacaatttgagtagcagtggcgccaggaatacctggttcgcggagcaccataagcccgcagtcttcgagcgggatacagcgccatttttggagatctgctacgcggatccagactttgatgcggatggggatgtggccaacaagagcgccaagacatgcgtaagcgatcccgtgggtcgtgatcaggaggatgaggacgactatgatgaggatgtcgatggcgatgatcataaactgggttgcgagaaggctccattgggcagcgggcgctccagcaaggcggtctcttaccaggacatccattcggcctacacgaagcgccgcttccagcacgtgaccagcaaggtgggccagtacatagcggagatccaggcgcaggaccaaaagagacgcaatgtgaagttcgccggattccagcgagtgaactctatgccggagagtctaacgcccacattgcagcaggtgtatgtccatgatggtgacttcaaggtggacaaaaactgccagactcactccaactccgattcgaattacaattccaattcaaacaactctagcagcagctttgatcgattgctggccgagaacgagagcctgcagcaaaagatcaactcattgagagtagaagcgaagcgtctgcagggcttcaacgagtatgtccaggaacgactggacagaaagacagatgattttgtgaagatgaagtgcaatttcgagaccctgcgcaccgagctaagcgaatgccagcagaagcttaggcgccagcaggacaactcacagcaccacttcatgtaccacattcgatcggcgaccagtgccaaggccactcaaacggatttcctggtggacaccatacccgcctccggaaacgtcctggtcacaccccatcccctgggcgacctgacctacaacagcagcaaaggatccatcgagttggcactgctcagtgtggcgccttctgcccgagtggcccagaatcccgtccaggtccaacgcgcgattcatccacaatctttggactttagcagcgttagcaccgaagctgatggcagcggtagtggcgaacatcgtgtggaaacctcatccagggccttggtcagaagaaccccggcgcccaacaactcggaaaccagccagccgagcagcaacgactcggccatcgaggtggaggcgcacgaggaggagcgacccagctccaggcggcagtgggaacaacagggggagctcatctcgcccaggcaatggggccagcatgagggcatgtactactttgacaagcgcaacaaccgagtcatcgaggtgatgggcttcaatatcagtcaggggcgcaatcagagccatgacaccattcataatcagagcatcaacgatagtcagacgcgtctgctggtccactcgatgtcgatgtcgcatttggaggcgcatgaccactttaggagtaaaaggacgacactgggcagtcggatgctacgattcctggggccctgcgttcgctgccgtaatggtgatccattgaaccgcagcaatgtcacatacaaggatggtttgcctgcgatgcccgaggaggagttcgttgaccaaaggaaccagcgctttcaattacgcagagcttcagcattcgtcaccaatgtttcgcaccatttcgcatttttggagatctgctacgcggatccggactttgatgcggatgtggccaacaagagcgccaagacatgcgtaagcgatcccgtgggtcgcgatcaggaggatgaggacgactatgatggggatgtcgatggtgatgatcataaactaggtggcgtggaggctccatcgggcagcgggcggtctagaaaggcggtcaactacctggacatccactcggcctacacgaagcgccgcttccagcacgtgaccagcaaggtgggccagtacatagcggagatcaaggcgcaggaccaaaagagcgacatgccgaagagtctaacgcccacattgcagcaggtgtatgtccatgatggtgacttcaaggtggacaagaactgccagactcactccaactccaattcgaactgcaattccaattcaaacaactccagcagcaactttgatcgattgctggccgagaacgatagtctgcagcaggagatcgagtcattgaaagcagaggcgaagcgtatggaggggttcaacgtgtatctccgggaacgactgaacagaaagagagatgattatgtgacgattaagtgcagttttgagaccctacgcaccgagctaagcatatgccagtataggctgagtcgccagaaggacaactcacagccccacttcatgtaccacattcgatcggaaaaggccactcaaacggatttcctggtggacgccatacccgcgtccgaaaacgtcctggtcacaccccatccccttggcgacttgacgcctactgcccgagtggcccagaatcccgtccaggtccaacgcgctattcacccccaatccttagacttaagcagcgttaaaacggaagctaatgccagcggtagtggcgaacatcatgtggacacctcatccatggcgttggtcagaatgaccccggcgcccattcaatctcctccagccaatggggccagcatgacggcatgtactactttgacaagcgcaacaaccgagtcatcgaagcttcaatatcagtcagcggagcaatcagagccaagacaccattcataa

SEQ ID NO: 6468 - protein, 918 aa, DROSOPHILA
MSLQDESFPTDELFDQLNNLSSSGARNTWFAEHHKPAVFERDTAPFLEICYADPDFDADGDVANKSAKTCVSDPVGRDQEDEDDYDEDVDGDDHKLGCEKAPLGSGRSSKAVSYQDIHSAYTKRRFQHVTSKVGQYIAEIQAQDQKRRNVKFAGFQRVNSMPESLTPTLQQVYVHDGDFKVDKNCQTHSNSDSNYNSNSNNSSSSFDRLLAENESLQQKINSLRVEAKRLQGFNEYVQERLDRKTDDFVKMKCNFETLRTELSECQQKLRRQQDNSQHHFMYHIRSATSAKATQTDFLVDTIPASGNVLVTPHPLGDLTYNSSKGSIELALLSVAPSARVAQNPVQVQRAIHPQSLDFSSVSTEADGSGSGEHRVETSSRALVRRTPAPNNSETSQPSSNDSAIEVEAHEEERPSSRRQWEQQGELISPRQWGQHEGMYYFDKRNNRVIEVMGFNISQGRNQSHDTIHNQSINDSQTRLLVHSMSMSHLEAHDHFRSKRTTLGSRMLRFLGPCVRCRNGDPLNRSNVTYKDGLPAMPEEEFVDQRNQRFQLRRASAFVTNVSHHFAFLEICYADPDFDADVANKSAKTCVSDPVGRDQEDEDDYDGDVDGDDHKLGGVEAPSGSGRSRKAVNYLDIHSAYTKRRFQHVTSKVGQYIAEIKAQDQKSDMPKSLTPTLQQVYVHDGDFKVDKNCQTHSNSNSNCNSNSNNSSSNFDRLLAENDSLQQEIESLKAEAKRMEGFNVYLRERLNRKRDDYVTIKCSFETLRTELSICQYRLSRQKDNSQPHFMYHIRSEKATQTDFLVDAIPASENVLVTPHPLGDLTPTARVAQNPVQVQRAIHPQSLDLSSVKTEANASGSGEHHVDTSSMALVRMTPAPIQSPPANGASMTACTTLTSATTESSKLQYQSAEQSEPRHHS

SEQ ID NO: 6469 - DNA, 3129 bp, DROSOPHILA
ataatgaggctgtgtcacgcggggatttgggggtactaagaccaaaccggattggggcacgagcagtggcatgtcttatgcaatagaaacatttgatatggttacagaaattcggatatctattcaatccaccgcaaccggaacacccgcagcatcacgagaagaagcaagacttgaacaagatacctggagttccgggcgttgattatccgatttaccacgaggtgccacacacccacttcagttgccacaatgtgccggccactccgggaatgtacgccaacgtggagacgggctgccaggcgtaccacgtgtgccacgatggacgcgaaggtgaccagggcgccaagttcctatgcaccaacggcaccatcttcaaccagaaggaattcgcctgcgattggtggtacaatgtcaagtgtgaggaggctacccacttttaccagtaagttgtatggttaatttgtatatattattttgtttaaactattggtatttcttacagcttgaatgccgatcccgagcacaatccctacattcccaaaaagaaacctgagctggaaccttatgcaaatgatattcatgatgctagcaaatttctgatacaagcttaaatccatttccgttctcattgtgttgttgttgttcccaatcttgtaaataaaaaacataacattataacaaagagtgggtagcccctttttcaattgcatatttgatattttatatgcatatttgatataaacttaaatcgtacatacgtagctagatttttcttttcttttacgcacttttattttttggaattcacctataaaaaactcaccaacgctaatttgacgcacatgtaaaataactgtaagatatttatttatttggtatgtttattttggtatgttttcatggtttagtctgtggtattttgtggctaaacaaggcgttttcagcatttccatgagctgacatcacagtcttattaaaaacaatagcaatattctcgactataatcgctccgctcgaaactagtaataagtataaacgagaaatatgaatctgttagacttgccacaaacactaattcaggacattttggagttgctcccctacgacgaggtggcaaaaaaacgagaggtgagctaataaatgacgtcccaggagtccctgatccatgactaaaactaaacgtttccaatccccaggtgtgcactctatttaattatcttgggcagcaaatattaaacaagggttttaacaagatcattatggcccatgccaagaacttcaagcgcatcaaatccatgctgccacgacgggaatcggaacgcaggtaagtcccctatcacattcgcgatacatcgagatgtttctaatgacttcatggtttttcccccgtcaggaaccacattctatcccgccactcggacatacttacctcgatcgaaacacggatctcgatgctgaccatgacgtactccaagtttattgacctcaacatctgctgtttcatacctggtcgcgttctggacgagatcaacagcatcctgcgcattttgagcacctccactaaacagctgcgaccacatgaagtgctgcaggagctgcgcgacatctcctccatggccattgagcatttcgacgaaaagattgctgtgaatttcaaattggaacaccgaaaacaattggcggaatccacggcggccggagctcgacttgtggtttgcagtgccttgggcgacataagctttagtggcgtaaggcgaaccggaatcagtcgtcccgtagatcatgggctcgtccagcaggctatcgttcagttggcccccatatctgccagcaaatcacactctgattcctctcaaaaggatcgcatgtctaaacaactgttcaagcaataccagctccaaaggtcactttcgcaaaagattcgcctcttggaagtgtcgcgcaaggtgcaggatcgccgattgcaggaagccctatccagcatcaccgaactgaccacccaagtgtccgaacttaagcgccaaatggaggatgtggtggccaatatgcccagttgcgctgttaaacgtcaggctgtcgccagcgcggactgcttaccaccggccctgaaaaaacccaaggtgtagccaaggattagcaatactaaatagcttttaaataaaacttccctccagatggtgtagctggagtacgtagcattaattaggcagtgcatcttcgatatatcgcgttaagatttattgttgcacttgttacttaaatattgtattactactatataaatacattgaacatctagtgaaaagttctcatttacgtaatcgcaatcgcctgaccttgatggatgatttcgtctgtatagtttttggttgaatgaacagtacgtcttgggttgtcccgcctcacaacttcagtcagcgatagtaactctggctttcatttagttcgttagttggtagagaaccatcccgggacggtcccttgctattgttagtgacttaaactagcgctctatgtgtgtggatatctgggtctgtgtcgttctatgatgctatggtaattactcgttatcttagcgtataaaaggtagtagaaattgcaacacgttagcatggtttctttgagggtctttgacttaattcgaaagctaactacgtagtacgtacatacactaaggctctctatatacaataacacaaatgggaggagggtggggggttaacattttcggggagggtaaatattgcataacaaaaaatttaaatggaaaacaaaattcattgcaaacttcttatcgacgtaatgtataaactagtcaaaattgaaagcattgccacgttgaaatatgaacagttacatctctctatatccgatcctactctcttatcttacagttagtaatagtgtcagttagtcaactgggagataaacgttgcattaatatgtgtgttttgtgtgtccatggattaactcgtagacatttctatatttcacccaattatcaattatctgctcactagcgatggcgaatcacataggtatacacatttcttaatatgtacatctgcgctgggttcctaatcaaaattcctatccttatctttatctgtgcctgaatctttcgtg

SEQ ID NO: 6470 - DNA, 992 bp, DROSOPHILA
actataatcgctccgctcgaaactagtaataagtataaacgagaaatatgaatctgttagacttgccacaaacactaattcaggacattttggagttgctcccctacgacgaggtggcaaaaaaacgagaggtgtgcactctatttaattatcttgggcagcaaatattaaacaagggttttaacaagatcattatggcccatgccaagaacttcaagcgcatcaaatccatgctgccacgacgggaatcggaacgcaggaaccacattctatcccgccactcggacatacttacctcgatcgaaacacggatctcgatgctgaccatgacgtactccaagtttattgacctcaacatctgctgtttcatacctggtcgcgttctggacgagatcaacagcatcctgcgcattttgagcacctccactaaacagctgcgaccacatgaagtgctgcaggagctgcgcgacatctcctccatggccattgagcatttcgacgaaaagattgctgtgaatttcaaattggaacaccgaaaacaattggcggaatccacggcggccggagctcgacttgtggtttgcagtgccttgggcgacataagctttagtggcgtaaggcgaaccggaatcagtcgtcccgtagatcatgggctcgtccagcaggctatcgttcagttggcccccatatctgccagcaaatcacactctgattcctctcaaaaggatcgcatgtctaaacaactgttcaagcaataccagctccaaaggtcactttcgcaaaagattcgcctcttggaagtgtcgcgcaaggtgcaggatcgccgattgcaggaagccctatccagcatcaccgaactgaccacccaagtgtccgaacttaagcgccaaatggaggatgtggtggccaatatgcccagttgcgctgttaaacgtcaggctgtcgccagcgcggactgcttaccaccggccctgaaaaaacccaaggtgtag

SEQ ID NO: 6471 - protein, 314 aa, DROSOPHILA
MNLLDLPQTLIQDILELLPYDEVAKKREVCTLFNYLGQQILNKGFNKIIMAHAKNFKRIKSMLPRRESERRNHILSRHSDILTSIETRISMLTMTYSKFIDLNICCFIPGRVLDEINSILRILSTSTKQLRPHEVLQELRDISSMAIEHFDEKIAVNFKLEHRKQLAESTAAGARLVVCSALGDISFSGVRRTGISRPVDHGLVQQAIVQLAPISASKSHSDSSQKDRMSKQLFKQYQLQRSLSQKIRLLEVSRKVQDRRLQEALSSITELTTQVSELKRQMEDVVANMPSCAVKRQAVASADCLPPALKKPKV

SEQ ID NO: 6472 - DNA, 21729 bp, DROSOPHILA
tgggtgtgtgtggagcaaagaggtgtatgagctttagaaaaatatgaattatgtttgattccatttccgttccattctattccatttagtattgaaaatatgaaaaagtttattcgatataatgcggttaacactatgctgtactatatgatcgaatgttgctattacttgaatgctgctttcattagttatttagttctgcgatctctgctgattcgaaagttgagcgacatcgaggaggtaaattatagtcgctaccgtatgagtattcgattaataattatttacgagaaaaatatagtacatatgtatgtatgtttgtagcaatttgttgttctccctttactaaatatatttatttaaatttatatatctgtatatatagaccgaccttgtttacttttgtctcaaaggtaaatgaataactttcttgtttgtggcttaattaaattgtcaataaatatatcgatttggtatttatttatagttacatacaattattaaactctcgtgttcttgatcttttgcattactggtcaagtgactgatacactgatcgtctgctgtatattacttggtttttcttttttttaccccaaattcgaagccagcagtaactacataggttatctaattcatgcaaaaccttttgctggctgtaaggaaatcatgaaacaaataacgaaaataacaaaatggctgttggtttttgtttttgaataaatagttttatttgaaaatggtttttgcgtttttgtttttttctttttggtagaattttacaagttgaatggaaatacatacgtattaaatattacagtatttgattgggccaggatatagtagagaggtcgggtggggtcatggaaatgggaaagtgttggctgacctaagtaaatgcgtagaagtgaatgttcgctgatcggtgtataaaatcttggaattgtacggactttgtggccaacacaacttttgaaaagtttcactggatctgctggggttgccaattaaaagttgaaacgatgtcgtttagcttttttttcgcaaattgtccctactcttctgttctttgttctttttgaatgttaaataatatttatttcgctaataaacttacttagttgatgtttaagttgtgtgtgtttgtgtgcgtttacataaattaggcttaaaaactataaaacataaatggatttccgtccaactatagagcaagagcacaagtgaggatatttgcgtaaaggatgaggagaaggaggaggagagaagtcgtgaactgggcagatacaaaagaaatactattaaaataacaatataaattcattgcagctaaatcgttatgtaaaatcaaaatgcacaaaatacatacatacaaagcatatacataataattataataataagtctaatcaaacaattcaacatacttggggttaaatgccattcgctagatacagtcacatacataggtacatgtatgaagatgttttatcattaaatgtagaatttataaattattatattattacatacaatccttagtttcattgtgggagatttgagttctgcgttccattcattttgattcatattttgtgtgtgggtgtgcgtagatatggcaaaaatatatagcatgcttttgtgcgccaccaaagttgaattgcgtgtttgatcgtcgctgatttgccctgctcctcgtttaaatgccacaaatcattgtaagttacaacaaatcagctcaataagtgaaggaaattatatttagtttgtgttcagtatgcgtttgttttcgtgtttgtgtgtttgccagctaaacttctcctatacacgtaaactcaacaaagtacaatttacattgaagtatatcaatcaattatcgatggctgctgctactgctgctctttacataagttagttaagtggccacatacgcgttgctttacttgactcttatctggattttagtttagttttgcttcgtttttgttcttgtaaatacaatagatagattttatatccgtttcatttatctttaaattttacttaacgttaaagattttgctttccatattttgtgttttttcctttcctcgtttcttttcttttcatttgtttttttttctcttttggtttgttattttatatatttactttagaccacacgctgacactcaatcaaatgaatattgatatttcctttgccgctggattttgttgaaactttcgaacttaagtctaaacaagcatgacaaatgcagagcgttgatggcatgaataattttaaagagagattgcaacaggaaacatttaatatataatatttatatatatgtatatatatatatatatgtatagaagtgtatgtatatatatatgcggtatatgtagatatacgctcgtttggtttttgttttaataaatacatgaggaaactaaactacacataaattatgaaattctataaaaattattcagaccaaacaacaactgtatgcaatgttggcgcttgtgtttgtcgtgtgagtgtgttagtgtcatgtcgtacatgtggctttgcataatgcatatgtatgtgtttgtatatgtttgtatataggaaatgcctttcaatcaactgccttttttcagatgtgactttaatcgcgtgtccccgtgtcagttgcctgctgcctcatttagtcatagtcgccctgatcatcattagcattgtgtgtatttgcatctgcatctgcttcaatattatcgatattatgtaatgtacttgtcgctcattttccctataacatccattcgggatttccgtccgtccgccgtttttttttgttaaacaaataaaagttctttgggctttgcttgttcagtgtcctatgttttctgtgtggtttgcggttggtttgttggttggttctatcatctgctcctaaattgtttggttttttgatcaatgctggtgggttgttgtgctcccgcgctgctctttaataccgttacggtgttccctgctaacgcccccattctgctccacataatcgtcatcatcatcaatatcgactcggacgtcgacatcgtcgggatccggcctggaatccatcttagtacagtccacagccgcgcaggttgtttgctatgatgacatcggtgacagcatcgaatacaaactgaatgttattggtatctgtggcacacgtcatgtggcagtagatttcttttgaggttgatttgtttttcgcttcaaattgagcctgaatgtaagcagccgcctcgccgtactcctgtccacctgaaacgtccgtccaaatattggattaataaccagacttttacattcgagttcgaatggaccactcacctgtgtattcggggaagcaaatcgtcaggggactcttgcgaatcttctcctcgaacaaatccttcttgttcaggaatagaataatcgaggtgtccgtgaaccatttgttgttacagatcgagtcaaacagtttcagcgactcttgcatgcggttctatagaatgataaagatatcaaaatagtgagatatattcacaacaagtatttagacagcctaccgtggtttcatcctcatgcaagacttgatcgtactcggacatggccacgcagaaaatgatcgccgtgacatcttcgaagcagtgtatccatttcttacgttccgagcgctgaccgcccacgtcaaacaatctgtacgattaaatagtggattatcatgaatatgtatctttttaaatcgcatctttttacttacttaaagttgaggtttttgaaggagaagtgtacctcaacgatgccagtggtcttgacgcgagtgcgcaagatatcttgttcagttggctggtaatccttggcgcctaaccgatccaaatcgtccaggaaactgcaaggaaaaggagcaaggagagagtgttacaggccaggagcaaaagcattccatttcccatcacacatcgtttgaccagacaaatgtttacccaacccttccacccgtccattctcaattttccgcccgtatctgccaagacttgagcaaacaattaaggcgcagaccaaagcgctgagcaaacaattaaaaacaaaaaacctgagcgcgtgtcgagaccaaagagaaatgggaaatggggaaaagccccggcactcacacgcccccacacacacacacactcacacactcacacacacacagctcacttggctatgcaaacagctttccctgcagaaagtagccattcaaaatgattcctatttccgtgacttgttctggttctaatttccgtgcatacaagccatatttgtatatttcccataatagttttattcgccggttatgtaaccgtcacccaagcaaaggcatcggtcagatacagacggaggtgttcagatacacatatagagtctgcgtgctcgggcagcaagagtgccaacaagtaggtcatcaaagagggtccaccagtgagtccagtggccagttatatgagtatgtgtgctttggggccataattaacgtgccgcacgcaatgcctttaaaaaataaagggctgtgcggcagctaattttatttgttggccagctcttttttgctatcggctcgcaaatagttttttgaggctggtcgaggaatctgcgcttgttatcgcatcaatctccgcttgacttgctctcgtgctgaaatcggatgcattggtcaactggttttcgcccaaattacacgcacaattgcccaacaagttggccaaagttagtagcagcggcagcagtacttcaaaagatggccatggctcccctcctgcagtttggccacagggaaattggctaagtcatgctcgcccagcataacctttcttgcggaaaagttggccgtgtggtcaactgcataatcaaagctaatgcccgatattcgttacaatttcttagacaaatgttaattgaacggctgcaaacggatccgatgggctcgccgattgggcaatcgcttggttagcacttggctatacccgagatcttatttaacatgtccatcataaaagttttcttttctgtttactgatccgaaaccgcagacacacatgcagttgtaattcgtaagcccggaaaatgtgttgcaatgtgtggcatgtgcctgagttgtggtttcttgaaagtggatcatagacctgacaaacaaattgcagcgaaagtaagctacagattgaaaaactatgattgttttgaagaaagaacagaatcggagaaagcttgacggtttgattactctttgaatttcttactgaaatgtttataaataatgtgcttaaaattatttaaaaccttttctagctaagctcaactccttcatgttttcttcacctcagctgtcgtttcccaggttagtaaagctgtcatgcgaaatttattagcctgtttccgctgactattgtcttaccagcttttatggccttttcaattaagcgatttgcgcgcaatttagcccagcaaatgggtcgttagtcccagcagcgttttataataaattatttatgtattttacataagcctcaaaccacgaaccccatccgaaactcatcaggtccctcattaatgtcaatcaagggagtacaagacgttatgtgtatattatcacgaacttttgctttttgatttctattattaggcactttcaatttcatattaatatcaaaaaaaccaaagcccactagtttctgggctagaaagaccaataaagttagctgcagcagtggcatcaattagcacaaataccttaaatgacaaaacaaacagaagcgcgacaaaaaaaatacaacaaaaagacaaaactctgagagtttgccgagatcggcagctggtggagccaaaagcgtttggcgtataagtagactaagaagcccggcgatcgcgtttagtgcgtcgcggttggtctacgaggcaacagctcttgagactccagagcttcattcgcagctctcggactcggattcggattcggtttcggttttggttgtggtttcggttttcaaaagtcagagttaccgcagataaacttcgcgttgcgtgacaaaagacctggcgaatctccccggcttttcaagtgcttgtgagcggagcgagtgagtgggaaattggccaaagccacaatagaaatccgcacaacaataggcatcaaaagctgtttttaattgtgcacaaacggattgaaagtgttcgggaaaccaagaccgccaataaattaaaactaaaactgaaactcaatcggcaacaagttgattgaaaacccaaccaactggcagtgcaggccgagaaaaacgctttggcaaaccgatagaaaaaaatataaatcaaacgctcaagtgagtttttctcgagaggtgttttcccaatgcattttgggcgtgtcaagtaaactagttgcactctgaaaggcattcagtcaacttgactgtcgaagaaatcaacgtttagcgtgaaaggccaatttgattataatcggaaaactgatgggggcagaaaaaaaaatcgagtatttaatggtaggcttttcaatgcaatgctggtgtcaaataaatcgtaaaaaaagcagttaaagtcctcaaatttgttttgttttactgcaaacccctgaaatgagtagttaaaatagtaaatacaatttgaaatggctgataaacaaaggaaacggcaattattctcatgaacgacaaattaaagtgacgaaagtgagttttcccagctgcatttttccagcaaattaggcatgctggctaaactagttgtatctcgaatcttggccaacttgggcggcgtgaaagccaatttgaatatgctttttggccacacctcgaagggcgagtgagtcgaaaaccaatatccaagtgatttgccaagatgtcgaatgccagcgagagtgacataatcgttcgggatctttcgaccaccttttgctcatttagcagctgaatgctaataggattcctttcgatttcgtcttcattcgagcgtgaatgaaacgcggcccagagaacagctgtcctccccgccccaaccaactgctgttttggaacaatggccataaaagtcaacgacaagtggctgcttgacatttcttctgcattactcgcaggcgctaggattatcactcaagttcattataaccgcctgggtgataaaaccatgctatatatacgttatatatatatttatataaatatatatctcagatagttgttgttgctaccgctcgagagcctcaaggtcgtcgcttgtgcgacaagggcaaggataagccgctctgcttcgccgccattgtgccgcacaagtgtacacaagaaataaacgcaaacagagggaaaaaatggaaaaaatgaaaagaataatggctggcagctcggctaagtttctgaattcgggtgcgcagatttctgtttcatcaaattttcggcatttaaattatattgcctttggggagcaggcgcacaaaatgcctgaaagcagcagcagcagactcacaaaagtgccactgccaccattgttcgatggcatacgcggcgtatgagcaatcttgcctctttgccactttttccgcctgcgggggagcaactgcttttcaaactaaatgcgtgtgtgccgtcaagttctgtggacttattgggtagaaaatcaaagtttatacacagccagaaaagtgatggaattaagtccaaaaacaagtcatcttagaacttaggctgtttcaaacttggaaagtacattttcatagttagtaggacctgcacagttgtaaatggtttggttattttaaaaagtatttgaacattattgaatggcctttactttatgttaatttaactcattcaagttaaatcttatatcatatcctttgttgcttgccgcttttatttccaagaactgtttactactaaacttactaaaagcattgtaaagttgaacttctatggttctccttcaaagcctttgcttgtagtagactaagttttatgcacaataaacaagacttggtcagggttgatttggccctcattggcgctacttcaatagctcttcaatttgtgttttctttgtttgaactcacattgcacgagggcttgtagctgtgctcaatttaacgctagctaactccgacttgattattggcagcgaccataaaatggaaggcaccgagtctaccgacaaatgggaatcccctcctaccatgcattactcttaagtgctcccccgagatccaaaatccgatgacaagggacaatcgacgattgtttgcccgggtttgttttgcaactaactcgaactaagtgctgtcagtgctgaaagttaaaatgaatatggattttgcgagtatgccacaatatttgcactctaacgaaacgcagttcagttcagcttttcagagtatagaattcaaaagagggtgggattagtcgttttgaataataaacgcgaatggcctttatttattattgattgattttcccggcaaaccacttggaaatgcatcaaaagtttcgccgccacgaggagcgaaagaaacgccaagagaatcagcataaatacacaatttagtttgccgccggcaggcagattgctcaactttttacataataccattcccaacaggaccgagtggatccgaggaccaaaccgaagatgtcgggcttacgcaaaacatccattgcgctgatgaggcgctccacatccagcaccaccatactgccgcattccgggggcgttggtggtgccgtgtcgccgcccagcagcggagtgggcgtggccacggaaattgaaaaatcaattgcaatgcaacggctgcggacgggcgagtcgtcgaatccgaagaaattaaatgtcaggttcgtgattttcccacaccaaagacttggcttacatggaaataaaatgttgaataactttgccaagtttaactaaatatttttgaattaactttacaaatagaagacttgttctttgcatttctaaatctacttagattcagtttgaatctaagtaataaaacgcactactaacctaatgtaataatatggtgcttatatgtttttttcactgtatacaatttgcactaattgacagccaacagcccgttacatcagtagcaacaactaggactacagcaagctcactaccagcagaaaccacttcttcaccggcagctgcagtgcgtccttattcggaagtaccgggtccataccccttgccactgattggcaactcctggcgcttcgctccactaataggtgagtggccattattggcatccgttgtaactccgaccaggataactaatgaaccattgccatcgaccgacaggaacatacaaaatcagcgacttggacaaggtcatgaatgagctgcatgtcaactatgggaagatggccaaagtgggcggtctcattggtcatcccgatctgctgttcgtcttcgatggcgatgagattcgtaacatattcaagaaggaggaggcgatgccgcatcggtgagtgattaatcaacttttgccatcatccttcggtggtgcagtgcgaaattgcgtatacgacgtgtgtggcatgtcagtttggtatgattgattatctccagcttgttcgtaagtcgtgatctgaactcactttgggttatataattcgatagttagatgtgattgaaatgttaggctttgagactattattgttattgaataaccctaacatgattcgcaattcgttaaatatgctgtttatttaagattatgcctacccatgtcctgcatggctgcacctggtctgtgtagcgagaaataccccacataaatgccagggcccacgcacatggtatagcatatagcatatttatccacacgcaaagtcagtcatgcatgggtggtttggaacccctttgcctcgccttttaccctccacaatgcaaatgcaattcctgtttacttatgcgcataccgaatgaatgcagcctgtaattaaattattaactaacgaaggcacaaaatggcgattgcgcctgggaatgcgaattaagcgggatgtgtgaaaacatggcgacagattgaaatcagtggtaaaattcgaacatcagtgcaaaattgcttttaatctgactgacacatttgtgtgggaagtgaaaatgaaatcagcaatttatatgagattgaatgagtaaataaataactaccattgaaagtcataagcttatacttataattaaatatcttgaatggtgtttagtttgaggtgttttgacgctttaaatacaatatttttgggattgtaaataatccatcccgataaaacaaagccgtcaaattgaaattagttgcgactttcacttctcgtttggctttgcgatccgtaggcctagcaaccgagattcaaccgaaataaaaccaaacaatccgaactattcacaaactatccgacaagcgtttttgcatcatagaaataaataaaactgaccgaaatgatggagcaagcaaagaagtagacaaactgaaaaacaaacaaaacgaaagtcacacagatcgctaacgtgtccataacttttataagctttcttttcttcgcctttcattcctcctatcactcggatttatctgcgagcactatgcgctcgcatagtggccatgaaccaaatttaacaagttacgcttatatttcgcatacctcgagtatctaaccatatcatatcacatcgaaatgtgatttgcggacaaaagtgcggatcgatagtgaatcgcagacaaacccgcattgtttgcatttggcgaacgcgtttagcaagtcatcattaaaacgactgaaaagaatcactaatagattggacatgagacaacattaacgtaatgttggctcttttttttttttgaccgccagacagattgatgaatgaaccatttgccggcgcagatgtgtgaagccaactactgctcactggccaacagaccaactggctaactgacggattgacagacgtagcgactgcccaactgattgatgaagatatttggccaagagaaatgtacacaagtgtgtaccagaggcgtcggctttgttgacttctttttacgaggcccataaaatccgaaaagtgtgtgtgggaatatctaagtcggaaaaagtaatcgccggcttttgggccaaagttgcgatcgtgacaatcttggggtcaacttgtggttacaagcttgtacattgagggttttctttctgggggttcccggttttggtgtttagcatgcctatgtagtcactgcggattaagcgtgaaatcttcactcaaacaaactagtttatgtgatgttttcagcatttgatacttcacttctaccatagaccatttcacatttaggtatatcaaacattagcattttaaaaacttaaatagcaaattcaactcatagagagccagactatttttaaacgattgcgttcttctcaattgactgctaaaatcgaaatttgcataattcgcggggaatattactagttctatagacatttcagggttgcgttctctcgacgtttcgaaaacatacatatttacacttaaatctcgcatttaattgagcatttcgttgcctggggcaacaccattgtcagttcgaatgaagtaacaacagtcaagtcaaaggcggcaaattgttggctaaattgtggggcagggtgctgcataaaacaaaagccaataaaaacgcttcttctatttgcccagtgacatgcgagtgtaggcaaatataatgcaagttcgaggtgggtatatgtacatatgtacatatgcatgtatatacatatatatatatatacatatatatctgaggtcctgaaagctagtagatggagttgaatcgcttcattttgtgtttgatgttgtcgtcgccggtctgtctgcacgcaagggcaagcgacctcaaagggggcgtttgggtggccaaaaatggggtggggttttagccacaccatacccaggcatgctcacacttttacagacagaaaaaagtgaccaaattgttaatgaaatcgcgccactttaggtcttcagactgaagtttgttaatgcaattttggatgatataagtatctctcttttcggacatttaaataaacacacctttgtctaattaaagatacaaatatggttaaaaaagacttatattcaacaatctaattattgtagtatatcattaagagcttcgtcttattggactataattgaataagtttgtatggataatcagctagaatgcttgcacattaagttatagcacatttagtttcatagattttactcccacataataattttattgagaatgtgctaatagttttcgctctgtgtactttccggcttgtccctttgtgtgcactcactttttattcgccatggaactcagaccgtcgatgccctcactgcgccactacaagggcgacctgcgacgcgatttctttggcgatgtggccggcctaattggcgtgtaagtaatgtgcttatataacggatattgtggcaggctccaaccaccgtacttactatttttgcacattatttttttttgtacctcattcaggcatggccccaagtgggaggccttcagacaggaggtgcagcacatcctgctgcagccgcagaccgccaagaagtacattccgccgctaaatgacattgccagcgagtttatgggccggtaagtcggagcctaagcatccagccaagctgtgatgcaatcaacatatacttgggtatacctacatatactctatatccatctgcagtatcgagctgatgcgcgacgaaaaggacgagctgccagccaatttcctgcacgagctctacaaatgggccttggaatgtaagttgttgccaatttcgtttcacttatgcgattatgacactttgctggccaatcgcattgaaatattgaagacgcaattaggctatacttttcgaatccaaggactattgcagtgcccccttgacagttataaactaatttcgggaagattttcaagtgttttagttatttttattttgttaagactgtaaagaaaacttttttagagcatcaacaaatttaactaacgctgtgcatccttctagttaaactatttatttaaagttttcagtacaatttgttagctcgaacaacaagtaaacttcatcaactcttctattagcatattagaaaacttttaattgcctgttttagctacaacatggtattagtttttcttggaaagcgtaaagtgtactgtacagtgtattggtcttcctagaagagaaacgatagtgcttataaaatttatgagctgccttgacgtaactttgttaattaatttattgaaacgaactctagctgtcggtcgcgtttccctggacacgagattgggctgtttgtcccccgagggcagcgaagaggcccaacagatcatagaggctatcaacacatttttctgggccgttccggaattggagctgcgaatgccgctatggcgaatatatcccaccaaggcatacaggagcttcgtcaaggctttggatcagttcacagcgtgagcatagcataaaaaacgcgaataattgagcaaataataacatcaagaaatcactttgcatcccagaatttgcatgaagaacattggcaagaccatggacaaggccgatgccgatgaggctagaggattgtccaaatccgaggcggatatatccattgtggagcggatagtgcgaaagacgggcaatcgcaaactggctgccattttggcactggatttgtttttggttggagtcgatactgtaagctaatatactatctaatcgataaatttagtaatatttaatgcataaatctatcttgcagacctctgtggcagcctcctccacaatctatcagctggccaaaaacccagataaacagaaaaaactcttcgatgaactgcagaaggtgtttccccatcgagaggcggacatcaaccagaatgtcctggagcaaatgccctacctgcgagcctgtgtaaaggaaactctacggtatgacagttttccattcaattgagttaattgagtgacttctttaacaagtaaaattccctttaacattttagaatgcgacccgtggtgattgccaatggacggagtcttcagtcggatgctgtcatcaatggttaccacgtgcccaaaggcgtaagtttccgggaaatggtgaccatttggaatgccagctcactgccatctctgtttcctttcagacacacgttatctttccccatttggttgtttcaaacgatcccgcatatttcccagaacccaagcgttttctgcccgagcgctggctgaaacagtccacggatgcaggtgagttggataccacagaacgctttcgttgagcaccataaaatgccgagcacttggctcttaaaaaacagtgaatgttttggtgacagactaaaatatatagagaagagcagaaaaaaggcttaaaaagtacagtttaaataaaaatgggtatataatcaaacttttgatcgcaccagaaataaaattatcaagtatctagtagttattatatatgtatgcatattttatgtgtatctgcagatttgttaacgtacaatgcttaattgtttattgcgctttcgatacacaaaaatttaagtgctttcgtgcgcagatataatttattttctttcacgacaggttacacggtatttttttggtccaaggtcgcattttttttttcgcagtgttttaaccagagtggcgtttcttttcagctggctgcccccatgccaaccaaaaaattcacccattcgtgagtttgccctttggctttgggcgtcgcatgtgcgtgggtcgtcggttcgccgaaatcgagttgcacacgctgctggccaaggtgggttttaatcatgttttgcacctggctttgccagagttacccccttttaatttgccatatttgattcccggcacagatcttccgcaaatacaaggtctcgtacaattccggagagtttgtgtaccgtgtgaactccacgtacattccgcagtcgcctctgaatttcaaactaacgctgagggacgagtgagctgtctgcaccaaagggaaccggaggcccatcatggagctcaaagctgcagttacacacggcggatgtgtgatatttatagtcaaagctcagctgctgttgctatgcttcattttaattaagcaaatgtacatggagcacagttccgacaaattcagtacatcccatcgccacgagcgcagttttgtgggtgcgtgtgcgagtaactaaactcaataatcgttgtgtatttatgctgatacatgtgtatataggacccattatatccgccccatgctttagtagtagttttcttctcgaagaataattgtaaccaataaagcgtcgaaaagtatgcaataagctgtctgtttctgtttgtttttcttgccatgcattatcattaatcaaaagcctagtgagcttaacttgggacaaagtgtgatggctaaggtcaagcaaacgccaatctagactcatgattaattactttttagtaagtgtatcattagctctgttgcttgaatatgctttgctgactttaaggggcatttgaagactttttcctaaagccacaaagctgcacaatttaatttatttttagaaaattatacaacgcataaaacgcaaaaatattcggttacaagagtaattaaattggcgaaaatcacgtattccaaagtcattgggatgtggcttaaaatagacctgaagacagggccaataattatatatttggccttggaaagctgaagagtattgaatttcaggtggcagaaatataaaagagcgtagtcctcaattaattttaaggtgcagtcttgctcttttaatctgctaaacaattagctttaaactttaacaattagctacaatttacttttgctagactctattgtacagactattaaatcactaccaaatataccatttaaaataatattcaactattcaatcagcctgcgtgtttgccaactaattgaaataattcgaaccaccatttgtccgcatcacttggcactccattccaaggtggataaattggtgcgttagtgcgatttgatttggtacttactattttgcggaatcgtttagttggtattcgttgctgcgcgagaagcactcctggacaccggcgtcctgccagaggcgtttcatggcggccagcagctcctccgagaagggctcggtgtcgtgcatgcgttggcatacgtcgaacaccatcttggcatcgctctgtttgggttgggtggggaggtagagtggcatggaaatggccgggttagtgactgtgagcgtgaatgggcactcaatggggacttacctctcgctcgttattgctgtactgaatacttagggttggcatcgcgcgcaatattgcaactaatgattgtattgtgttgctgtagacaaccggtcgatattgtttaaagtcctccgcagtgaagccgctctcgtgaatgattttcatctgtttgactattgtgctcttgcccgactcaccggcacctagaagaaatgcacaaaaagttagcaatgcgtggtggaatttaagattacagatgtaatgtaatgtacatatataggatctatttatgcgtctggttatgcggttatcggcgccgataaaagaacccgacgggggttgcaaatatttatgctgcgtttagttctcgagcactaaatgtctgtgctttgtattcctcaagttggacttaatggcctttgagcacacagagccagccagccccatccacccacatcagcatcgtgattattattatcatcatcgccgttgtcaatgtatcatcttgagatgccgttgggccaaagaaatgagaaaaacgcaaggaggtggggcataaatggcagagaataaatggcaaacaaaggattaattgtttggccctggtcatccggcgattgtgtatatagactcctttactttcgtctacatctctatttcattgggtgtttttaatttttttttttttgctagctgaaggctttgaaggatttgcgagctgcgattccagcagaatttccatgcaattgaatgcaatttgttaattgagtgtctactgaagggggttttgtgataaacgagataatcaagataactggcagctcggctggaaaattgcttagccaagctgtccttgggaaaatggaataatttgataaatgctaatttcatttgcccattttcgtttcccactaagcttaatcctcactaagaagctttaattaaaacacaattggttggccatagtatgaaaatgcttgataaaactactccttgagtgcctataaactaacattatacgtacatacatcaaagcttacattatttcaatattataatgatactgaaatttgttaaccttctgatttctatcaaagaaaaggtgcacaactcgccatgaaactaaaatagtttgcaattcaaaattgtttttccatgtaaaagaataaagagttcattgtccaccacttgaaaaagtccacacttcttgaaaagatcttagaacagttcacgaaaaaagagcttctctcagaaaatgtttagatttggaaaactcaagagcagcagcgaacagggaaattttgcctggcttgtttatagaggcaattgggggactgagtaggcacctgagattaatgttttgtttgtgtggaaatcgaaggcaaagtgcttaattttaatgccttcgtggattgcaggaaaacaaaagattcggcaacggagcaggatggagctattttcatacgcgttgctctgattattattattaattcttggatgcgcacggcatggcagtacaaaaaatacaattttttttaaataaacatttccagtacactcgccatcacacacacgcagtgggtgttgcctgaaaatgaacatttttattctgaaacatacgcaaaactgtcagaaactgaaatcttctccccctgccaaacattttcgcccgaaaatgctcagtccgagcaaaagaggaaattaaatgaaatgcccgaaatgtaaacagcgaaatggggctgttgcttgcttggaaatatgcagccggagatgagatgagagctactgcagagtatatgaaaatatagatggaaattactcacgcgcccagctgaacgaatagcgaaatgcaattttcctacattttccgaccaaatttggtcaattctcatactctttcgcaagcggaaacaattcgcaaaccttatttatgccgatgcaatgtctatttttcatttgttaatgcctccgagcggacatgtttattacgctcgcttatcacaaatcggaatccaattgcaattacaatcaactgccatatattattatttacatatgtacatatgcgcacactatatagcccgacttttgcacacaaactctccattcgattcacccgcaagcgagtgaccttgaactttctgtctgatgcataaaaatattattgtgattattaaattgatggcatttcacattcgctccaagggaactgtgccaagaaaatggaatcaccacttgcagttcctctgtcggcacaatcgatataaagtaattaaataattaaatagcgaagttgagtgggatttatttatcgggttgcaaaagttccagtcatgatgactttcattttcaagatggactgattgtatgatgatttattcctccaagccgttcgtttatttttaaaaagagtcaaggaacttacattatgttaaagttttatttttgaaagaacaacgagtaagaatgtcgtgactaaaaaaaaaacagaaacacgtttagctaagaacgcgtcaaagcaaaggaccttagactgtcctgttctgcaccacaaatagcatcggtcaaaggccaaggctgccatagagccgaagctcatgccctaaggacattttagcggatttaatgagacgccagggcagccgctaagtatgctacactaattttagccgtgccgcgaatcaaatattcatgtgtgtggcacactcagcgagttgagttgggttggtttccgttcgattcatttggtttcgattacgttcccggggacaactcacccagcagcaggagtttgatgtcctttgccgcctgtatgccgtcctccttgagattgcgctcgatgaggcgactcctggcggctgcggctcgctcctcggcagactgtgcgcagcccatggtgcgtattgcctcgacgcaaaacgttttgaaggtcgtttggtatcggccaactcaatggccgactacgttgccagcgagaaaaaccaggtgtacaacgtgcggggactcgaattcggggggctaaactaactccgctatccgagggattcgatcgtgtcactggactttaattttcagtacggcacttcaactgatttttcaatcacttctttatggttttttcaggtttttgaactttggttttcttcaattcaacactgcaatatataattatgtcaccaaacaattcagttttgtttttatctgcgcattttgttgtgatccgcgcaaaagggattctcaaggatacccgatttgaccgctaacggtagagtctaattgtaaactgaaaaacccgcatgtccaagagcgaggaaacccgttactcgctacgaaactcgggaaattttgttgtctttggctaggaaaaactagaaacgaagagagagagagtgaaagcagcgaatagaaaagctctaggcgagggcttttcgagccatggaaaaatgtgtaattaaggagcgtggttttcattaaccaaaactcaaaatgcgtacaaatatggcaaaaatcaataatatacgactgctgcattttcttttattttatatttttatgtgaaaatgttatttttttgtaatatttgctattcattgcaacgagaacatacaattaatggtacaaatttgacaacttttgtttaaacttattattcacgcgctgtcttacaagtggtcataaacaaaagacagggagggagtgagaggactggaaaattgaggcgttttacttttttcttggttttcagccaaataagaaaagcacaaacaaaacttttcttttgtacacttggcagctatttgtttttgtattccagcaaaatgattcatgcgtttattcgaaaaaaaggaggtaggagggggtagaacttcggcgaagtcacatattaagcgccaaactgaattgttgcggtggcttttaatttatactatatattattacatatttttgttatatatatttaacactttttcagcgttttttgaactttaaaactttaatttaacggtttagctctcttttgtgcgagttttctagagagctggcagaattcaactgagctaacggaactatgtgcctggatgcgctggaagtgctctctctctcgtattctggtgccgcccacgtatagtatacacgaaagctccgagagacgcagagagagaggataagagagaacttgcgccggcgccactggaaagtgtgtgagccacaataacgagtctgcgcaggacgaaaacagcgagtggtcgcgagacaaggacaaccccaaaatcaacgagtgcgcccacgcgatattcctttttcctcgctggttttcttgttttttttttttttttagcaacttaaagtggctttgcagtttaaatggagaatgccattggtaccccctccccacacacaattaagtcgatggctttagaactttgccacgtttatgggccaagccaaagcacattagcacaaaacagttggccagcagcaggatcttttgtgtcctctctcgctcttcccaagcctacataacggtagagcggaaaatcgagaaaaatcaccattagataaaacaatcgcattcgttcgattgatgggattctgtcgacaggaactgtgattgaatggctcaatgcctcaaatacctgcaactgcaaatcgagataataggtaagtcaattaaggctatcataaaaaatgccattgagcctcaattaaggaattgacatggccatcggcggtcgaaatgccaacaaatatttatgattaattgtacagtgcagcctcactgtcataaagaaatgttcgtataatttggaatagacggaaagaactttaatattaatataactacctatgtacaaattgaacaaatgcttgttttgttgtatttaaaaaaatttaatcgattgcatcccacttgttcttaatccaatataaacttatttaattacttagtattcagcaaataagtacaagtacatctcaaatttccaaaagttatagaatagtcagttttgctctactgctttaattttgccttgaactcatccaccagtcaattagaagttgacatcttgattctgaacctacaacaagaggcaatgacgaggaaagttttccggtaaagctttattttcccaagaattctggcaccaccgccccaaaatagttaaggtcggttgtaattacctgttgttgtttcaaagagttaagagttaaaggaaagcaggcaatttaattcactacgagcaaatggcgtgacaaaaagaaaatgttgaaaaaaagggactattgaaaatgcagaacatgcacggaaaaataaagtgacatttactggttgtta

SEQ ID NO: 6473 - DNA, 3508 bp, DROSOPHILA
taaaaaaaaaaaaaaagagctaaaccgttaaattaaagttttaaagttcaaaaaacgctgaaaaagtgttaaatatatataacaaaaatattgttgaattgaagaaaaccaaagttcaaaaacctgaaaaaaccataaagaagtgattgaaaaatcagttgaagtgccgtactgaaaattaaagtccagtgacacgatcgaatccctcggatagcggagttagtttagccccccgaattcgagtccccgcacgttgtacacctggtttttctcgctggcaacgtagtcggccattgagttggccgataccaaacgaccttcaaaacgttttgcgtcgaggcaatacgcaccatgggctgcgcacagtctgccgaggagcgagccgcagccgccaggagtcgcctcatcgagcgcaatctcaaggaggacggcatacaggcggcaaaggacatcaaactcctgctgctgggtgccggtgagtcgggcaagagcacaatagtcaaacagatgaaaatcattcacgagagcggcttcactgcggaggactttaaacaatatcgaccggttgtctacagcaacacaatacaatcattagttgcaatattgcgcgcgatgccaaccctaagtattcagtacagcaataacgagcgagagagcgatgccaagatggtgttcgacgtatgccaacgcatgcacgacaccgagcccttctcggaggagctgctggccgccatgaaacgcctctggcaggacgccggtgtccaggagtgcttctcgcgcagcaacgaataccaactaaacgattccgcaaaatatttcctggacgatttggatcggttaggcgccaaggattaccagccaactgaacaagatatcttgcgcactcgcgtcaagaccactggcatcgttgaggtacacttctccttcaaaaacctcaactttaaattgtttgacgtgggcggtcagcgctcggaacgtaagaaatggatacactgcttcgaagatgtcacggcgatcattttctgcgtggccatgtccgagtacgatcaagtcttgcatgaggatgaaaccacgaaccgcatgcaagagtcgctgaaactgtttgactcgatctgtaacaacaaatggttcacggacacctcgattattctattcctgaacaagaaggatttgttcgaggagaagattcgcaagagtcccctgacgatttgcttccccgaatacacaggtggacaggagtacggcgaggcggctgcttacattcaggctcaatttgaagcgaaaaacaaatcaacctcaaaagaaatctactgccacatgacgtgtgccacagataccaataacattcagtttgtattcgatgctgtcaccgatgtcatcatagcaaacaacctgcgcggctgtggactgtactaagatggattccaggccggatcccgacgatgtcgacgtccgagtcgatattgatgatgatgacgattatgtggagcagaatgggggcgttagcagggaacaccgtaacggtattaaagagcagcgcgggagcacaacaacccaccagcattgatcaaaaaaccaaacaatttaggagcagatgatagaaccaaccaacaaaccaaccgcaaaccacacagaaaacataggacactgaacaagcaaagcccaaagaacttttatttgtttaacaaaaaaaaacggcggacggacggaaatcccgaatggatgttatagggaaaatgagcgacaagtacattacataatatcgataatattgaagcagatgcagatgcaaatacacacaatgctaatgatgatcagggcgactatgactaaatgaggcagcaggcaactgacacggggacacgcgattaaagtcacatctgaaaaaaggcagttgattgaaaggcatttcctatatacaaacatatacaaacacatacatatgcattatgcaaagccacatgtacgacatgacactaacacactcacacgacaaacacaagcgccaacattgcatacagttgttgtttggtctgaataatttttatagaatttcataatttatgtgtagtttagtttcctcatgtatttattaaaacaaaaaccaaacgagcgtatatctacatataccgcatatatatatacatacacttctatacatatatatatatatatacatatatataaatattatatattaaatgtttcctgttgcaatctctctttaaaattattcatgccatcaacgctctgcatttgtcatgcttgtttagacttaagttcgaaagtttcaacaaaatccagcggcaaaggaaatatcaatattcatttgattgagtgtcagcgtgtggtctaaagtaaatatataaaataacaaaccaaaagagaaaaaaaaacaaatgaaaagaaaagaaacgaggaaaggaaaaaacacaaaatatggaaagcaaaatctttaacgttaagtaaaatttaaagataaatgaaacggatataaaatctatctattgtatttacaagaacaaaaacgaagcaaaactaaactaaaatccagataagagtcaagtaaagcaacgcgtatgtggccacttaactaacttatgtaaagagcagcagtagcagcagccatcgataattgattgatatacttcaatgtaaattgtactttgttgagtttacgtgtataggagaagtttagctggcaaacacacaaacacgaaaacaaacgcatactgaacacaaactaaatataatttccttcacttattgagctgatttgttgtaacttacaatgatttgtggcatttaaacgaggagcagggcaaatcagcgacgatcaaacacgcaattcaactttggtggcgcacaaaagcatgctatatatttttgccatatctacgcacacccacacacaaaatatgaatcaaaatgaatggaacgcagaactcaaatctcccacaatgaaactaaggattgtatgtaataatataataatttataaattctacatttaatgataaaacatcttcatacatgtacctatgtatgtgactgtatctagcgaatggcatttaaccccaagtatgttgaattgtttgattagacttattattataattattatgtatatgctttgtatgtatgtattttgtgcattttgattttacataacgatttagctgcaatgaatttatattgttattttaatagtatttcttttgtatctgcccagttcacgacttctctcctcctccttctcctcatcctttacgcaaatatcctcacttgtgctcttgctctatagttggacggaaatccatttatgttttatagtttttaagcctaatttatgtaaacgcacacaaacacacacaacttaaacatcaactaagtaagtttattagcgaaataaatattatttaacattcaaaaagaacaaagaacagaagagtagggacaatttgcgaaaaaaaagctaaacgacatcgtttcaacttttaattggcaa

SEQ ID NO: 6474 - protein, 354 aa, DROSOPHILA
MGCAQSAEERAAAARSRLIERNLKEDGIQAAKDIKLLLLGAGESGKSTIVKQMKIIHESGFTAEDFKQYRPVVYSNTIQSLVAILRAMPTLSIQYSNNERESDAKMVFDVCQRMHDTEPFSEELLAAMKRLWQDAGVQECFSRSNEYQLNDSAKYFLDDLDRLGAKDYQPTEQDILRTRVKTTGIVEVHFSFKNLNFKLFDVGGQRSERKKWIHCFEDVTAIIFCVAMSEYDQVLHEDETTNRMQESLKLFDSICNNKWFTDTSIILFLNKKDLFEEKIRKSPLTICFPEYTGGQEYGEAAAYIQAQFEAKNKSTSKEIYCHMTCATDTNNIQFVFDAVTDVIIANNLRGCGLY

SEQ ID NO: 6475 - DNA, 5617 bp, DROSOPHILA
tcggtctgaccgtcacgcagcctagttcgccgcgtgccaagcgggaggatgatcaggtggagaagaccatttcggaggtggagcagcagcatttgaagcagagggaggaggagtacagcgaatcgccggcggtggcgcaggatctcagtgctccccgaagagataacgtctcccaaacggccattgacatgcttgcccagctctttccgcagcgtaagcgatctgtcctggagttggtcctcaagcgctgcgatctcgatctgattcgggccattgagaatgtctcgcccactggcaagtcctcgccagtggatgtcaccagcaaccagttgcccagccaggagccgggcatgttgaccactatgccacagcccgcgccgcccaggagcagcgcctttaggcccgtgataacagatcaggtaagcgacctaactgcatagtgcaaattgtataaagtaccttttagttataagtgtacttaagtgaatataccggttatttctatagtattatattctatagtatacagcaaatctgtaacaggtgttttgtgtttttacttaagttcaacggtctgtatttccgcttccagaattcaatcaagtcacgatttgcgtggtccatggaagtaggaagtacctaatgaaatatttatttaagtacatacaaaatcttacctttcagtaccagagcaaatcggtggtggagctaaagccgccggtctttggaggcagtgcatcagcggcggcggcagcggccatttgtgcgtaccccaagtggtttgtgccgctatcctttccggtgaccatgggtcacctctccaatctggcgccaagatgcaccttgcccaattgcgcctgcttggacagctaccagttccactaggagaccacccatctagtacttactaactcgcataactatagttctaataaaataaatttatttatcctaactacaagctaaactaacttatgagtcaatgggccatcctctagcttcacttgggcgtctcatccgcctcgccttcgtcttcgtcgtcgtcctcatcgtcctcggacagatacatccgatcctcctcgtcgctttgttggccacacctgcttccgctgccaagattcaacacgggaacactgctgctcgaggcgctggagggtgatcccacggcagcgcctgctatgggtccttgggcggatgcactgcgcttgctgagattggctcgtcgccacttggcgcgccggttctgaaaccaggtcttcacctggcggtcggtcagcttgagttggagggccagatgacgccgttcctccggcgacaggtacttggagctggcgaagcgagcctcgagatttttggtctgctgggaggtgaatctgatctggccgccttttcgcttcacgccgaagttcgacatgtagaagctggccgccggataggcattgcagtagagggcggctgcagcggaggcaggattggggaatcctatggattaaaaaggaagacagtttgttttagattacaattgctgaagaggttacagaactaacttattgttaacacttcactttgtgaacaagggtttcctatatcagatgagaaatatttaaactaaatatttcattgttaatacgatcttaattaaagaactaatgacattatagacccacttcagagtttatcaaaagctgccatgaaaaagtcgaggacaatcgatttctttgaataacgattttgaaccatctgcccgatataaagtggcgcaatcattggattgtgattggtggctccattggcccggttttccctatctccgcccacccgctcttatcaaagtaatcggacacaacaattgcgagtggtacaagtgtatgggtgttgtatcagtatcggagaatatgtcaacgcccacttgtaactggatgacgacttgcgaatggtggccattgcgaaatggatcgactgtacgccgagatttcgtagcaattgggcgaaatcaattggcacccgaacggcaatccgattgcgaacctatctgcacctatgtacatacacctatgtgataaggaaggtggcctctttttttttttttagttaaggtaacggaaattcgcacttggcgcatatttggagtgtgctccatcgctgaactaagctgatatttggggacccagttacctcattggtgaggcgatctggccaagaacccttggaaatggccaaatgccattaaataaataacatccgattgcagatgccataatttaaatcgttacaaatagacttattcatgtttatttttattaagtggcgtattcgggagtgataaggccgcagagcacccttatcttcttcccagcggcatttaatcgctgaaaattggatttgttattattttataatgtgcgtgtccgattgaaggaataatatcatatcaggtacttgtcgccaacaccaccacacccgcctccgcccctaaccatttgccccttgtccaggtggaacgagtgtcgggaacggacgggcttatcgtaatcaaatggcaatcgtggctataagatgatggacagcgcctattaatcgcctctaatagcatttttgtttagataagccaaacaaatcggaaatcgggatagcagtacagttgaagtgccctatacacgacgatactcctatctgcattgtgtgatcagtatggcatagagcaagctaatcaatactccttttttttttttgaggcgtagtatgatcctaactcagttggactcatcatagatatatcctcaagacgggcatattgggaacagaaaggtgcacttagatattccattccactataatgttgtattgattccttcctatttcactacaattatatcgaaagatactgcctgtgataattgtgtgttatccaaaggtttaaatgagtatgatttctcacagtccgtctaattcgcagcagctcgattttcccaaatcaacagctcaatgcctttcaatgaaaactaactgtcacttaaatatccatagatatagtttctgctgtctctcacctgaatttcaaatatttgtcacttctgataagccaccgaaatattttccgatctgaatggggcatttgtactgcgaggggatggaattcgggactttgactttatcagcattgctagggctaatctaccgttacaccaccgcccagaaaaccaaccgggaaatgcagtttttggggcggggaaaatgtgatttcgagtggcattggcgccaacacttgactttgacaaatacccaactgcaccacaacacacacacattaatcatgtttatggcccattttgtgtgggatccccattgtaatattcggtggtccgggcacttcggacttaggctagcttagatatttggtatttaaatggggatttcaggcaacacctttcccatggcgatcaatttccatgtgtcaacttgatgagcgagattaaggtgtcagcatgggtaggttcaatgacttgaacttggtagtgtcgaatcaatcctagtctttgctaaaaactgtgagaaagtctaatagaaactatggttccaagcttcatgaataagaatttaagaatagggatttaacatatcatactctgagaatgcttctgcctttatctgcattttagtgtttaattgataattgtagcgcttattcattcatattcaggtgactcatttccggtcatttgatagtatgatgaaatatgctaatgaggtcaaacgactaaattgttgatagacatcattgggctaatagatttctcaaaaccgcattaattaatatattagtcaattattttatgagcttgtcaataacttgacctaagggtttcaactgcgtttgcatgtatgtatacagctcgaataattgaataattttgatcttattctagaattttttttaataaagaaatgctgtattgtcttcattcataatgtcgaataaatatactatacttcttggccttataactgctttacaatcttttgaatttgctgagattagattgcatataatttaatatttcatttctataccttttctatagctctgtggaaataccataactttataataaatttgtaatgtcttctcctcatgcacccttattttagtgaatgatttatcataaattaccacaaaaattaagcaattatcttgaaaatgaatctttatcttttaggacattcaacacccaactaaaatacatgttaaccccactaagtaggtattctgaagtactcaccttcgcagtccatggtaaatggactgtattgatcacaataggctgttggctgaacagcggctgcggcggcaacagcggccgcctggaagtggggcatgaagagcgagggattcttctggagctgcagcacctgctggtagaagagcgaggcgggatccgggtagatgggattgaagcgcagcgaagtgggagccaggacagcactggagtccatactcttcatggcatactgggcggcagctgcctcgcgggatagatcgtagatgttggtggcggacgatggagagggtgtaggcgccgcggaggatgatccagtggccaaggatgccttgggcatggccagtgcgtgtggagtagctatgcctgctgttaccgccacgggactttgagaggagcctctgcgcgattgagatcgatgcgaggagctcttctgctccaagatattctcaatggagaaggcggccttgctggacttggtggcgatatccatattggtggattctgagagcggtagtaacgaactgtagataccgattgattgggtccggagcgatcgaagcgactgcgtcggccgcaggcgatgaactaatggccaccagctgtaggagccgtcgcagagcccatgggcgctataaattgtaccaaatctgatttcacagaatataatagattgtacctataatgttgtgctaatgggtagatatcaatattaacaataatagagcggtatgtagatatgccgcgcatgggagatagtgccgagctaccggccatcgattgataagcgagtggtggttggttaggcgctccactgcctcgatggcactccactccactccactcgattcctattcccaatacccaatacccatattccaatttccaattgcaggcggcgacagctcgacatcggtacgcggttggacacccaatcggcgatcgttgtataaatcacagtccctgctcgcccgcttattgagctgccaacccatcgaacccaccacccaaccacccaaccaccctcccccagaacgcctcccactcggcgggtcggtgcgtttgatcgagtaattgttaatcaccccttatcggtatcgttacctggtttcagctctcagctactgtttggctattttactctgttgattgttgttgtaaacaaattaaaattgccccaaaaggcaccccccaccctaccccctaccaacaccatcagagagccatcgctttgattgagtaatcgagtttgtgttatgatttcggccatggtgccgtccctctctgctctttgggaacaatatatgcgtctgtatacctggggcatggataggtgtttc

SEQ ID NO: 6476 - DNA, 819 bp, DROSOPHILA
atgcccaaggcatccttggccactggatcatcctccgcggcgcctacaccctctccatcgtccgccaccaacatctacgatctatcccgcgaggcagctgccgcccagtatgccatgaagagtatggactccagtgctgtcctggctcccacttcgctgcgcttcaatcccatctacccggatcccgcctcgctcttctaccagcaggtgctgcagctccagaagaatccctcgctcttcatgccccacttccaggcggccgctgttgccgccgcagccgctgttcagccaacagcctattgtgatcaatacagtccatttaccatggactgcgaaggattccccaatcctgcctccgctgcagccgccctctactgcaatgcctatccggcggccagcttctacatgtcgaacttcggcgtgaagcgaaaaggcggccagatcagattcacctcccagcagaccaaaaatctcgaggctcgcttcgccagctccaagtacctgtcgccggaggaacggcgtcatctggccctccaactcaagctgaccgaccgccaggtgaagacctggtttcagaaccggcgcgccaagtggcgacgagccaatctcagcaagcgcagtgcatccgcccaaggacccatagcaggcgctgccgtgggatcaccctccagcgcctcgagcagcagtgttcccgtgttgaatcttggcagcggaagcaggtgtggccaacaaagcgacgaggaggatcggatgtatctgtccgaggacgatgaggacgacgacgaagacgaaggcgaggcggatgagacgcccaagtga

SEQ ID NO: 6477 - protein, 272 aa, DROSOPHILA
MPKASLATGSSSAAPTPSPSSATNIYDLSREAAAAQYAMKSMDSSAVLAPTSLRFNPIYPDPASLFYQQVLQLQKNPSLFMPHFQAAAVAAAAAVQPTAYCDQYSPFTMDCEGFPNPASAAAALYCNAYPAASFYMSNFGVKRKGGQIRFTSQQTKNLEARFASSKYLSPEERRHLALQLKLTDRQVKTWFQNRRAKWRRANLSKRSASAQGPIAGAAVGSPSSASSSSVPVLNLGSGSRCGQQSDEEDRMYLSEDDEDDDEDEGEADETPK

SEQ ID NO: 6478 - DNA, 5912 bp, DROSOPHILA
gagatggccatcggcatgtaccccatcccgccgccaaacaccgccaccctggagtcgatattcgccgacaatgcggaggagagcggccagccgacggacgagcccagggcaatggccatcttcgagctgctggattatattgtaaacgaaccgccgcccaagctagagcacaagatcttctccaccgagttcaaggacttcgtggacatctgcctgaagaaacagcccgacgagcgggcagatctcaagaccctgctggtaagcaaacgaaacgtcgccatttcttcagttatatatatattcaagttgttttatgtattcttcggcagagtcatccgtggatacgcaaggcggaattggaggaggtggatatatccggctgggtgtgcaagacaatggacctgccgccatcgacgccaaagcgtaatacgtcgcccaactagacgcctctgcgttccggcccccattttctctatcctcccatatccacacttgctctttgttcaatagagcgttgacgctgggcaaaaacaactgaactattattattattattattaaatcgaaaataaagaaatcgaagtcataccatgtatgatggggtgttcttattatttgcattggaggattatctttaattttaaaataatgcataaaattataatgtgttattgctaatcttgcaaaaggttgaatacataagcgaattaattgtatctcaattaaattttgtcatttttattcagacttcactccattgtatgaaatacattaattcaaaaaaaaaaaaaaaaagtatttgccgatctaaatgggaatcccctcaaaaaaatatatatttcaaacaaaatatactgaaggtatttttggatgtgcgtgtattttggtcacactgtgagaaaataaataaatcaattcagtgtggccagagtgtgtcacaacagctgtggaatttgtatataaacacataaactaaacgcatacacgggcgctcgtgcagcttgatacagttacagttacagatccagcacgcaattcgcggccaattgaaacgattcaaagatcgcgagtggaatagatcggaggcgacaccaacacaccaacacaacagcacacagacgtacgcgcactgtggcaagaggcagcgttctttgttgcaaattaccgttgcatccacctttcagcgccaccccctccatcggcctcaccgattcgcgatccacgatccgccttctgccaaccgccgccagccagttgcttccagccagtgatccgatgcagacgtttcgctgaaaaggagcgcacagccagaacagaagaagaaccatgtcggcggtgaaccagaaggagagtcccagccgggactcgacggcctccacatccgggcacatatcgatgctggctgacaacacattggaatcgctgtcgcgggactacagcctgggcagcttgaactcggcgggcagccaggatgagttctttcgctgccgagaccatgcggacaatatactcaaacggatgcagctctacgtggatagccagcagctgtgcgatgtggtcctaatcgctggcatcgatggaaagaggtgagagcactgaattctgatcctggaactacgattcctggcgttccacatcactgcgatcgatgttggaacgatggtcggcaagcagcggggatcgggatcatggaactcctagtttccaatgccaattccccataccctttccacggagacaaaggaatggaatatggcatttcaaattggaaagttcattagcgattccctcccgcttcccctttatcccgtccaccacctaacccacctccgccttcccctcctcctgccccagctgaccttcacttgggttctttgtctgctctctttgctttttgttgttgtggttgtgttgtgttgtccccaacgcaatttcaacagcgcacactcacacgcaagatagtagcaacacgcaaaaccaggaaatgcagctgcggccacaataatagcaaccaagaaatgcaaatacagctgttttacaaataattgcaagaaaaaagagtttaacaaatctggttttcacttttgagtgtatacttaatttctatttgcacaattgctcattttaggtcggctttaattcacttatctcagtgagcatgctgacgcacaaagttagtttagtgaattttattattttgacagtagctgcatatctacagaattagctgtgcatctataaaagttcaaagtttaaaaaagatccaaaagtattggttaatactcaatgattcgttgttggcaatattttgacaatcgatcgagttttattgcatgtttacttagcattcgttaatggtaaacttctcagcgtttatttttgcattgtttggaattacactatagtttatgtctagagccattcattttttgcttgtttgcttatcagcaaatgtgccgataagcagaccatttgtttattacatcaataatgatatcggtttggataaacttgattggaagtaatcttggtaaagtgaaaaaataacaaattacttgcatttatccgtttcaaagatactagtgaaatccttaatgtccttctattgtgaccgctgctgtgcgcattgttgcaataggaagataggggaagagaaagacggagcaaaagagatccccatttcgagctccaaagagtgagaaagagaaacagagggtccccattatgtagattttgtttttgttcgtcgaacaatggcgatgcaacgcaactgagagggaagtaaccgtctcagaaacaaagacgaacaccacggagaggcaacaaaaactgcagcatggaaagatacagatacaacgattcgcgatccaagtgcagtagttgcagctctatttgatttcgctgcactcaaccggttttggatcgtgaaaacctgtcgatctgtgccatggtaaacaaagggaaaagaacccaccagcgtacagttgcggtcacgaaagtagtgacaccacaagctaatattttttttcggattaactcttgcgaaagtgtccacaattcaaggatttcacttggctctttcagggtgcccgcccaccgcctggtgctatcggcgtcgagcgcctacttctcggccatgttcacgggatcgctgcgcgagaccaaggaacaggaggtgaccctcggtgaagtgcacggcgatgcactgcatctgctggtccagtactgctacaccgggttcattgagatgcgcgaggacaccgtggagacgctgctggccaccgcctgtctgctgcagctgaatgccgtggtgaccgcctgctgcaacttcctggcccgccagctccatccatccaactgccttgggttcgccttctttgcggagcaacagagctgcaccacgctgctgcgtctggcgcaggcctacacctgccagtactttatgcaggtgtgccagaatcaggagttcttccagctgaacgccgatcagttgggcaagctgcttagcagcgatgatctcaatgtgccctcggagcaggatgtctttcacagtctgatgtcgtgggtgcgccacgattccgctgcccgtgagcagcacataccggagctgttggccctggtgcgactgcccctactgcagccagcgtttatcatggaccacgtggagaacgtttgcaatgccaacgagtgccagcagctggttatggaggcattcaagtggcacctgatgcccgagcgccgatcccggatagccaccgagcgaacaacgccgcgcaaatccacggtgggtcgtctcctggccgtcggcggcatggatgcccacaagggcgccatcagcatcgagagctactgcccgcgtttggacaagtggacaccgtggaagcacatgaccggtcgtcgactgcaattcggcgctgctgtcatggaggataaactgatcctagtgggcggacgtgatgggctaaagaccctgaacaccgtagagagtttggacctgaatacaatggcctgggcaccgctcaatgccatggccacaccccgtcatggactgggcgtggcggtgctggagggtccactctatgcggtgggcggtcacgacggctggagctacctgaacaccgtggagaggtgagagggcaatgaatttgatgaattgatggatatgtacatatatgtataattgtgcaactgagtaaacattttccagatgggatcccatagcgcgcacttggagctatgtggcacccatgtcctcgatgcgttccaccgccggcgtggctgtcctgggcggtcgcctgtatgcggtgggcggacgtgatggttccgtctgtcatcgctccatcgagtgctacgatccgcacacgaacaaatggagcctactggcgccgatgaacaggagacgcggcggcgttggcgtgagtatcctctaagcatatccttagtggtctttctcttaattacctgccctaccaggtgacggtggccaatggtttcctgtacgccttgggtggccacgactgtccggccagcaatccaatggtctgccgcacggagacggtggagcgctacgacccagccaccgatacctggactctggtaagctgggattgggttatgtggttccctcaacctcatcctcacttctaatcgatgtcatctcattccacagatctgctcactggctttgggccgggacgcgatcggctgtgccctgctgggcgatcgcctgatcgtcgtcggcggctacgatggcaatcatgcgctgaagagcgtcgaggagtacgacccggtgcgcaatggatggaacgagctggcgcccatggctttcgcaagggccggcgcctgtgtggtggcgattccgaatgtcataccgccggcggctcaacagccgccgcccagtgctacagtttagtccaaacccaatccactttcggttgcagtgtaggctcgttaattgcatcgcttatttcggatagaagggccagatgtttggaaacgatttgcatttagcacccagccaaatttatacgcgaaattcctattagatacccattatttgggtagagctttataaattgcatttaatgttagtaaatttgtcaagatgtttcgctcggcagttaatgctgcacacaaactgtagattttatacctttcttgcattaatcttaaaaatccaaacattccacgtttacaaaagatattttcccaaatttaccagttcatgtaaagcatttccatttacttgtagatattaaggaactttaggaggcaataatcaaaagtagttttataagtagcgtggtctgaaagcgatgcacttagcgagagagcactgcacccgttctatagtagttgttgttactgttgctgtgagctgctcgtggttgttgctcgtgtttcctaacccggcaagtttgaaactgcagctcaccttcgcctcgcctcgctctcgtctgtgttctgacatgattccctgtggtatggcatacacccagaactcacccactttccgcaccgcacaccccaacccagtattttccccataactctgctcttttcggcttgaatctaaaaataagtaaatcaaaaaaaaaataaaaaaatcagtgaaatctcataggatttaagaagtgcatgttgcgaggcttccagttccaatctaaaatcgatccctagctgtaattaaccaacgtattttacacgataccctagtttctaaaaattttccatcccactcacaccccatggtgtcgtacgcttcacacactgcacgccatctcgctcgcaccggtgacgggcccacattccatatgcataaatcgtatacacatacttatatcctgacaagactgcgccaagccaaaattccaaaaaccaaaattgctcatttttgcatgtgaagtgtgcga

SEQ ID NO: 6479 - DNA, 2204 bp, DROSOPHILA
cttgatacagttacagttacagatccagcacgcaattcgcggccaattgaaacgattcaaagatcgcgagtggaatagatcggaggcgacaccaacacaccaacacaacagcacacagacgtacgcgcactgtggcaagaggcagcgttctttgttgcaaattaccgttgcatccacctttcagcgccaccccctccatcggcctcaccgattcgcgatccacgatccgccttctgccaaccgccgccagccagttgcttccagccagtgatccgatgcagacgtttcgctgaaaaggagcgcacagccagaacagaagaagaaccatgtcggcggtgaaccagaaggagagtcccagccgggactcgacggcctccacatccgggcacatatcgatgctggctgacaacacattggaatcgctgtcgcgggactacagcctgggcagcttgaactcggcgggcagccaggatgagttctttcgctgccgagaccatgcggacaatatactcaaacggatgcagctctacgtggatagccagcagctgtgcgatgtggtcctaatcgctggcatcgatggaaagagggtgcccgcccaccgcctggtgctatcggcgtcgagcgcctacttctcggccatgttcacgggatcgctgcgcgagaccaaggaacaggaggtgaccctcggtgaagtgcacggcgatgcactgcatctgctggtccagtactgctacaccgggttcattgagatgcgcgaggacaccgtggagacgctgctggccaccgcctgtctgctgcagctgaatgccgtggtgaccgcctgctgcaacttcctggcccgccagctccatccatccaactgccttgggttcgccttctttgcggagcaacagagctgcaccacgctgctgcgtctggcgcaggcctacacctgccagtactttatgcaggtgtgccagaatcaggagttcttccagctgaacgccgatcagttgggcaagctgcttagcagcgatgatctcaatgtgccctcggagcaggatgtctttcacagtctgatgtcgtgggtgcgccacgattccgctgcccgtgagcagcacataccggagctgttggccctggtgcgactgcccctactgcagccagcgtttatcatggaccacgtggagaacgtttgcaatgccaacgagtgccagcagctggttatggaggcattcaagtggcacctgatgcccgagcgccgatcccggatagccaccgagcgaacaacgccgcgcaaatccacggtgggtcgtctcctggccgtcggcggcatggatgcccacaagggcgccatcagcatcgagagctactgcccgcgtttggacaagtggacaccgtggaagcacatgaccggtcgtcgactgcaattcggcgctgctgtcatggaggataaactgatcctagtgggcggacgtgatgggctaaagaccctgaacaccgtagagagtttggacctgaatacaatggcctgggcaccgctcaatgccatggccacaccccgtcatggactgggcgtggcggtgctggagggtccactctatgcggtgggcggtcacgacggctggagctacctgaacaccgtggagagatgggatcccatagcgcgcacttggagctatgtggcacccatgtcctcgatgcgttccaccgccggcgtggctgtcctgggcggtcgcctgtatgcggtgggcggacgtgatggttccgtctgtcatcgctccatcgagtgctacgatccgcacacgaacaaatggagcctactggcgccgatgaacaggagacgcggcggcgttggcgtgacggtggccaatggtttcctgtacgccttgggtggccacgactgtccggccagcaatccaatggtctgccgcacggagacggtggagcgctacgacccagccaccgatacctggactctgatctgctcactggctttgggccgggacgcgatcggctgtgccctgctgggcgatcgcctgatcgtcgtcggcggctacgatggcaatcatgcgctgaagagcgtcgaggagtacgacccggtgcgcaatggatggaacgagctggcgcccatggctttcgcaagggccggcgcctgtgtggtggcgattccgaatgtcataccgccggcggctcaacagccgccgcccagtgctacagtttag

SEQ ID NO: 6480 - protein, 625 aa, DROSOPHILA
MSAVNQKESPSRDSTASTSGHISMLADNTLESLSRDYSLGSLNSAGSQDEFFRCRDHADNILKRMQLYVDSQQLCDVVLIAGIDGKRVPAHRLVLSASSAYFSAMFTGSLRETKEQEVTLGEVHGDALHLLVQYCYTGFIEMREDTVETLLATACLLQLNAVVTACCNFLARQLHPSNCLGFAFFAEQQSCTTLLRLAQAYTCQYFMQVCQNQEFFQLNADQLGKLLSSDDLNVPSEQDVFHSLMSWVRHDSAAREQHIPELLALVRLPLLQPAFIMDHVENVCNANECQQLVMEAFKWHLMPERRSRIATERTTPRKSTVGRLLAVGGMDAHKGAISIESYCPRLDKWTPWKHMTGRRLQFGAAVMEDKLILVGGRDGLKTLNTVESLDLNTMAWAPLNAMATPRHGLGVAVLEGPLYAVGGHDGWSYLNTVERWDPIARTWSYVAPMSSMRSTAGVAVLGGRLYAVGGRDGSVCHRSIECYDPHTNKWSLLAPMNRRRGGVGVTVANGFLYALGGHDCPASNPMVCRTETVERYDPATDTWTLICSLALGRDAIGCALLGDRLIVVGGYDGNHALKSVEEYDPVRNGWNELAPMAFARAGACVVAIPNVIPPAAQQPPPSATV

SEQ ID NO: 6481 - DNA, 3239 bp, DROSOPHILA
cccccgcgcacgacggatgcgaaacaccccttcgtcgaggaaaacaacaacgccacgacacgctgttgacgctggcttatacaacaaaccgagagctgccctccgtagttactcccccttgtgaccccccccccctgcagtgccccactcccaacccctatccgtttccattccaatcaagcagctaacaaacgctgcgacgtcatctccatatagtgccacacacgtatgtaataatggataagccctctaaacattacccatatcgttgagcatatgtggactggcggactcacctcttgggcatttcgggcgaggactcgatggccgccactgccgacggaggtgccagcgaggagccagcgggcggtacgggcggaggcggtgggggcgtctctgtctccttgcggcgacgcttgttgttgtctttggagacaaccattttgttgcgaacttttcgcgcctctttttctctcgcctcttttctttcgctcgcgcgccttcgtccgttgaattaattattattattcgtattatttattatcgcacatacaattctccgccggacacttctttattatgtatagatttgcatatatatatgtgcacatatgtacgtatatataaatatatatatgtacgtatatatctacaacgaatagcgtttttgttgctgcctctgctgcagcacgcaattttcgtattttcgcttcatcttaacggcgactcagcggtggttttatccctcgaaataaacactaaaatgctgtttattgtcttgttattgtttagtgcactctgtgttcacatttcacacacgacaagtgctgcaaatttcattttctttcgcgagatttgcttgcacatatttttttcgtcttctgcttcttcttacaccgcttttgctttgtgtcatggcggatggtcgggttgccatactatttttccagggcggcacaagcagtaggccactcatttgatttccgtcacatctggcaaggttggttcactctgtgagttgacagaaaattttgtgcagtaaaagcaccatttttgtagcgaaatctatagtagaaagatattcaagtgactactattaacatgggcgacggtgctggaaattggtgtctcattgaatccgatcccggggtattcacagagcttattcgcgaattcggtaagttattggcgggctttgccagcgacgccggcaattgggataagaaaagttaataatactgtgtacgttcgaccaggatgcgatggggcacaggtggaggagatctggagtctcgacagcgagtccttcaagaacctagagcccatccatggtctgatcttcctgttcaagtgggtgcaggaggatgaacccgctggaaaagtggtcctggatcgggagaacatcttctttgccaagcaggtgatcaacaacgcatgcgccacccaggcgatcttgagcctcctgatgaacctggatcatgaggacatcaaattgggcgagaccctcaccaattttaaggagttctgccagtgcttcgatccgtacaacaagggattaactttgagcaacgctagccagattcgcacggtgcacaactcctttgctcgcccaacactcttcgagctggacactaagaaccagaagaaggacgatgacgtgtaccactttgtcggctatatgcccatcggaggaagactgtacgagctggacggcctgagggagggacccattgatcttggtgagatcaagtcggagcagaactggatcgatgtggtgcgtccgattattgagaagcgcatgcagcgctacagcgacggcgagatccacttcaatctgatggctctgatctcggacaggcagcgcatttatgaacagcagattgagaagctgcttaatccggcgcccaatgctatggacactgaggaggatcgacaggcggagatcagtagcttgcgcacgtacatagagtacgagattcagaaaaagaagcgctacaaagtggagaatgtgcggcgcaagcacaactatttgcccttcatcgtggagctcttaaaaattctgggcgagaacggacaactaatgcccatctacgagaaggccaagcagagggcgctagaacgcgagcaggcgcagcgcaaaaaggataccgactaagcatttacagtatatatttaaaatttcccgttggacaatttaaaattgctgcgatatttgaaataaaagaaaaaagaatggaaattatcagatattgaaacgaggagagccagtttatattgctctttagtagttagatgaaactgcctttgtactgtactttagtttttatattaaacatcctgctctctgccagttaatcgtacgcacatctgcgtgttaatctaaatataccttatacatatagtaaaaaatttaaatagaacgcaaaaataaacagtttcggtaacgtaaagaaaacacgagtggagtggatttggttttgcctttgttcgtatagaatatatttggtatatataatttacaattgctatgttttggttgtattcttctgcctctttgcatttgatttttgcgtatattcactttgaatttgatgctgcgcttgttgtatataatatgtatattgtatataggaatatttagtttgttaatcgtctgtgccgctcgccagttctatgctaaaaatttgtatctcgtcttaaaaactaggctctacatgttacttagtatgcgtatttcgggaactttcattgggaggtctttgatttagtattctcaattttggtgttttcacttatcagctaatcgctactactaatgcagctcattttggggctaaagttttgggagcggttttttagttgggggggggatatggctgggctggaaggaaaccgaagctaatatgtttgtagagttctggccaggatttggccatgtggaagtgtgctgcaccctctaagcgctatggcaactacagaaatatatttatgtatgtgtgtgtatgtatatatatactcgtaatatgtatattgttgtatatggttaccttgcgtataaatatctgaatttggcttaaactaatctttctcctgcctgttgcgtcgtgttgatatctggttggcttaattgaattttattcgattaaagttaaattttgttaacatttaggctaattttactagtgtctggtagttatccatcgggagacatcattttgtttgtctcccgctcatttaat

SEQ ID NO: 6482 - DNA, 1160 bp, DROSOPHILA
gttggttcactctgtgagttgacagaaaattttgtgcagtaaaagcaccatttttgtagcgaaatctatagtagaaagatattcaagtgactactattaacatgggcgacggtgctggaaattggtgtctcattgaatccgatcccggggtattcacagagcttattcgcgaattcggatgcgatggggcacaggtggaggagatctggagtctcgacagcgagtccttcaagaacctagagcccatccatggtctgatcttcctgttcaagtgggtgcaggaggatgaacccgctggaaaagtggtcctggatcgggagaacatcttctttgccaagcaggtgatcaacaacgcatgcgccacccaggcgatcttgagcctcctgatgaacctggatcatgaggacatcaaattgggcgagaccctcaccaattttaaggagttctgccagtgcttcgatccgtacaacaagggattaactttgagcaacgctagccagattcgcacggtgcacaactcctttgctcgcccaacactcttcgagctggacactaagaaccagaagaaggacgatgacgtgtaccactttgtcggctatatgcccatcggaggaagactgtacgagctggacggcctgagggagggacccattgatcttggtgagatcaagtcggagcagaactggatcgatgtggtgcgtccgattattgagaagcgcatgcagcgctacagcgacggcgagatccacttcaatctgatggctctgatctcggacaggcagcgcatttatgaacagcagattgagaagctgcttaatccggcgcccaatgctatggacactgaggaggatcgacaggcggagatcagtagcttgcgcacgtacatagagtacgagattcagaaaaagaagcgctacaaagtggagaatgtgcggcgcaagcacaactatttgcccttcatcgtggagctcttaaaaattctgggcgagaacggacaactaatgcccatctacgagaaggccaagcagagggcgctagaacgcgagcaggcgcagcgcaaaaaggataccgactaagcatttacagtatatatttaaaatttcccgttggacaatttaaaattgctgcgatatttgaaataaaagaaaaaagaatggaaa

SEQ ID NO: 6483 - protein, 324 aa, DROSOPHILA
MGDGAGNWCLIESDPGVFTELIREFGCDGAQVEEIWSLDSESFKNLEPIHGLIFLFKWVQEDEPAGKVVLDRENIFFAKQVINNACATQAILSLLMNLDHEDIKLGETLTNFKEFCQCFDPYNKGLTLSNASQIRTVHNSFARPTLFELDTKNQKKDDDVYHFVGYMPIGGRLYELDGLREGPIDLGEIKSEQNWIDVVRPIIEKRMQRYSDGEIHFNLMALISDRQRIYEQQIEKLLNPAPNAMDTEEDRQAEISSLRTYIEYEIQKKKRYKVENVRRKHNYLPFIVELLKILGENGQLMPIYEKAKQRALEREQAQRKKDTD

SEQ ID NO: 6484 - DNA, 3359 bp, DROSOPHILA
cttggcccgcgcctccaagggtctcctcaaatcctcgtcgatctccaaactatagcgcatatccttcgtttcgtccattttcacgggctttttcggcaagctgaaaaaggaaaactgttattagttttctcaactaaattgtatgtgtgtctaaactgtccaaactatttatgcgtactgtttctctaacaattttgacatgcaggtggcttgtttgaaagtaaatgactacaaattcatcgaacactagtgcaacactatccaaggatgggtttcaatgtgtatttaccgctcggtcattagaaactgacggagtttctgacgccattcctcagtgttttggaatttcttgaggccagacatcgtgagtgtgcgagtgtgcgtgtgtcctgggtgcaaaactccagtcgacgggataaacacgtataattgcgcgttgactatagttcagaggatttagagttcgctccagtcgatcacctaccttctggcaatagtattcacgcagatcttccttaatcttcaaggcgcacacgcaaatatttcatggatttcttcacagcacgctcatttgccaacgatcgacgcgcctttgcagtcgtttatttcaaatgccacgacagagtgcccgtattgcgcttatatttttgaatggggtattccaatggacactacacatatacatcatcggagttatatcacttataacaaataataatataaaattaagacaaatatgtctaccattaaaagcaattgtactgctccgtaacttttaacatatattatttattattattattttgtgtatatatacagacatattgagctagctagtgttcttaacaatatataatatttttataagaacgttacaacttcttgtatctctgtaaatagaacaaaatcgcgagccccctattttcggtatattttggtgatatcacggtcacaccggcgactatgcaactagaaatgccgggtcagtgaaagataacaaacaaactgcgttcggcgaaagtacttaagttaagttaaaaatttgaagtaggcgagagcacataatgaacgcactccgtcacacgatatccctggtatcgctgggcacctttcaactggtgcgccggaccagggggccgcacgccagaggctttctcctcggcacgggattgggcctggccagcttttcggcggtcacgtacgcacattccgcggaggctgtcgacccaaaggtcaacggggtgcagatgaacacctcgcggttcatggccgagcccatcaccgactccaaggcactgctgggggacaaggagaacatgcgtcatcgcatggagatcctgatcatggagatccaggcggagttttgccgcgccctggaggcggaggagaactgtggccagaagttcaaggtggaccggtgggagcggcctgagggcggaggcggcatcacttgcgtcctgcaggatggcgatgtgttcgagaaggcaggcgtcaatatatccgtggtcaccggttcgttgcccccggctgcagtacaacagatgcgggctcgcggcaagaatctgaaggagggcgcctcgttgccgttctttgccagcggtgtgagtgccgtgatccatccgaggaatccccatgtccccaccattcacttcaactatcgttattttgaagtggaaactgccaagggggagaagcagtggtggtttggtggcggcacggatctgacgccctattacctctgcgagaaggacgcctcccacttccaccagacgctgaagtccgcctgcgatgagcacgatcccacctactacccgcgctttaagaagtggtgcgacgactacttccgcatcaagcatcgcaacgagagccgcggcattggcggaatctttttcgacgacatcgattcgcccaaccaggaggcggccttcaactttgtgtcaagctgcgccagggccgtgattccctcctacgtgccgctggtacgaaagcacaaaaatcgggagtatggcaacaacgaacgacagtggcaattgctgcgccgcgggcgctacgtggagttcaatttgatctacgatcgtggcaccaagttcggtctatacacgcctggagcccggtacgagagcatcctgatgtccctgcccctgcacgcccgctgggagtacatgcacgagcccaagtcccagtccgaggagggcaaactgatgaaggtcctgaagaaccccaaggattgggtctaagctatttttaattgttcttaagagggaaccggtgccttttgcattatatttaaaacttaatgtgtacatattgtaattgttgttgcaaataaacatgacaaaatgttattgtttcctaactatttatccatatttgaaaaactagtttattccattcaacatacagtatacattggcaaataatactataaattggactcaacaagtaaaattaaatacataatgttaatgaattttaattttattacgagttatgaaattcatctatgaaatgcaacaaagtatgaacaaactcaatagacttcgactttgactcattactttgcttctcaatacataattaaagggcctggaaaataaatgttttacaatataaagtatatatgtatggtgctgagtcatggtgagacagcaaaaaatctataagaaaaatttcggaaatttttacccaataccaatattaaaaatgaacacatatacatatacatatacagccggtctaatataacaggacctgtcgacatgacttcatgtatgcatacgtacatatctactttttaatttttcatcatagtttttttttacacaactgtacctttgaaaatttaagcacatacgcacatacatcatgaatggtatgtatgtatacatggtatacatacacaatcatcatgtatggcttggctttcacaaacacacaagcgtattactagatcccaattttgaggttatagttacctctatgtaatttccagaaggttctcaaaactgacgtcatttttttttcttgttcaaatttgaggttatgttttcccagacttcgcaaattcgcaggcgtatatgtatgcttgtacttttcccgcaaattcagtgttctccgatgtgtatgtatatcaatttgcacgcacacacgcgcactggacccagtcctgctcgcacacagacgtgccatgccaatgacagtgtgtgtgcgtgctgtttagaaagagggtcacaaagcgggaaattcgcaccggcttttcgttgcagaagggcaaaaacaaacgccgatcaggcgcaggaataaatagcgaaagacggcaaattttgtgtagtttataaaatgctttatttaccattttc

SEQ ID NO: 6485 - DNA, 1359 bp, DROSOPHILA
acaaactgcgttcggcgaaagtacttaagttaagttaaaaatttgaagtaggcgagagcacataatgaacgcactccgtcacacgatatccctggtatcgctgggcacctttcaactggtgcgccggaccagggggccgcacgccagaggctttctcctcggcacgggattgggcctggccagcttttcggcggtcacgtacgcacattccgcggaggctgtcgacccaaaggtcaacggggtgcagatgaacacctcgcggttcatggccgagcccatcaccgactccaaggcactgctgggggacaaggagaacatgcgtcatcgcatggagatcctgatcatggagatccaggcggagttttgccgcgccctggaggcggaggagaactgtggccagaagttcaaggtggaccggtgggagcggcctgagggcggaggcggcatcacttgcgtcctgcaggatggcgatgtgttcgagaaggcaggcgtcaatatatccgtggtcaccggttcgttgcccccggctgcagtacaacagatgcgggctcgcggcaagaatctgaaggagggcgcctcgttgccgttctttgccagcggtgtgagtgccgtgatccatccgaggaatccccatgtccccaccattcacttcaactatcgttattttgaagtggaaactgccaagggggagaagcagtggtggtttggtggcggcacggatctgacgccctattacctctgcgagaaggacgcctcccacttccaccagacgctgaagtccgcctgcgatgagcacgatcccacctactacccgcgctttaagaagtggtgcgacgactacttccgcatcaagcatcgcaacgagagccgcggcattggcggaatctttttcgacgacatcgattcgcccaaccaggaggcggccttcaactttgtgtcaagctgcgccagggccgtgattccctcctacgtgccgctggtacgaaagcacaaaaatcgggagtatggcaacaacgaacgacagtggcaattgctgcgccgcgggcgctacgtggagttcaatttgatctacgatcgtggcaccaagttcggtctatacacgcctggagcccggtacgagagcatcctgatgtccctgcccctgcacgcccgctgggagtacatgcacgagcccaagtcccagtccgaggagggcaaactgatgaaggtcctgaagaaccccaaggattgggtctaagctatttttaattgttcttaagagggaaccggtgccttttgcattatatttaaaacttaatgtgtacatattgtaattgttgttgcaaataaacatgacaaaatgttattgtttcctaacta

SEQ ID NO: 6486 - protein, 390 aa, DROSOPHILA
MNALRHTISLVSLGTFQLVRRTRGPHARGFLLGTGLGLASFSAVTYAHSAEAVDPKVNGVQMNTSRFMAEPITDSKALLGDKENMRHRMEILIMEIQAEFCRALEAEENCGQKFKVDRWERPEGGGGITCVLQDGDVFEKAGVNISVVTGSLPPAAVQQMRARGKNLKEGASLPFFASGVSAVIHPRNPHVPTIHFNYRYFEVETAKGEKQWWFGGGTDLTPYYLCEKDASHFHQTLKSACDEHDPTYYPRFKKWCDDYFRIKHRNESRGIGGIFFDDIDSPNQEAAFNFVSSCARAVIPSYVPLVRKHKNREYGNNERQWQLLRRGRYVEFNLIYDRGTKFGLYTPGARYESILMSLPLHARWEYMHEPKSQSEEGKLMKVLKNPKDWV

SEQ ID NO: 6487 - DNA, 3373 bp, DROSOPHILA
gctgtttaggaggttggcaaccctggcgggcaggagatttcaaaacttccagtggatatgttctaactcaaggaatttttatagccgatttgtttgaataaatgtacaatgtacataatgtctgcggcagacgctgttaattataaatacaactgcggccgcaaggaagtcatcaatttaaaaagctgtctctgcattattgttattctaattacctcttttgctgttgatgcttttggcacaatttcgttttcaaattcaaacaaatttattataaaagtgtttcttcgaggggagcttatgaagaacagaactaatttaatgggctttcacacgcggttagccaatttacatgtcggtggtacatgccagcgcacacatatacgggcatatacgtatgcgagtaatttttcaattaattttaattataaacttaattaggaaatcaatgaacgacgcgaacggaacacacacgcacatactttaccgccgtgcgacggagacagcgaacatccgattgcacacacaactaaaacaatgacaacaatttccatcaagtgcgctgcgcatacaacataaaaccattcactcagcgccagtggagctccaaatagcgaacaagcccccaaaagcgaattgaagcgcttgttgaaaagcgaacaagtcgaaaagtcgaaatcaactgagcagcagttggggaaatacaacgcaaacaaggagaataggggcgccaacctgaaagggttgccagatcgttgacaccgtaaacttccttcctttttggtggttagatgtctcctacgccctcttttttttctgacatttttcttaattttctataacacaatcagagaggatctaaaatggtggtcttaatttaagaattttttttatattagacatatattttgaacttaattaacgcggcagcacacgtggctataaataaataaaagcagctaaatcgccatcactaatagttatcgttatcgggaaccgcttcaaacgtgtggttggttgttatttattccaataataaatactcattcgagccggaatgaaatttgcaatcgagagtattagcaagaattctggtcgactaggtcaactgcgaatcagggatggaggacccgagttcaagactccccttcttttgcagacgactaagggcggaagcattccgtggctgagtgcggatgttttcgagactcatgtcagccggaagccacaggtgctccaattcacactgtccacaatggaacaaatgaccgaggcacttacgcattggaacagtggtgggggtcgcggactgagcgactacgtaggactaccaggacatctaaatattctcctgctacgagatccctgtgaaacaacgccttccggaggtaacgacagggatatactgccgttgtttacgagaaggggcaaggaatcgctctcttcggagcgctacatggaaatagtagcaagtttcaagccggacatgtatgagggactctgcgatgcggacacaaatttagagagtgccaagaagcgggttcagaaatcggttgacaggacagagaagtttatgcaatacatctacgagcaccggggcaaggtgaattccactctgctagctcccattgtgggcggatacaacacctttgctcggacgcagtccattaaacatgcccgggaacagccagcgggaagctatggaggttacatcttcgagggtttccacgcgaatggtctatcagcgaccactttggacacttccaaactactgccaatagtagagcactgcgtcaagcagctggaggaggacaagcctaagatattgccgggtgcatacacgcccctaaccgttctggaactaatccaacaaggaatcgatgtgtttgacacttcctacgcatattgtgcttctctaaacttcaaggctttgtcatttagttttgtgcaggatgcagtggagcatgtgcctttcttggacataaccgacgaagctatcaaggaggattttactccgccgctgagcaactgcaattgcttgacttgccagaaacacacgcgtgcctaccttcaccacctgtacaagaccaacgaactattaggtcccatcttactgatggtgtaagtgatctttgtcaattaatttattctttcatttatcagttttctcattctttcagtcacaacctttatcactacatggctttctttgaaaaaattcgtgagagtgtggctaaagatacgcttccacagctgacggagctcgtaagaaatcagaatgggaaaacacaggtggattattccatcgcagccaataccaaagtaattagcaaggccactatggggaaaggattcgctgcggcagcagtatgacatgagcaaccaattaaacgctaaactaagtctagttagaagcctctgattatttattctctgtgtttcatatcgtcaatggttggtcccaaagatagtattcttgtccttcgaccatactcgtaatttgctcgtacacagcctttggagcattgccagttattgttcgaatcctaaatagcacctgaagctctgtaaggttctccattttatcagcatctgttaacgaaggaacagattagttagttagttcaacaacaaaattttatagtgcgactatgttacctggcaagggaatgtaaccagccaactcacagaaaccgacattaaactcggccaaatccttgtttacacagtactcggagcgggcaaatacgaataccttaatattaccgctttttccgggtctccgatcctgggtgaggaacagattgtgtggcatattgttcttgcacatccacatggcgagcatgtagagctggtccactttctccgccacctgttcatcactatcgttttcgttaaatactatacatattccttccgttggcgccctacggctcaaacgataaacatagccaccggccagctcatccaagggaacatggtctatatataaatcctggggcatgtggagaagatgaaagtgaaggtgatttacagatgccagcgctccagggctattataacccatccgcatatccttatcatcgatatttcgcataaaggtgatgcagaactgaagagcgtcacgggtaatccgttgggtatggtttttacctacttccgggcagatcaaagtatgatatttggtgattgggctcttgtttatgatcatctgaacttcgggactgccgtgtgcatcatcaatggtcatgatcacctcctgggcatcgactttattgaagttgaacatcatgtgcttaaaggtgggattgaggctctcgatggtctggggacgtcggcgcttacggtttcgatctgaattaagctggaggac

SEQ ID NO: 6488 - DNA, 1314 bp, DROSOPHILA
ttcaaacgtgtggttggttgttatttattccaataataaatactcattcgagccggaatgaaatttgcaatcgagagtattagcaagaattctggtcgactaggtcaactgcgaatcagggatggaggacccgagttcaagactccccttcttttgcagacgactaagggcggaagcattccgtggctgagtgcggatgttttcgagactcatgtcagccggaagccacaggtgctccaattcacactgtccacaatggaacaaatgaccgaggcacttacgcattggaacagtggtgggggtcgcggactgagcgactacgtaggactaccaggacatctaaatattctcctgctacgagatccctgtgaaacaacgccttccggaggtaacgacagggatatactgccgttgtttacgagaaggggcaaggaatcgctctcttcggagcgctacatggaaatagtagcaagtttcaagccggacatgtatgagggactctgcgatgcggacacaaatttagagagtgccaagaagcgggttcagaaatcggttgacaggacagagaagtttatgcaatacatctacgagcaccggggcaaggtgaattccactctgctagctcccattgtgggcggatacaacacctttgctcggacgcagtccattaaacatgcccgggaacagccagcgggaagctatggaggttacatcttcgagggtttccacgcgaatggtctatcagcgaccactttggacacttccaaactactgccaatagtagagcactgcgtcaagcagctggaggaggacaagcctaagatattgccgggtgcatacacgcccctaaccgttctggaactaatccaacaaggaatcgatgtgtttgacacttcctacgcatattgtgcttctctaaacttcaaggctttgtcatttagttttgtgcaggatgcagtggagcatgtgcctttcttggacataaccgacgaagctatcaaggaggattttactccgccgctgagcaactgcaattgcttgacttgccagaaacacacgcgtgcctaccttcaccacctgtacaagaccaacgaactattaggtcccatcttactgatggttcacaacctttatcactacatggctttctttgaaaaaattcgtgagagtgtggctaaagatacgcttccacagctgacggagctcgtaagaaatcagaatgggaaaacacaggtggattattccatcgcagccaataccaaagtaattagcaaggccactatggggaaaggattcgctgcggcagcagtatga

SEQ ID NO: 6489 - protein, 418 aa, DROSOPHILA
MKFAIESISKNSGRLGQLRIRDGGPEFKTPLLLQTTKGGSIPWLSADVFETHVSRKPQVLQFTLSTMEQMTEALTHWNSGGGRGLSDYVGLPGHLNILLLRDPCETTPSGGNDRDILPLFTRRGKESLSSERYMEIVASFKPDMYEGLCDADTNLESAKKRVQKSVDRTEKFMQYIYEHRGKVNSTLLAPIVGGYNTFARTQSIKHAREQPAGSYGGYIFEGFHANGLSATTLDTSKLLPIVEHCVKQLEEDKPKILPGAYTPLTVLELIQQGIDVFDTSYAYCASLNFKALSFSFVQDAVEHVPFLDITDEAIKEDFTPPLSNCNCLTCQKHTRAYLHHLYKTNELLGPILLMVHNLYHYMAFFEKIRESVAKDTLPQLTELVRNQNGKTQVDYSIAANTKVISKATMGKGFAAAAV

SEQ ID NO: 6490 - DNA, 2646 bp, DROSOPHILA
tcggacgggttttgtgatcggccaaaagaagtatcatccaggggatagcaggaaactgcgtctgctgttttgctgccaagtgattgaattatatgcttgatgataaaaatccaaagatcatttatcagaatacctatgcttatgcaatttctaagaataaccatgcaaataaagtcagcgcaaaatgttgcgtatcaagtcgaagaagtaattaagcttaattaacccaaaattggcatttcggctgtaaagcgttacttaactggaaagtcatttcctttataactaatttgcgtttaggacgtcatattacaaaaagtctatcggttatatgaaaattccgaacataaatttaagctcaaatgactattattaaattaactaactgtcagcgaatcgtggtggtagctaatttgtagttcataccatcgatcattcaaaaacaaaagttacatttactacacatcttgaaaacatcgacaatacgatttttacgacactgcagttcaacgatcgttatggtatttagagctccttgggatggtaagtcgagccgggcaatatgggattttcaagatcagccacaatacatatcaaattgtaagtgccccaaccttcgagtagggcataaccatccatccattcacgaatgtttcatttaggttttactcggctttccgttttgccgaactccacaccgtcccacacttttgggaattgcagcggcgacaacgacaaataacgccgttgatacctatataaaataattcctataagaaataaaatcattttatttatgactgactaaggcgaccagcagcgatgagatgtttgtagatggagacgatcatgacgatgacgagcggagatggagatggaaacggcaacggcaacggcaactcggaactgggtttccgaggcgatgtatagccaaaaatccgctggtgagcggatggatataaaaacgaaagcgtccgagaagcaggcaagcagtttagaaccaaactcgaacgcgacaccatgtatttgcttgtaagcatcacctgggaatttcccgaaattggattataatcgccgactctcgtctcgaatcccgcccacaggtgaacttcatcgttgcgctggccgtgctgcaggtgcaagccggctcatcctacattccggactcggatcgcaacacacgcaccctgcagaacgatctgcaggtggagcgggatggcaagtatcggtatgcctacgagacctccaatggcatttccgcatcgcaggagggattgggtggcgtggccgtacagggcggcagtagttacacatcacccgagggcgaagtaattagtgtgaactatgtggccgatgagtttggctatcatcccgtgggcgcacatataccccaggtgccggactacatactgcgctccctggagtacattaggacgcatccctaccagatcaaggactactacaccggggagctgaagaccgtggagcacgatgcagccgcctttaatgtgtacacacgcaacattcaggatcatacgatcccccaatcccgaccgagcaccacgcccaagaccatttacctcacccatccgcccacgaccacgtcgcgacctctgcgccaaagacgagctcttccgacgcactgatgatcgatggacgtgattctttggcggggcaaggggctggtctcttcggcggccagcgggcgaatctgtgaattttgatctaaacaattaattaagccacgaacaataaatagaagtgctaagcaaacataagctaaagtgtaatcgatctgtcgagttgtctgctggggatcatggatcacatcatggagcgacataaacaattttgggtattcgattctgtttatggcagagcaatcaatttgaaagaagtctgtcccaagcattccattgaaatgcgagcaattgagactgaaagttaataattgatattgagtttaagaattaggggaatcctattaagctgttgaaccaatatattttggcaattcaaatttccatatttaataacgaaccaaataacacctgttgtccgcgctttaaagtctataaatgatgggatcgtaaaagtcgcatttgaaagatataatttaaaggaataaaaagtggaaaggcccaatttaaaggtaatttttgtataatctaaaatcgaatctaaaatttttgccactgctacctgctataattaattaaccgaattaaagcagataatgtattaaaactggtttttggttcactttcagttgtagttttgtgtatttttgtgtataccattatttaagtttgaaaaacgttgttaaatgagtactcaatgaacaaatgtatatgttgtaatttaatttactaatatgtagattatatatatatacaacaaattaatactttacaaaattaagcagtggatgcatagtgcaaaactttttaaaaatatatttccaataacgagatagatcacacatcacttatcagccagacgtgcaatcgcgcccccatggcccgtctaagggttaaggcgtcgcgacgcaccaagattggatgcaatgaaacgttttcccagcgtctcgattacggatttatgactgccgctcagcataaaggtgctcgtcgagcatggagtgcg

SEQ ID NO: 6491 - DNA, 575 bp, DROSOPHILA
ccaaactcgaacgcgacaccatgtatttgcttgtgaacttcatcgttgcgctggccgtgctgcaggtgcaagccggctcatcctacattccggactcggatcgcaacacacgcaccctgcagaacgatctgcaggtggagcgggatggcaagtatcggtatgcctacgagacctccaatggcatttccgcatcgcaggagggattgggtggcgtggccgtacagggcggcagtagttacacatcacccgagggcgaagtaattagtgtgaactatgtggccgatgagtttggctatcatcccgtgggcgcacatataccccaggtgccggactacatactgcgctccctggagtacattaggacgcatccctaccagatcaaggactactacaccggggagctgaagaccgtggagcacgatgcagccgcctttaatgtgtacacacgcaacattcaggatcatacgatcccccaatcccgaccgagcaccacgcccaagaccatttacctcacccatccgcccacgaccacgtcgcgacctctgcgccaaagacgagctcttccgacgcactga

SEQ ID NO: 6492 - protein, 184 aa, DROSOPHILA
MYLLVNFIVALAVLQVQAGSSYIPDSDRNTRTLQNDLQVERDGKYRYAYETSNGISASQEGLGGVAVQGGSSYTSPEGEVISVNYVADEFGYHPVGAHIPQVPDYILRSLEYIRTHPYQIKDYYTGELKTVEHDAAAFNVYTRNIQDHTIPQSRPSTTPKTIYLTHPPTTTSRPLRQRRALPTH

SEQ ID NO: 6493 - DNA, 3893 bp, DROSOPHILA
atggtgtcgtacgcttcacacactgcacgccatctcgctcgcaccggtgacgggcccacattccatatgcataaatcgtatacacatacttatatcctgacaagactgcgccaagccaaaattccaaaaaccaaaattgctcatttttgcatgtgaagtgtgcgaaaccattagaaaaacaaaacaaacaaaatcaaaaaaaaaaaaaacgaacgaaaacaatcaaaaagacaactgcaattgcttagttttagttagtaaatacttgtcccatggaatgattatatttcgacttttgcatcgtcattttgtaccgatattattcttagtaaatactagatgtgtgtgtgcgtacagcgagcatttatttctaattgtttattatgtttttatttctttcttttccctttcccttcgattgcatttaaaaattaaagaaaaagaagaagtggaagccagtgagattggatccaatctgctataataggcgtcccagatgtgtcgagtttgtcgactactataacatgtaaatgctagacagacaagacaacaaacaaagcaaactataaacatttaagccaagctaaaagaaaaaacacaagaaaacttgtcaaaaaaaaaaaaaaacaatccaaatattacgtattattttatatttacacatatatatatttttacacaaaacatacactgcgaaatgtatacactggatatgtattttttgtaataaaatcgaaaattaaacggttattcgctgcatttgaaaaaccgaacatataaaataatactattttgtcggttaagcggggattgctcttttaaatgggtaacttcaagtttcttgattgtatttaaatatttgaaataatatatttaaattatctaactttctgattggaatacgattttttttagaatattagtggtaagggcgtaccgatagttggcattcgatggttgagatatctggcaacgccccgtagtatattagattagaacggcaaaggtgcggtcacactggcggaaattataaaaattaattaaattaacttaaacgacctaaaaagcgaactcaacgacagctttgaacggccaccgttggcgacatggaaacggagcacctgaaacgactagaggccaaggaggcggaccacattcccgccatcctggacgaattcaacacaaaggtgagcactgccagcggtttctcccgaagattcaaccagattatatacccttccttctgccgtagaatgcggatctgctggtcttcgacagtttccgcacagacaacctgtggcacgaactgtggctggccatcttcggcatattggacgaccagcggcttagtcatctgcatacgcagtgcctgaacacggtgaggattctaacgcgtgacgagttcagcctgcagacgaactacatcgaacaggaggttaacaccctgctgaagctggctaggattgaggccggctcactaaagctgccagccacgccggacgagcttaaacaggaggaacgcgaggagccccagctggagcccagccaggcccaatcggaggtgattgccgaagcacttaagtgtctgtgcaacttggtctaccagagctccgactgcaggcgccagtgcctgcggcaacactgcctggatgcaatcctgaagagggtggcgtcctcgatgcgacatccctgtgcgttggagtactacgacatgaagctcctcttcttgctcactgcattagagccagcggcgcgctctcgcctccaaatcgatctgaatggcctcacctacatgactaagtggctggacgacaagctgggcgaagactcagttggcgaggagcagctgaacatcatctgcgaactgctcaaggtgatgttcaacgtgaccagtgctccggacaagagccccaacgaatacgaaatccagagcttgcatttgacgggagtgctgagggagctactcctgcgtttcggcgacttggccacagaaaaggatcgcgccgtcgtcacacacgccatcaatctgctgacaaacatctccggcagctgcctgacagaactcaccctgcgttgctccaatgccgagttggagtcgcacaaggaaagagagcaggacaacgagaaggaaaaagatacagaagctggagcgggagccaaaccccgtgagtgctgctcgcagtgcttcgaaaagcgcaatgttcggagtctggacgtgctactccgctacctaaggcaatctctggcccaacaggaggccgaggctagctcgcatgagttgctttccccagtgctgaccgtgctggtgaaatgtgcgcgcagcgatcgagttatgcgtcactatctacgccaggagattctgccgccgctgcgggacgttagtcaacgacctgaggttggtcaggagctgcgcaatcatctgtgtcggttccttacactgcccgcgatgatcctacgagatctgtccgccgaactgctgttcgtactgtgcaaagaaaatgtcggcaggatgatcaaatatacgggctatggcaacgcagccgggctctttgccaagcggggtatactcgactgccggcgagtggagggcaccgactactcctccgacagcgaggacagcgacaccgaggagtacaagcagcagcagcagggcatcaatccagtccttggctgcgtagagccgcgcagcaagtcgcatctggacgacataagcgaagagcagaaggaatacgaggctatgcagctggtcaatctcatcgaacagctgcgtcagggcgggatcgtaaagccggcgatgatagacaaggacgggcgcccgcagccgctggaacacatccttcagctgcaggaggagctgccgcagcagcagctcgaccagaagcggaaaacctaagccacaaatgtattgcgggatctgctatggcacaacttccaaatagctaccaaaaaatcaccttaaactctgcatttattccataagtttactgtcgaatgtagcttcgaatgtgttcaaaaagcagatttttttttttacatagtttatatattttataccacatattcgagaacatctcattataacctacaatttgttaaccaaaaattatccaatctggctttgatttcagtgatcagcttttgtctaaatgccattattattagtgttagctaaaataattataatctatccaattagcttcaattcgtagataagttcggtctcccaacttttacagaatttctttaaccattaaccatgtagaacgttgtacttattaagttattacgcacttcgttgttattttgttgtcccgtgaattgttcgcacttttaaagttgataccatggcatcccataacgtacggcttgaaaaaaataactaaatgcaaaacaatcgttggggtcttccaatttcaggaagtagggagcagatgaacatcaaatctgaattcatttaaatacacgcccacactataggacaactaggacgacttttcattttaatagttaagtgcatgtatgtattatatttataaaattccaattatacacttaggatctaggaatgaaagctcttattccgattctcagttttctattacaaatgatgttgcatgtgtgtaacactaactatagctctagaatcgaactaaacgaactacaaagtctatctatgacagacggcagtgaggagcacttgaagagccatcaagttgtggatgtcgacacggccatgcaaccaactatcccatccgcacattgttcatgtccatgtctaatctatgttgtaaattccgcataatagggtaaaggaataattccaaaactttctaaaagttacgtgtctttgatctatatacaagaaatcctatctagagctttattgtgttcaa

SEQ ID NO: 6494 - DNA, 1738 bp, DROSOPHILA
gcaaaggtgcggtcacactggcggaaattataaaaattaattaaattaacttaaacgacctaaaaagcgaactcaacgacagctttgaacggccaccgttggcgacatggaaacggagcacctgaaacgactagaggccaaggaggcggaccacattcccgccatcctggacgaattcaacacaaagaatgcggatctgctggtcttcgacagtttccgcacagacaacctgtggcacgaactgtggctggccatcttcggcatattggacgaccagcggcttagtcatctgcatacgcagtgcctgaacacggtgaggattctaacgcgtgacgagttcagcctgcagacgaactacatcgaacaggaggttaacaccctgctgaagctggctaggattgaggccggctcactaaagctgccagccacgccggacgagcttaaacaggaggaacgcgaggagccccagctggagcccagccaggcccaatcggaggtgattgccgaagcacttaagtgtctgtgcaacttggtctaccagagctccgactgcaggcgccagtgcctgcggcaacactgcctggatgcaatcctgaagagggtggcgtcctcgatgcgacatccctgtgcgttggagtactacgacatgaagctcctcttcttgctcactgcattagagccagcggcgcgctctcgcctccaaatcgatctgaatggcctcacctacatgactaagtggctggacgacaagctgggcgaagactcagttggcgaggagcagctgaacatcatctgcgaactgctcaaggtgatgttcaacgtgaccagtgctccggacaagagccccaacgaatacgaaatccagagcttgcatttgacgggagtgctgagggagctactcctgcaactcaccctgcgttgctccaatgccgagttggagtcgcacaaggaaagagagcaggacaacgagaaggaaaaagatacagaagctggagcgggagccaaaccccgtgagtgctgctcgcagtgcttcgaaaagcgcaatgttcggagtctggacgtgctactccgctacctaaggcaatctctggcccaacaggaggccgaggctagctcgcatgagttgctttccccagtgctgaccgtgctggtgaaatgtgcgcgcagcgatcgagttatgcgtcactatctacgccaggagattctgccgccgctgcgggacgttagtcaacgacctgaggttggtcaggagctgcgcaatcatctgtgtcggttccttacactgcccgcgatgatcctacgagatctgtccgccgaactgctgttcgtactgtgcaaagaaaatgtcggcaggatgatcaaatatacgggctatggcaacgcagccgggctctttgccaagcggggtatactcgactgccggcgagtggagggcaccgactactcctccgacagcgaggacagcgacaccgaggagtacaagcagcagcagcagggcatcaatccagtccttggctgcgtagagccgcgcagcaagtcgcatctggacgacataagcgaagagcagaaggaatacgaggctatgcagctggtcaatctcatcgaacagctgcgtcagggcgggatcgtaaagccggcgatgatagacaaggacgggcgcccgcagccgctggaacacatccttcagctgcaggaggagctgccgcagcagcagctcgaccagaagcggaaaacctaa

SEQ ID NO: 6495 - protein, 543 aa, DROSOPHILA
METEHLKRLEAKEADHIPAILDEFNTKNADLLVFDSFRTDNLWHELWLAIFGILDDQRLSHLHTQCLNTVRILTRDEFSLQTNYIEQEVNTLLKLARIEAGSLKLPATPDELKQEEREEPQLEPSQAQSEVIAEALKCLCNLVYQSSDCRRQCLRQHCLDAILKRVASSMRHPCALEYYDMKLLFLLTALEPAARSRLQIDLNGLTYMTKWLDDKLGEDSVGEEQLNIICELLKVMFNVTSAPDKSPNEYEIQSLHLTGVLRELLLQLTLRCSNAELESHKEREQDNEKEKDTEAGAGAKPRECCSQCFEKRNVRSLDVLLRYLRQSLAQQEAEASSHELLSPVLTVLVKCARSDRVMRHYLRQEILPPLRDVSQRPEVGQELRNHLCRFLTLPAMILRDLSAELLFVLCKENVGRMIKYTGYGNAAGLFAKRGILDCRRVEGTDYSSDSEDSDTEEYKQQQQGINPVLGCVEPRSKSHLDDISEEQKEYEAMQLVNLIEQLRQGGIVKPAMIDKDGRPQPLEHILQLQEELPQQQLDQKRKT

SEQ ID NO: 6496 - DNA, 3603 bp, DROSOPHILA
ttatcgcggctagcagcttgttttgttttgcttacacgacaaataaataaatataaaagaagtatgagtaatttaaaatcggacctggatgaatacttgctactgcagagtgatcagaagaaaccaagtttcaacgtcaagttgccacagctgaaagttccatttttctccagctccgacccagaagcaaatagttttctgaaagatagcgactcatgttttccaaaattggtgggtttatcaatctctggtgtgttcagaatgtgctaatttaaaattgaacttttctagtctcgcctgcagcgaatcgtgggcttcgtggcctgtttaggaatgggcgcattgtgcatgaccctttccacgttctacattcccttcctaatattgaaggccagaaagtttgccttgctctacacccttggcagcctctttttcattttgagcttttgctttctctccggatttggatcctttttaaagcaaatgttttccaaaccaagactgctcacctcgctttcatatagttcctgtttgattttaaccttatactgcgccttggtggccaaaagcaccgcatttacagtcctttttgcagtggcgcaaataattgcattgctctttatggtcctgggcactgtccctgggggagctacggggctcaagttcttcggacaactcttcaagaacaccgtttccgcttcaacaagtgtactgcctgtatgaaggaggggaaatctggaaaatgagctccaccaccgcagcaataaaagtaacttattaactcattgataaatctaaaataaaacttatttgtgataccacgcgcctcccaactgtacgatatcaactgtatagatatttattcgtagggcttatttaaaatgcgttcttactataatttcatcatcattttcaggtattcgaagaaaggccagttctgcacgttgaaattgtaatagtaattgtatataaagacaaaactggagtgtaatgcatatttcgtctacacattttatactttattgacttccacctagcgaattcagataatttgtgcacaacaaactaatctaagaagtaacgtgggtttcaataatcgctttcgctcttactattcaaaattggtcattcatcgatctctcccagatacaaagtcttatcgctggatccagatagaatcaggggttcttttgggctgaaatccacggcattgacactgccattgtgtccgggcagcttgtaaagaattctccttgtatttacatcccaaatatagacatgccgatcggcggaacccgatgttattttatcgcttcccggcgaccaagcgcatctcagcagattcttctcaaaattgtgctgatggccttggaataccttcacacatctttccccgggtgcataaggtctcacgtcccacaccctcaaggtgttatccatggcatttgtcaagataaagtctccttcgggggacaaggacattccggtaatcgtatccgaatgccctcgcagatggtgcaagacagcctgttttcgaatgtcccagattttgacttcgttgtcgatcccgccgctaattacttgttctccagtgtcaccaaaacaaacagctgtgacttgaaaaggggattccaaagtgtgtgccgcgtgttttttcctggcgtcccagatttttatggtgcgatcatcgcttcccgagcagaggagctgttgacccctacgcgagccctgaacgctgttcacgaagttgccatgccccttgaaccgccgttgccgctggcccgtggctatgtcccaaaaggccagagttttatcagtggagcaggtaaaaatgtgcgatccatccggcgtaaagtgagcttccataacagcaccgctgtgtcccgacatggccatcacattctcgcagtcttcgtacacttgccagatgtctgaaatccatattaattgttttacatgctatttctataatcaaagatgttcaagaactacaaattcatttgcgcccaaaaatgtgacgatataggctctcatacacggcactattgtatgaatgcatagatagcttggtattcatacgactttatcacacatttattccaaattttactcacagatttgcctatcgaacccagaagaaagcaataactccccctcgggatggaattccgctgtgaaaatctctccctcatgtccttctaattgcattatgggcgcctgcaggtttgaggtacgcctcactccctaaaaattatagtaaaagcatattcaaagtttatcaaaatttacttagtgcttcttcttgctagcacgcttaccgattcaaggagcgctttgtccctgtttgtgtaggccatcagatcatttttgctacgctttgcctcttgggccaaaattacgctattattgggtcttttggtacccataattaagattttgtttgtaaaaacagaagccttataattttttttcttccgctcaagctgtatggctgtgtgaccagagttcgaaatataatattaccgacatggctgttagcgattaattcagatatttctgaatagatgtggctactttcagtgagaacaaaggaagtgaaagtcggcaactctggcaaaaatactgaaaaacattttaccagaattgtttctcattttatttttacacaatttgcagttttacaatgtgaaactaaccaagaaaaacgggtctccgtctagtaggcatcaacgcgtgggggatccgcaaaaaattcttgtcccttacgctcccccttgagccactgcttgtagcgttcgtttcgcattgcctgaaagaggaatttttagcattttagacaaaattacagatcgttagggatatgaagctacggaaaaactcacatggaagcgcatcagttgcttctgcatgccgacgcactcctgaaagtcggagatcaggtcggcgcactcccgttttccacgctccaggccataggcctcgaagcactccatcattttcatctcgaattttccgcacttgtcgtaggtctggtggttaattaggcacccggtcagatcggttaagggcaggcgtagaaagggggtaagcgacattttgtctgtggagcgaagcacacacactgtgacgtaacaataaacaaggggtttaagccttcaagccgttagcagtctctggcccccaagaatttcaatgtattctctacaacgttaagtagagtatatcctgatcacacaccttaaattgttggcaatacccaaggaattgtcttatattgccttaattccagcacaaaaacaagactgtcatcgatttctgatatcgggtatcgtttttttcgagattcgacagctgatagtgttggttagcgcgcgaaccgcttccacgttttgtttataattttaattacacgagaagctatgaaaaaccaggatttggtggaatatttaaggtcgtgcggggtgtgcgaaatttgccagctgcgttacctgaaggccagaggcgcggagtatagaaacatcaatgagactttgcaaaaggtaagaacggtttaatttgaatttgttgacaactaattgatgtctaacttgtccgtttaaatgc

SEQ ID NO: 6497 - DNA, 1346 bp, DROSOPHILA
gactttcacttcctttgttctcactgaaagtagccacatctattcagaaatatctgaattaatcgctaacagccatgtcggtaatattatatttcgaactctggtcacacagccatacagcttgagcggaagaaaaaaaattataaggcttctgtttttacaaacaaaatcttaattatgggtaccaaaagacccaataatagcgtaattttggcccaagaggcaaagcgtagcaaaaatgatctgatggcctacacaaacagggacaaagcgctccttgaatcgggagtgaggcgtacctcaaacctgcaggcgcccataatgcaattagaaggacatgagggagagattttcacagcggaattccatcccgagggggagttattgctttcttctgggttcgataggcaaatctacatctggcaagtgtacgaagactgcgagaatgtgatggccatgtcgggacacagcggtgctgttatggaagctcactttacgccggatggatcgcacatttttacctgctccactgataaaactctggccttttgggacatagccacgggccagcggcaacggcggttcaaggggcatggcaacttcgtgaacagcgttcagggctcgcgtaggggtcaacagctcctctgctcgggaagcgatgatcgcaccataaaaatctgggacgccaggaaaaaacacgcggcacacactttggaatccccttttcaagtcacagctgtttgttttggtgacactggagaacaagtaattagcggcgggatcgacaacgaagtcaaaatctgggacattcgaaaacaggctgtcttgcaccatctgcgagggcattcggatacgattaccggaatgtccttgtcccccgaaggagactttatcttgacaaatgccatggataacaccttgagggtgtgggacgtgagaccttatgcacccggggaaagatgtgtgaaggtattccaaggccatcagcacaattttgagaagaatctgctgagatgcgcttggtcgccgggaagcgataaaataacatcgggttccgccgatcggcatgtctatatttgggatgtaaatacaaggagaattctttacaagctgcccggacacaatggcagtgtcaatgccgtggatttcagcccaaaagaacccctgattctatctggatccagcgataagactttgtatctgggagagatcgatgaatgaccaattttgaatagtaagagcgaaagcgattattgaaacccacgttacttcttagattagtttgttgtgcacaaattatctgaattcgctaggtggaagtcaataaagtataaaatgtgtagacg

SEQ ID NO: 6498 - protein, 347 aa, DROSOPHILA
MGTKRPNNSVILAQEAKRSKNDLMAYTNRDKALLESGVRRTSNLQAPIMQLEGHEGEIFTAEFHPEGELLLSSGFDRQIYIWQVYEDCENVMAMSGHSGAVMEAHFTPDGSHIFTCSTDKTLAFWDIATGQRQRRFKGHGNFVNSVQGSRRGQQLLCSGSDDRTIKIWDARKKHAAHTLESPFQVTAVCFGDTGEQVISGGIDNEVKIWDIRKQAVLHHLRGHSDTITGMSLSPEGDFILTNAMDNTLRVWDVRPYAPGERCVKVFQGHQHNFEKNLLRCAWSPGSDKITSGSADRHVYIWDVNTRRILYKLPGHNGSVNAVDFSPKEPLILSGSSDKTLYLGEIDE

SEQ ID NO: 6499 - DNA, 3252 bp, DROSOPHILA
cgggtaatccgttgggtatggtttttacctacttccgggcagatcaaagtatgatatttggtgattgggctcttgtttatgatcatctgaacttcgggactgccgtgtgcatcatcaatggtcatgatcacctcctgggcatcgactttattgaagttgaacatcatgtgcttaaaggtgggattgaggctctcgatggtctggggacgtcggcgcttacggtttcgatctgaattaagctggaggacaagaatcaataaatattactagagaacaagaatatgacactcacctccgcatagaagccccagtatcctggtattttccggctctgaggggatttctccaattgatatgaaaacagcccgggcaccttgtgcagctggtcccatctcaccttcatggcgttgagatagagctgcgccctcccctccagactcgtctcgtacttaaccttgctcatggttcgcctacggaccggtcgctttacctcctggtcctctttttgcctgcaatccgcggatcggaggactaccagcggcagcagagttgcaaccttcagcgaaaacctgttgctaaagccggcggctataaaactgctgtatttttgggcaacatatcggttgaatcgaaagaaggctgcgaaatgccgcgaaaacatttcgttttgtgctgggcagggaaaaacaaactgaaaatttagtacaattttaaggcccagacaacctgacaacccagaccgcccagacagctgattgctgacttcagcggcgtggcaagagggttaaaaaaaaaaacgagtcagcgcgttcgtttttataaatatggatcctaataaagtcccaatttcggaattttattagttagaagctggcgtacgagatttaagaagcatattttattttctgaaccccattaaaaaatttgagctacgcctttgatccaaaagacctgcatccctggtttgtttgctgctgaaattggctgcattcatcaacaaatggcccaagttcgaggatcttgcgaaagtttctgtcccgatggggaggcgaaaatgtaggtaaacgaaatttaaacccgaatttaatataataacaccgtttaatacattcaggcgtattcgcgagaagcttttgcactatttcgagctaaaaaatggccagaagaacaagccaggagtcctggtcaaggagtttacacgctccgccgccgatgtcaagatgcccatgcccaaggaaatgcgcacagaagcggcattgaccaaaacagtggaatatctgctcaaggagcaagtatattaggcgcttagttagccaagttaaatctgataattaatatactgtgcagcataatcctggacacacgaaagccgtacaatgtggcttacgacttcatattcgatcgattgagggcggtgcgtcgggagatcgtgatccagatgtacgatgccagtcagaagatttgcctgttagagcccattgtgatgtttctggcatatagtcgctatcgcttgtgtgaggagcccatcgagaagttcgatctcaagatatgcaatcagcatttgcaagagtgcctcacgggagtgctttgctgttacgaagaactggaggacttggaatcatctagagaacccaccgttcgtgagcttgagcggcgctgcttcatagagagcctgtatcaattgtttaatctgggttctcccgagtcctttacacgcgccctcaccttaccggactatgtgcgtcgggatgcgacgtttaagctttgttttgggatctgtttggccttccaacagggcaatttgtatagagtgctcatgggtgtgccacaattgccgcatattctgtgcgcggtagctgccgccaagttgcaggtgataaggaggtacagtataactttttctattggatctcttattgacatgatgcatttttaatgtaaatacatatgtatgtatgtatatttgcaggagtttgttgcagattttcacgcatgcctacaacaacaaacagcttacggtgccggttccttacttgttgcgtttactgttgttcgatgggccaacaggattgcaggaccaatgtcggcattataatatatccttaacagcggataggaaggcggtgcaatttaataagactgattttaaccacaatgcagaggtatttacaccccaacacgagcgctttgtggagtcgaagctgaagcgtatttatattccagaagttctattgctaaagaaatttaactagttatttatgagcaacaattgtaaatagctcgaaataatagtaaagccatggagattaatttattgttattgcgcatttgttttcttgtcgggtggcaaccctggtggcagaacaacaaacctatcgcttatcgaaagacagaacgccgcggtatttacagctaataaatggtttgccagttggaggttaataaaatgcaatttttgaatagtagttaagattacatttgtgctgttttgcgaagtaatgcgaagagaataaccaatctccgctgaataaaccgcttaagatatacacaaagcgcgcgcagggttgcattgtggcgcctgtcgctgcacactacacacacacacaccccacacacgcaacgcgagagaaagtaccgagccgtttctggaaaatacaattccgccatattaaccggcaaaattcaaaatatttacactgcccgaggtgagcgggatcgaggtggtcatccaaagcgagaattaacccgccattgggcagcaggagagtggcgggcggagcggagcgagcggtacgcatcattcgccgtctgccgccgccgtcgcacaataaacgataggcattggccacaaaaaagtggaaaaagaggtggagggaaaggccagttcagtgcagcaataccgacgaaaacacgtacgtttgtccactttggaagtctggcgaatatatagagatatatacataatacggatttttggccagatactaattgcccactttttccgcagcgcgctcgcacacacaacactaacactcacgcacgaagcaagagcgcccacaaatacaagcatacagatacaggcacacagacaggcagacggagcagccgcgatgacaagtcatcatcatcacgtcggcgtcggagggaacttccagcctcaactgcatcagatacgagcgcccatcgtgaagaatctatcgctggccgctgcggcggtaccgttgcccctgcactccgccccgtcgtcggcat

SEQ ID NO: 6500 - DNA, 1032 bp, DROSOPHILA
atggcccaagttcgaggatcttgcgaaagtttctgtcccgatggggaggcgaaaatgcgtattcgcgagaagcttttgcactatttcgagctaaaaaatggccagaagaacaagccaggagtcctggtcaaggagtttacacgctccgccgccgatgtcaagatgcccatgcccaaggaaatgcgcacagaagcggcattgaccaaaacagtggaatatctgctcaaggagcaaccgtacaatgtggcttacgacttcatattcgatcgattgagggcggtgcgtcgggagatcgtgatccagatgtacgatgccagtcagaagatttgcctgttagagcccattgtgatgtttctggcatatagtcgctatcgcttgtgtgaggagcccatcgagaagttcgatctcaagatatgcaatcagcatttgcaagagtgcctcacgggagtgctttgctgttacgaagaactggaggacttggaatcatctagagaacccaccgttcgtgagcttgagcggcgctgcttcatagagagcctgtatcaattgtttaatctgggttctcccgagtcctttacacgcgccctcaccttaccggactatgtgcgtcgggatgcgacgtttaagctttgttttgggatctgtttggccttccaacagggcaatttgtatagagtgctcatgggtgtgccacaattgccgcatattctgtgcgcggtagctgccgccaagttgcaggtgataaggaggagtttgttgcagattttcacgcatgcctacaacaacaaacagcttacggtgccggttccttacttgttgcgtttactgttgttcgatgggccaacaggattgcaggaccaatgtcggcattataatatatccttaacagcggataggaaggcggtgcaatttaataagactgattttaaccacaatgcagaggtatttacaccccaacacgagcgctttgtggagtcgaagctgaagcgtatttatattccagaagttctattgctaaagaaatttaactag

SEQ ID NO: 6501 - protein, 343 aa, DROSOPHILA
MAQVRGSCESFCPDGEAKMRIREKLLHYFELKNGQKNKPGVLVKEFTRSAADVKMPMPKEMRTEAALTKTVEYLLKEQPYNVAYDFIFDRLRAVRREIVIQMYDASQKICLLEPIVMFLAYSRYRLCEEPIEKFDLKICNQHLQECLTGVLCCYEELEDLESSREPTVRELERRCFIESLYQLFNLGSPESFTRALTLPDYVRRDATFKLCFGICLAFQQGNLYRVLMGVPQLPHILCAVAAAKLQVIRRSLLQIFTHAYNNKQLTVPVPYLLRLLLFDGPTGLQDQCRHYNISLTADRKAVQFNKTDFNHNAEVFTPQHERFVESKLKRIYIPEVLLLKKFN

SEQ ID NO: 6502 - DNA, 8357 bp, DROSOPHILA
ctatgaacgcgcctgcgtgaacgggtagcaaaagcaggaagcaggagtaaagaagagcttgatgtgtgtgtgtgtgtgtgtgtgtgtggcgcatagctacacataacggagaaaaacgtaacgtaaacttaacgcaaaagggaaccgatactaccacccccttccccactctctccattagtggcctaacatagacattaattggataacctacgatcggataaacattcaatgcacgaaatctatgttgctagttcttatcctttcccattaaactctcaaaacggcattattccattccatcctggtagctcttgccggctatattaattcaaattcgatttcatgggaaagcgttatacaaatgccaagcgttttgaattggactacgcctaaggtcccgtcgcagtcgaattggaagaaggcaacaattcttgtcagatgatgacataaaattatagatatagatatagatagatatagatatttcactaaataacacaattttggtaatcaataaaaagttttcaaacctaatcatatttttattattttttttacttaactgacttaggacttcaaaatgaataagaaaattattacctattgtatatcaataagaatcgcatttccaattcttgctgagttacgttaattttgaaattagatttatctgaaaaatggccaatatactttgctaacatccggaaagtatgcagcagagtgtgtgagtgtgtgtgtgctgttgcaaaagccagaggcgttttaaagggggttgcactgcgtatggaaagggtaaaaaagaaatgtttcatttgatttaatgccaaattccctttctccatatgtcagtaaggttcatctatatttgatatattttgttctgcgttacagaatttatatttctgttttagttttatatttattaatttgtacatttttgtaaatttctagccaccgattaacgtgatttttgtatccattgttcttttttaaataccaaaaggagcggcgctgtcgtccaatttgcatcgccgtgttcttcgtcagtgtttgttgtcgtctcctcgttcgtccttaattttatttcgtccttgtgcaacaagaagaagcaaaagaacagccacatcaaacaggaggaggatcactgcaatacacagtttccaaatgctttaaaaatattcggcaatatctaaatatctagaaaagtaagacaagcagcgaatcagcaacaacaatcgaaaacaccaaacaaaaaccaaaaaactaagataagccgaaagccgaaggaggctcgcaaatttgtttacaaatttgcaatacattttaagtaagcggaggagaagaaggggtgtttgttgcgcatcagtgtgtgtgtgtgtgcgtgcgcgtggattgtataggtccttcgctcatttttaccccgacgaaacgaactattgttggccttttcttgcggcaatagaagggacctcaattggaatggccctcgtgggagagcggagggacattagggagcagcagaagtagcagcagcagcagcagcagcagcaggattaggatcaggaataggatcaggaataggatcagcagcaaatgcaagcaagcgcaaaggactagaaaagcaagcagcgaccagaatttaggagccaggaaatacggaattgcaatcaggaaacaggaacgggaacgggaaaagcagcccaaaaacaataaaacaaaaggaatccattgaatcgacaaaagacaagaacttgttgtatcagagcagcgccaaaagaaaggtgagtagtagttattcaagaataatattcggctttactggtattcctgatcaatcaaagttaacttgtttgtaggacaatgactactttggaggagcctgtccaggcggcggacacggtcgatccgtgtcctccggggattcccaatctgaaaaccgttctcagcgacgatgcctcgaactcatcggtgctggaggacatcgatgtgagcaatacgagcagcagtagctccagttctagcagctctagctccagctctggttcctgctcgggatcgggcaccgatacggacaccggcaagggtagcagcaatgtcggcagtctggatgtgactagctcatcgagcattggttcagagacttccatctcatcgacgggctccacagccattgcaggaccatccactttgctagacgattcgaactcatccggactgggcctggtggtggatgtggatagcaacgggagcagccaggagctgagcagccacggcgtcaccgagctggactcgctggaggactcgtgcagcggcctaatgatcaaggatggggataagctatgcaagctgtgcaggtgagagggaattgatcattaagattattagtagcaattgaagattttactattatatgaatgtaaatcctaaatttgtgatagcattttaaagctgatcaaccggtttccttgtttgcccacagcttacgcctcgtgatgccgcgcatcttgtcttgcctccacgtattctgtgaggactgcctgcaggcagtggtatcgaaggacacgatgtcggccagctcgcccaacagctgctcctcgtcgtcgttcgatggcagcgagcaccagaaccgtttgtccgctgtgttcatcgaatgccccgtgtgcaagcaggagacaccgctgggacccaagggtatcaaggcactaccctgcgactatatcgtgaccaatatactggacctctccaatttggagtccgagcacattgtgtgcacatcgtgcaagagcaaagaggaggccatttcgcgttgcaacgactgcgccaactttctttgcaatggctgcgataacgcccataagtatatgcgttgcttcgaaaatcaccatgttgtgcgcatcgaggatctgaccaagaacgtccacgacaagctgatcatccataagccagtgttctgcccacagcacgtaagcgagaatctcaagtactattgcttcacctgccaggtgcccacgtgcaatgattgcctgctgagcgatcacaagggcagcgatcatcattatgagacggccacggtggcggagcaggcggttcgagccgatctcgaggaaacactgagtgatacgctcaagaaggccgactactgcaacgatgcgggtagcaatctgggcagtgccctcactgaactccagtcacagcacgatactgtgcggcagcaaatcgaggatgcctacaagtgctacaagcgtatgctagaatcgatcaaggatcagatgcttaacgagctgggacgcttgcactcggatcgcgagctaaagatcatggatctgatgcagagcatggagaatactatgggcaagctgcagcacgctgcccagtttggccagcgggctgtcgataaggccaattccatagagtttctgctgctgaagcccatcatcagtgcccagtgcttgaatctcatggagcagacgcccaagtgcgatatcaactatcagctgcaatttgactcgaagccagagatgttcgagcaattcgccagggagatgtttggcaaatttcaaacggatcacattgactctagtcccaagaagctggggatgacccagcagctgcaacagcaacagcagcagcagcagcagttgcaacagcaacaacatcagcaccagcaccaagtgcaacaacaacagcatcatcatcagcagcagcagcagcagaaacagcaggtgcagcatcaacagcagcagcaaaagctgcagttgcagcaacaacagcagcatcaacacaactcaaacaatttgattgtcggccatcgtggcagctcctctgtccaagggcgcctgacctcagctgtatttagccccatctcgctgccctcctcgctgcagagttccttcgatggcgacaccaactcggtgatgagcaatttctccatgatggactcgccgccgcagccatcatcgcaacagcaattgccatctgcccagcagcagtctcagcagcagcagcagcaacagcagcagcaacaggcggtggtgctgcagcaggtgcaacagcagcagaagcaccagcaacaccaagtgcagcagcagcaacagcaacaggtgctgcatcagccaacatcggcccagtccatgccgcagcagttgggtcagctcgttgcaccgcagggaattgtccagcaggctggacatgtcaatctcaacgctggtcccggtccgaatatatccatcaatggactgggcgccggtggtccgccacctagttttagcatgctggagtacaacatctcacgactggccagcttgacggaaacaatgccagacaccctcaacgatgcactggctgttggtggaggagcagccggacccgttccgaatgttgtggcccaagtgcctggtggttcggccgtgactggtgcagccgtagtgggagcatcgcatgcgcatcagcagcaatcgcaggccgtaatgccggcatcggcggtcactccaacgcagccaattaccttggctgacatcctatcgggcgaccagcgggcgcttaataatctccaggcgctggccaagctgggactcaacaacaatggtgagtttcttggaagccaatagattaagctttttctttcctttttttcgttttttttttttttttttttaatttttattttgcttacatctttaagttgttttttgtttctttcttttttcctgctcgcacataccccacaccacccacacccacaacaccaaaacctctaccacacacaaaatttcacaaccaactcacagatgatgggcttttgttgaacggatcctcaacggaaattgattttttgtcagatttctgcatgccaccggctacatcgcccagcctgcagtccctcaatccaatcgttggtggcgtggaggacatgggactcaataacttccatgccgtggctgcgccaggcaccaccagtgtggtcaccggccggaacaaggccactccgatgcagatccgttgcaaattcggttcactgggcaccgccaagggtcagtttaattcaccacatggattttgcctgggcgtcgacgaggagatcatcgtggcggacacgaacaaccatcgcatcgaggtcttcgacaagatgggtgccctcaagttccagttcggtgtggccggcaaggaggagggccagctctggtatccgcgcaaggtggccgtgatgcataacaatggcaaatttgtggtctgcgatcgtggaaacgaacgttctcgcatgcaaatcttttccaagtgcggacactttatgcgcaagatagctattaggtaagtgtaaatatataaaaaactaaacaattggggaaataagttaataacacaaatttgcattcatccacagatacattgatatcgtggctggcttggctgtcacagctaagggtcacattgtggccgtggatagcgtgtcgcccaccgtctttgtgatctccgaggagggagaattggttcgctggttcgactgcagcgactatatgcgcgagccctccgacatcgctatacgaggtgagcaacttactccatctcgaagattagttcattaactaattcaacactgttgtttttcattgtgcccgcgcccaccagacaacgatttttacgtgtgcgacttcaaaggccattgcgtggccgttttccaggacgacggcacattcctctatcgcattggcaacgagaaggtcacttgcttccccaatggcattgatatatcaaatgccggtgacgtgctcatcggtgattcgcacggcaatcgcttccacgtcgcctgctattcccgcgaaggcgcccttcagtccgagttcgagtgtccccatgtaaaggtgagtcgctatatggaatgttagttagcccgtaggtattaggtaaatgcatattattttgaatgcatattattttgaattttgcataattgatttggaattccacagcagtcttgatgtggtttcgaaccgtatgctgtgcgaagtaatacgctaacaatgatacatttacaggtttcccgctgctgcggactaaaaatcacatccgagggctatgtggttacgctggcaaagaataatcatcatgttctagtcctgaacaccctctatgttcactgattgcaaatcaaagcgcgcaacaatcgtccatcagtcgatatgaacaaatataactacaaatactcgtcgggcaagatatacggatgtcgacggcagcagcaatcaacaaacaccagcaatagcaacaccatctgcaacagcaacagcaacagcaacagcaacagcaacagtaatagcaatagcaatagcaacctcaacataaatatcttggcaaggagtcaacacaccgtacactgcaataacaacagtcaactggacaagataagcaggataagtagcatgagcaacatttgcctcatcgacagcaacagcaacagcaacatcaatcaacaaccattgactacaacagcgtcaatcatctaatagaaccgagaagcaagaattagaacaaactaagacattgacaccatcaacagatgcagatagcagatgcaactataccaaatgggcatatatgtatgaatcaaaatgtatatgtatatatatgagtggggaatgctaatagactaaatacgaatgattaactacgaatacgtgaaaatgaaaaggtcgagctcctatttttttttccccgtttatctgtatagtcccctatcaacgttcgaattcttaaagctgatcaaatctgcggctgcacagactcgctctatatatatggagtacagctggaggcaaatgcaatgcgttgaatgcgacttgaaacacattttgtttaatgcgaaacacgagaaacgttgccgctgcaaccgtatgaaacacataaacaaaccaataacagatgataaacaaaatgcaacaaatactatttttgatctctaatttaaaaacaattagcgctactactaaaaaaaaacaaaaacaaacatcaacaaatgtaacaaggaaaaacaaaacaaaatataaatataacaacaaaaacggtggaaaaacaagaagaatcgacatgaaaacttcgaatattttcaaaacgtttataaaaacaaaaaactctttttaaattgtttttgattatattcctttttaattgaatttttgttcttgttaaaattgtcataacacacacacacacacacacgccacactcacacaaacacgactactttacatgttacttattatctatatagacatatatattgttatatcgaccgattagcttttttgtgcatacccttccagaatctttttctaaaaaaacgaaaacaagaaaaaaaaaaaaaaaacgaaacacgcatatatatatctacacctagtatacaacatctatgtatatctagcaaaatgtgcaacttttgtgcacaggttttttgctaacaaataaggaagtaaacaatttgttgagggcgtcatcagaggtcgcgtacaggcaataattatagaagaagatgaaatctaagtagtttatttcgatttcaaactgaaaccaaaacactaagatacaatttcagaaaataacaaaaactgtttaggtttttccttacgctgcttatataaggtgatatctatttatatataaatctatatgagtatatgaaaacaaaacaaaacaaactatatatatcttaaacatatatgtgaaatcctatgactatatgactttgccatataatatacaaagcaggacgagagaagagagtagggagttaggcatatagggatagcaagggacggaggatgacggaacgaatggaggcaacacacaacacaacacaccacacgacagatatgatatccagagacccagagatctagagattcatagatccagagaatacattcgatatgtatcaactaagtgcgttcatcacgatagagatcatccgacataaactacagacaagaactcaacatacaaattaatctgtaagctaaaaaaaaaacaaaccaaacaaaacgaatgcagatcgcattaggccaacaactataataactaatacatcagatttgattgaacctacagagatgacatacgcgtatctgttaagttcttatatacattgttaaagaagcaaaacacacaaaaagaaaaaaacaaaaacaaacgatattccttttgcttataaacaaacaaaacaaaaatgcaatacacacgtgcgcatttaagcgacagatgtgcacacaaacaaacacacacacacacgtacaccacaaaacaaagcaaaaacaacacccaaaaacactcacgatttatatagacgatatatagacaaccattta

SEQ ID NO: 6503 - DNA, 5227 bp, DROSOPHILA
caaaaggagcggcgctgtcgtccaatttgcatcgccgtgttcttcgtcagtgtttgttgtcgtctcctcgttcgtccttaattttatttcgtccttgtgcaacaagaagaagcaaaagaacagccacatcaaacaggaggaggatcactgcaatacacagtttccaaatgctttaaaaatattcggcaatatctaaatatctagaaaagtaagacaagcagcgaatcagcaacaacaatcgaaaacaccaaacaaaaaccaaaaaactaagataagccgaaagccgaaggaggctcgcaaatttgtttacaaatttgcaatacattttaagtaagcggaggagaagaaggggtgtttgttgcgcatcagtgtgtgtgtgtgtgcgtgcgcgtggattgtataggtccttcgctcatttttaccccgacgaaacgaactattgttggccttttcttgcggcaatagaagggacctcaattggaatggccctcgtgggagagcggagggacattagggagcagcagaagtagcagcagcagcagcagcagcagcaggattaggatcaggaataggatcaggaataggatcagcagcaaatgcaagcaagcgcaaaggactagaaaagcaagcagcgaccagaatttaggagccaggaaatacggaattgcaatcaggaaacaggaacgggaacgggaaaagcagcccaaaaacaataaaacaaaaggaatccattgaatcgacaaaagacaagaacttgttgtatcagagcagcgccaaaagaaagttaacttgtttgtaggacaatgactactttggaggagcctgtccaggcggcggacacggtcgatccgtgtcctccggggattcccaatctgaaaaccgttctcagcgacgatgcctcgaactcatcggtgctggaggacatcgatgtgagcaatacgagcagcagtagctccagttctagcagctctagctccagctctggttcctgctcgggatcgggcaccgatacggacaccggcaagggtagcagcaatgtcggcagtctggatgtgactagctcatcgagcattggttcagagacttccatctcatcgacgggctccacagccattgcaggaccatccactttgctagacgattcgaactcatccggactgggcctggtggtggatgtggatagcaacgggagcagccaggagctgagcagccacggcgtcaccgagctggactcgctggaggactcgtgcagcggcctaatgatcaaggatggggataagctatgcaagctgtgcagcttacgcctcgtgatgccgcgcatcttgtcttgcctccacgtattctgtgaggactgcctgcaggcagtggtatcgaaggacacgatgtcggccagctcgcccaacagctgctcctcgtcgtcgttcgatggcagcgagcaccagaaccgtttgtccgctgtgttcatcgaatgccccgtgtgcaagcaggagacaccgctgggacccaagggtatcaaggcactaccctgcgactatatcgtgaccaatatactggacctctccaatttggagtccgagcacattgtgtgcacatcgtgcaagagcaaagaggaggccatttcgcgttgcaacgactgcgccaactttctttgcaatggctgcgataacgcccataagtatatgcgttgcttcgaaaatcaccatgttgtgcgcatcgaggatctgaccaagaacgtccacgacaagctgatcatccataagccagtgttctgcccacagcacgtaagcgagaatctcaagtactattgcttcacctgccaggtgcccacgtgcaatgattgcctgctgagcgatcacaagggcagcgatcatcattatgagacggccacggtggcggagcaggcggttcgagccgatctcgaggaaacactgagtgatacgctcaagaaggccgactactgcaacgatgcgggtagcaatctgggcagtgccctcactgaactccagtcacagcacgatactgtgcggcagcaaatcgaggatgcctacaagtgctacaagcgtatgctagaatcgatcaaggatcagatgcttaacgagctgggacgcttgcactcggatcgcgagctaaagatcatggatctgatgcagagcatggagaatactatgggcaagctgcagcacgctgcccagtttggccagcgggctgtcgataaggccaattccatagagtttctgctgctgaagcccatcatcagtgcccagtgcttgaatctcatggagcagacgcccaagtgcgatatcaactatcagctgcaatttgactcgaagccagagatgttcgagcaattcgccagggagatgtttggcaaatttcaaacggatcacattgactctagtcccaagaagctggggatgacccagcagctgcaacagcaacagcagcagcagcagcagttgcaacagcaacaacatcagcaccagcaccaagtgcaacaacaacagcatcatcatcagcagcagcagcagcagaaacagcaggtgcagcatcaacagcagcagcaaaagctgcagttgcagcaacaacagcagcatcaacacaactcaaacaatttgattgtcggccatcgtggcagctcctctgtccaagggcgcctgacctcagctgtatttagccccatctcgctgccctcctcgctgcagagttccttcgatggcgacaccaactcggtgatgagcaatttctccatgatggactcgccgccgcagccatcatcgcaacagcaattgccatctgcccagcagcagtctcagcagcagcagcagcaacagcagcagcaacaggcggtggtgctgcagcaggtgcaacagcagcagaagcaccagcaacaccaagtgcagcagcagcaacagcaacaggtgctgcatcagccaacatcggcccagtccatgccgcagcagttgggtcagctcgttgcaccgcagggaattgtccagcaggctggacatgtcaatctcaacgctggtcccggtccgaatatatccatcaatggactgggcgccggtggtccgccacctagttttagcatgctggagtacaacatctcacgactggccagcttgacggaaacaatgccagacaccctcaacgatgcactggctgttggtggaggagcagccggacccgttccgaatgttgtggcccaagtgcctggtggttcggccgtgactggtgcagccgtagtgggagcatcgcatgcgcatcagcagcaatcgcaggccgtaatgccggcatcggcggtcactccaacgcagccaattaccttggctgacatcctatcgggcgaccagcgggcgcttaataatctccaggcgctggccaagctgggactcaacaacaatgatttctgcatgccaccggctacatcgcccagcctgcagtccctcaatccaatcgttggtggcgtggaggacatgggactcaataacttccatgccgtggctgcgccaggcaccaccagtgtggtcaccggccggaacaaggccactccgatgcagatccgttgcaaattcggttcactgggcaccgccaagggtcagtttaattcaccacatggattttgcctgggcgtcgacgaggagatcatcgtggcggacacgaacaaccatcgcatcgaggtcttcgacaagatgggtgccctcaagttccagttcggtgtggccggcaaggaggagggccagctctggtatccgcgcaaggtggccgtgatgcataacaatggcaaatttgtggtctgcgatcgtggaaacgaacgttctcgcatgcaaatcttttccaagtgcggacactttatgcgcaagatagctattagatacattgatatcgtggctggcttggctgtcacagctaagggtcacattgtggccgtggatagcgtgtcgcccaccgtctttgtgatctccgaggagggagaattggttcgctggttcgactgcagcgactatatgcgcgagccctccgacatcgctatacgagacaacgatttttacgtgtgcgacttcaaaggccattgcgtggccgttttccaggacgacggcacattcctctatcgcattggcaacgagaaggtcacttgcttccccaatggcattgatatatcaaatgccggtgacgtgctcatcggtgattcgcacggcaatcgcttccacgtcgcctgctattcccgcgaaggcgcccttcagtccgagttcgagtgtccccatgtaaaggtttcccgctgctgcggactaaaaatcacatccgagggctatgtggttacgctggcaaagaataatcatcatgttctagtcctgaacaccctctatgttcactgattgcaaatcaaagcgcgcaacaatcgtccatcagtcgatatgaacaaatataactacaaatactcgtcgggcaagatatacggatgtcgacggcagcagcaatcaacaaacaccagcaatagcaacaccatctgcaacagcaacagcaacagcaacagcaacagcaacagtaatagcaatagcaatagcaacctcaacataaatatcttggcaaggagtcaacacaccgtacactgcaataacaacagtcaactggacaagataagcaggataagtagcatgagcaacatttgcctcatcgacagcaacagcaacagcaacatcaatcaacaaccattgactacaacagcgtcaatcatctaatagaaccgagaagcaagaattagaacaaactaagacattgacaccatcaacagatgcagatagcagatgcaactataccaaatgggcatatatgtatgaatcaaaatgtatatgtatatatatgagtggggaatgctaatagactaaatacgaatgattaactacgaatacgtgaaaatgaaaaggtcgagctcctatttttttttccccgtttatctgtatagtcccctatcaacgttcgaattcttaaagctgatcaaatctgcggctgcacagactcgctctatatatatggagtacagctggaggcaaatgcaatgcgttgaatgcgacttgaaacacattttgtttaatgcgaaacacgagaaacgttgccgctgcaaccgtatgaaacacataaacaaaccaataacagatgataaacaaaatgcaacaaatactatttttgatctctaatttaaaaacaattagcgctactactaaaaaaaaaa

SEQ ID NO: 6504 - protein, 1189 aa, DROSOPHILA
MTTLEEPVQAADTVDPCPPGIPNLKTVLSDDASNSSVLEDIDVSNTSSSSSSSSSSSSSSGSCSGSGTDTDTGKGSSNVGSLDVTSSSSIGSETSISSTGSTAIAGPSTLLDDSNSSGLGLVVDVDSNGSSQELSSHGVTELDSLEDSCSGLMIKDGDKLCKLCSLRLVMPRILSCLHVFCEDCLQAVVSKDTMSASSPNSCSSSSFDGSEHQNRLSAVFIECPVCKQETPLGPKGIKALPCDYIVTNILDLSNLESEHIVCTSCKSKEEAISRCNDCANFLCNGCDNAHKYMRCFENHHVVRIEDLTKNVHDKLIIHKPVFCPQHVSENLKYYCFTCQVPTCNDCLLSDHKGSDHHYETATVAEQAVRADLEETLSDTLKKADYCNDAGSNLGSALTELQSQHDTVRQQIEDAYKCYKRMLESIKDQMLNELGRLHSDRELKIMDLMQSMENTMGKLQHAAQFGQRAVDKANSIEFLLLKPIISAQCLNLMEQTPKCDINYQLQFDSKPEMFEQFAREMFGKFQTDHIDSSPKKLGMTQQLQQQQQQQQQLQQQQHQHQHQVQQQQHHHQQQQQQKQQVQHQQQQQKLQLQQQQQHQHNSNNLIVGHRGSSSVQGRLTSAVFSPISLPSSLQSSFDGDTNSVMSNFSMMDSPPQPSSQQQLPSAQQQSQQQQQQQQQQQAVVLQQVQQQQKHQQHQVQQQQQQQVLHQPTSAQSMPQQLGQLVAPQGIVQQAGHVNLNAGPGPNISINGLGAGGPPPSFSMLEYNISRLASLTETMPDTLNDALAVGGGAAGPVPNVVAQVPGGSAVTGAAVVGASHAHQQQSQAVMPASAVTPTQPITLADILSGDQRALNNLQALAKLGLNNNDFCMPPATSPSLQSLNPIVGGVEDMGLNNFHAVAAPGTTSVVTGRNKATPMQIRCKFGSLGTAKGQFNSPHGFCLGVDEEIIVADTNNHRIEVFDKMGALKFQFGVAGKEEGQLWYPRKVAVMHNNGKFVVCDRGNERSRMQIFSKCGHFMRKIAIRYIDIVAGLAVTAKGHIVAVDSVSPTVFVISEEGELVRWFDCSDYMREPSDIAIRDNDFYVCDFKGHCVAVFQDDGTFLYRIGNEKVTCFPNGIDISNAGDVLIGDSHGNRFHVACYSREGALQSEFECPHVKVSRCCGLKITSEGYVVTLAKNNHHVLVLNTLYVH

SEQ ID NO: 6505 - DNA, 3741 bp, DROSOPHILA
tctcgaattaattagttgtttgctttcaacttcaataagttcgattgtactcacattgctaaatataaattattctttagaatgaactagacagactgcttagcgtcattgaccggaaacttaaatcactcaatcgtacactaaacgaataaagttctggaaatgaaaacagtttccagctaaaataagaaatatactactacgtttgccattgagaataaataaaacaaaagtcaagtgctgacaactatagttcttgttcgtgctaactagcccagacgatctagccatgcccgtctcgatgtctgtctgtccgttatgtccgtatgtccgtctgtccgtttgtccgtttgtccgtttgtccgttcgttcgtgtgaaagtcgagatatccgggaaccataaaagctagaaagttgagacttgacaacaggtatttaatagaatctaatagctgccctcaagtatattactatcttgtttttgaatacacgaacaaaagcagtgttatttaataattcagctacattatacgatatcaccaaaaaaatctatgataagcgggcgaaccaatcagtgactaatccgtaaaagttatctcatagtctggccgaggcattgacatttgcgaacagttcgacgtggtaaagtcattatttcttttcaggtagggcttacctcaattagccgactcgtgttgcatgcttcagcaccatattttaatttggggttttcgctgctacggttgagcaacctaacgagtgtggcatgaggtatgcaaaacattagagcgtctgggaatagtaattattttcgctcagctatacagaggaaagtcattgactctaacaacattatgactagtcaggtggcgattcgcgtggcatgttgcaacttaagccgaatgcaatttatgaacctgcaaatctgatgggaacaacatttgcctgaatgcatctaactggtagacaattagatcttctaaactgtgaacataagtgatttatcacaggccaataagttaatatggctgtttaggttaaggttatttaataattgaacagtctaaaatgtacatcactttagctttggatcctaagctatatacatgggagcaacgaatatggaggttagatgcgttccactcgcaagtagatgcccccaacggtgcccaaaactatggacatgggactatacttcagtgggatctctgtcgtatcgcagacggataccctgaaccggctgatgatctgagccaaaccgatgcgagcctgcatttgtccaaaccgcatcccgatgcagttccgcggcccgtcgccgaagggcagccactccacggactcccgggcggccactttctccggcgagaagcgctccggatcaaaggtctccggattcggataaagatcctcgtcgcggtggtaggcgcaagcggggattatgacctgtgtgcccttctcaatcacaagcttttcatggcccggcaccacgtagtcgttgagggccttccgttcgaggtggggcaccagtgtgtagagcctcagggtttctgaagagcaatgttgggtaaaaccagttacaatccctcttggggctgtgcttcagacagaacacctacctgagatgacctggttcaagtaggtcatggctttgatggattcgtacgttagctgcccctcctgttcctccagcaccgtttggatctcgttgcgcagcctgtcctgaatgtcctgattctgagccaactcatacaggcagtaactcattgtcgaggaggaggtctcaaatccggccacataaaagacgaacacctgggcggccagttcgccgatgtccatgccctcgatcacctctccgttgtccagggtgacgcgccccttctgcttcagttcaatcagcaggttcatgaagtcgttcctcttgaagttctcccgctccctgagggcaatcgtgtcgttgaccaggcgcatgaagaactggtggacgtcctcgggcatcatgcgcattctcaacctgctggccagcttgggaaagctgaacacgaacatggtcagcagtttcccgtggcgcatatcggtgaacaccttctgtcccatggtgcggaaatcactgacaggggtgcgcagcgtgttacactcaatgccgaaggcacaggtgccaatcacatcggtggtgaacctggccatcagctccttgatctcgagcacagcgccgttctgggcggcgggcacctgctccgtgatcaccttgacgaactcctcagacaccttgatcaccgtcgggaacatgaacttcatcttgcccgaggtgaaagtcggcgtcagcctctggcgcatgtccttccacttctttccgtccaggttgaacaggtgctgcgtgagcgggtcgtcgcgcccgttgtgaaactggccacgatcggcaaagttcgagaaatccttgatcaggatgttcttggccagctgggtgtccacgatgaaggcggccggcttgtgcagaaagtaaaagcccacgaagggaaagccgctcttccggtacttgttgtagtagtcgtagaagaagtcgtgcatcacccggttcttccggaacccgaccatgttgccatacagtgggtgaggagcatcgtgtggcacgccgcggcgattccagtagttgaagttgcggtggtacaagtaggccaaaagcgaggagatcgcgatcaacaggtatattagaacaaacattttgcgtagctgctcccttttcgcaatcgtcgtgctcgacctacgacgaattactgatcaccacaatatgttcgcacactttttataagattcccctgcgacgcacaggcatgacagcatgtgagctagctagctaaatatttctatcaccatgactactacttttaagttgttgtcatgattacagactcggcgataatatgcaggcacttttcaaaccgatttaagagcactttcaaagagatactcatacgcttgactgcaaaaatgctcgcgaatcaaaatataaacaaatgataacgagattgttgttaaacaaaccggttggtgcttgggtaaaaagtgtcccatcaggttttatcactcatttataagctcggcatgtgcgaaaagtagaggtagcattaaatggtaaatacacatcgatatgcggaaaatgtatcaaatcattgtattactataaaaacgcaatgacacggtcattcaaagtagcttcaaatgtacaggacgatcccacttgtaactaaaggtaaaggtgtttaagtaatgggtatttgatagccgagcgttccatctagctttcattatcagcgacaacaccaagctcttttgctttttatgagagattcaagatttgacataagagatattctcttgatgttctactgttctattgcagtggatctacatgcaaacaaacgattacaagattgttattaaacaagctggttaaggatcataaaggtttttctcctatgcgattcaatatttattagaaaacagagcaaatataattaaatgagtttttaagccttgggaatcggagcgaacattatcgcatgaaattgttaatgacataatttcccgtagataaatacatacacggacatacacatttaaaatgtcacccatttatttcagtaattagcaccccactacaacgttaatgtttggtgttccacggcgataaaacgaatgaattcgctgggagaaccaataactctttctaagagctatttaaac

SEQ ID NO: 6506 - DNA, 1672 bp, DROSOPHILA
cgaaaagggagcagctacgcaaaatgtttgttctaatatacctgttgatcgcgatctcctcgcttttggcctacttgtaccaccgcaacttcaactactggaatcgccgcggcgtgccacacgatgctcctcacccactgtatggcaacatggtcgggttccggaagaaccgggtgatgcacgacttcttctacgactactacaacaagtaccggaagagcggctttcccttcgtgggcttttactttctgcacaagccggccgccttcatcgtggacacccagctggccaagaacatcctgatcaaggatttctcgaactttgccgatcgtggccagtttcacaacgggcgcgacgacccgctcacgcagcacctgttcaacctggacggaaagaagtggaaggacatgcgccagaggctgacgccgactttcacctcgggcaagatgaagttcatgttcccgacggtgatcaaggtgtctgaggagttcgtcaaggtgatcacggagcaggtgcccgccgcccagaacggcgctgtgctcgagatcaaggagctgatggccaggttcaccaccgatgtgattggcacctgtgccttcggcattgagtgtaacacgctgcgcacccctgtcagtgatttccgcaccatgggacagaaggtgttcaccgatatgcgccacgggaaactgctgaccatgttcgtgttcagctttcccaagctggccagcaggttgagaatgcgcatgatgcccgaggacgtccaccagttcttcatgcgcctggtcaacgacacgattgccctcagggagcgggagaacttcaagaggaacgacttcatgaacctgctgattgaactgaagcagaaggggcgcgtcaccctggacaacggagaggtgatcgagggcatggacatcggcgaactggccgcccaggtgttcgtcttttatgtggccggatttgagacctcctcctcgacaatgagttactgcctgtatgagttggctcagaatcaggacattcaggacaggctgcgcaacgagatccaaacggtgctggaggaacaggaggggcagctaacgtacgaatccatcaaagccatgacctacttgaaccaggtcatctcagaaaccctgaggctctacacactggtgccccacctcgaacggaaggccctcaacgactacgtggtgccgggccatgaaaagcttgtgattgagaagggcacacaggtcataatccccgcttgcgcctaccaccgcgacgaggatctttatccgaatccggagacctttgatccggagcgcttctcgccggagaaagtggccgcccgggagtccgtggagtggctgcccttcggcgacgggccgcggaactgcatcgggatgcggtttggacaaatgcaggctcgcatcggtttggctcagatcatcagccggttcagggtatccgtctgcgatacgacagagatcccactgaagtatagtcccatgtccatagttttgggcaccgttgggggcatctacttgcgagtggaacgcatctaacctccatattcgttgctcccatgtatatagcttaggatccaaagctaaagtgatgtacattttagactgttcaattattaaataaccttaacctaaacagccatattaacttattggcctgtgataaa

SEQ ID NO: 6507 - protein, 506 aa, DROSOPHILA
MFVLIYLLIAISSLLAYLYHRNFNYWNRRGVPHDAPHPLYGNMVGFRKNRVMHDFFYDYYNKYRKSGFPFVGFYFLHKPAAFIVDTQLAKNILIKDFSNFADRGQFHNGRDDPLTQHLFNLDGKKWKDMRQRLTPTFTSGKMKFMFPTVIKVSEEFVKVITEQVPAAQNGAVLEIKELMARFTTDVIGTCAFGIECNTLRTPVSDFRTMGQKVFTDMRHGKLLTMFVFSFPKLASRLRMRMMPEDVHQFFMRLVNDTIALRERENFKRNDFMNLLIELKQKGRVTLDNGEVIEGMDIGELAAQVFVFYVAGFETSSSTMSYCLYELAQNQDIQDRLRNEIQTVLEEQEGQLTYESIKAMTYLNQVISETLRLYTLVPHLERKALNDYVVPGHEKLVIEKGTQVIIPACAYHRDEDLYPNPETFDPERFSPEKVAARESVEWLPFGDGPRNCIGMRFGQMQARIGLAQIISRFRVSVCDTTEIPLKYSPMSIVLGTVGGIYLRVERI

SEQ ID NO: 6508 - DNA, 7576 bp, DROSOPHILA
ttttatattttcggaattcttacagacaggtcactgcaacgccattctaatcgggagttcttttgtacttcattgaattccaatgcttttaatttggtttatacgatgaaaagattcgaggttaaaaaccgaatgtaatcaatgaaaataataaaaatgtttattttgaataatcgaaaagtaaatgtgattgataatgtatttccagcccattgctatccgataatcagattaaatgtaatcatacatagtaaatacaaacacaaaagttagaaaaatatttcaacaaagcctatttgtgttttaattactctgattaacttcaagtgtgattttaaatattccaataaagaatatttgaagcatatgtttgattcaaggttttttatttaagtgttaagttctgcgacggacagtggccccgctgagagcgccaacatatggcgtacagctcaagttcgaattaagagaaaccaaaaactcttagattggtcccaaagcaaccagcgcacagtggattgaacttgcaaagttgaaagaaaaatgataagaaaacggtttcgagtaattcaaattataccgaaacccgaaaaatcgtagctaaggaagggttttctattaatttttttattttggacttggattcattttaatttttttttggcctgcaaacattctattatattttcaaaatgaatcaataatgtaacctgcgaataccaatttaatatcgaaaagctttgtagctgtgcactgtgctgctggttggcctgaatacacagagcttaccaagaagcaacagagctctgtcctgcagccgccatgacgtcattacctacaatagcatcccacgaaacaggacactgcacacgcaacagagaggctatagaagagcaacagttgacggcgctccggtttcgctcccgcgagtgagcttatccggggtgccgctcgggtatataaagtcgagggtcctggccaagagaaagcagtcgagcagacgactttgcggctaacgttagtgttacggcagctggcaaacggcaaagcttcgcgtccgtgtttccgttacggtttaaatcggtttggaagtgggtgctgcaaaagggcagttcaatttgtgaggcagtgcgagtgtggtcgatccttttgtcgcgttgcaaacgaacgaaactcacttaacagttgagccgcccccaggacgacatccacgatgcaggcggtgctccaatctgcgcacagcagcaggcggctaatgctgttgctctccatgctgctcaatgccgtaagtcctggggattatattttcaattttaaaaactgtagcgctatcaacatttttcggtctttgggtttcgtggactgtgcttctgccttctactaaatttatcttttatgtgttgacgtgtgcggtgggccgtgaattttgtcgaaattcgtttgaggactgcgtgttttctcgacgaacgaaaattgaaaacgcgatattatccttagaaatctttcatatttataaaagctaattaaagagctgacatgcttcttcttcttcttgcatttctaacccaaagtttagcatgattacatctcaccattgttcaacgaagtctccgcttttcataacttgtgctgtcagaatacgcaaacttgtctacagcttctaagctccagtggctacaaaacgaacaaattatttccatttttcaaggaccccgttcaccacgcagtaatttatattggtacagccacgcccattcaggcataactttccgcgggttgttttacttttgcaagagatacatctgcggttgcaacctcatccttctggtcagaacgagcacaacacgtttacagtgcagttattcatatggcattctcacttttccttttggtacattcaaccatctcttgcggaatagctggcattccttttgtccctcactgacatatgtatgtgacatttcttcatttttcatttccgcggaacttggcatttcccagagagccttttatgataactggctgcaggaaagccacctttaactacatacctaatcaaattgtttttctagctataacaaagaaagaactttcatgtcgagcatctctcctctgttgtcttttaccaaacacaaataaaattacataaaatattattgttgacagtttttgcacggaaaaagccacgggctatgaaaggctttgacggtcaggagcggaacttttcattttagataaagttaacagtttagttcctcaaatacttaaatatccttacgtcagtaaatccagcaacgtcagaggaaactgcaacgtcaatgacaactattgtacaacatggttcaatgtaaacttgcttatgatttcgaagttgcatcgctgcattacagacaatgaatcagcactttaatgcatatcgatgcaaacagttgacgttaaatgtatgacgacaatatgaaatgacagaaacgcgtgagtgtgccttaatctggcatcagactagatatgtgcgatttatgatatgactcgtcattgtcatatgcgcaacccaatttaacaaacaagaaaatcaataaaaataaaaattaatcttttccatggatatcgtatacgcacggaaaaaggcgaataaatattcaaatttttagtacctttcacttttttcagacatttatttacaatattgacatgggctcacttgggagttagcaaggattaaattttgtctgaaaagtttctgattggcttttgattagctgcctttgtatatttattttcgtggtcagtaattgccaaatgccctcgtaaccatgatatgtacactaaagctcttccacagagcttgcctacaaagtgatttggaaaaagttacatgtgtgtttcattgcaatgaccattattgttaattgagccatttccacgcagtggacacaaataaaactgaatggaaaccagatgtagggccaataaaatttctgtagtgtggatacaaaaaaacgcagaggtactagaacgaaaaagataataatacaatttgggatcaacattaaatatcgtttataatatcttcctatcataaaagagagtattttcaacagaaacatttttatcgtataaaatgcggaatgcagtaccttttccctacttacaaatttcccttcgtaaattacatacgcgcgtggctcctgactccttgttccagcgtttcagacactctgaattccaggcaaggtcacagcacttaagttttaatattgcgcacagtatttatttaggtaaaaaaaggcaagcaattacgccattgaaatgtggggaaaccagggagcaagactgccataataaaatttgcttgcggctgggcttaggccacataagcgcctcaacgggcatcacggaaaaaaattaaatcagagaatgttatcgagctggaggaaaagaaaacattgcccagattgtggatggctcttggccattgcagttgtgcataatctcacgcccaattaggctaggatagcaatttgagtcaatcgattggcatcgtccacttttatttgatgtgtcctgtcacctttccacttgattgactttacgattgtttcaattaggatcttgatactttttcatttctcccgtccaaatacggctttatacaaatgaaatattatatgaattgtaagaatcagaaataagctacgaacttaattcacacgcacaatgataagcgaattgctattatccgcttaatcgcctgcttaagaggaggactgacagggaggattaaactgggctgggttcatatttaatagcttgtaagccacaaatattttacatctctttctgttaaagtatgcaaaataaggaaacaaccccctaaattttaacgcaacacaggctgccataaatggattcctcggctataacagcgcacgcagcgcaaccgtccccacaatagtgtttttacttgtttgtttaggaaatgctggtgacaaaagctttttcatgcgaacgcattctttaagtcactacgcacagtttggtgttgcttaatttataattaatatttcaaaaaaatgtaagacatgaataggtggtttccattcggttttatgcttttttcaacgctccaccctaataattggttttgttttactaaaatatatagccgttttttaaaaatgttatgcatactatgttttgtagattaatagcccaaggaattttatacttctaaggccaagaactatgaataatgtttgctagctacatgctagtaagagtgaaatccaaacgaatacagttgacttaacaaacatctctaggttattaattcaagtgctaataagacagaggcttttagaggctgtcagctcctgcatgatattaacggacagaggcgccgccagccagcacgtcctgcaacacatcctgtgcgtgctttcttccgcctcacattctctagcaggcagattattaaatgcggaaaccctgtgtattggctcaccctcgcaatgccgtcgggacggaagacatccacacacgccggagctggcattgagctcacatactcatccctcccagataacgaccagccagcctagaattattctttcagttgagcaaccacttggcgaacaaactgctccgacctgtcctcgcctgtctgtgtggacgcttagaaaaatagtatgaactcagctcagccgctccagtaggttgcctctacacagccatgtatgagcctaattaatattccgcgttcggctgttttacgcatttaacttgaaaggccgataagtcaatgctttaggccgacgggtattcctcgcgctaggacttaccttggacaattctggttttggatttcatcactccgggtagccgttctttttagtaatggacttctgtaagtaggcaacaataaatgtaatacgtcacccacgtggtccaaaaagccatgcatcgtttagcttttcgaaaacgtatgagctcaaaatcccaagaaattagtgtccttcaattggaaagtccaagtgtcaacgaatttaaagaccgattaagcttacttaattgcagcaatgaagggagaggcaatgccgcattctttgacaatcgataagcgtaagagcaaactgaatgcaaaatcgattcgaaattgaaattaagactatcaggctcttttatttccctcgattttccaggctattcagccacggtccattattgtgagtgctactgatgatgtcgccaatgtgtcgccgtgcgaaatggagtcccttataaatcaactgatgagccccagtcccgagtaccagcttcacgtaagtcacctgctgcatcccgtatttattcttgatgtaaaggatttatttgagccgtcggaggtaacatctgcccaggctttgaatataaattgctttccgctgttccattccgcaaattcctccttttactcaggcctccgcattgcgcaatcaactgaaaaacttacttcgggaaagacagttggccgtgggcgaagaacagcctttgggcgagtaccccgattatctggaggaggacaaacgttcggtggccgcactggccgcccaaggcctccttaacgctccgaagagaagcttggccactctggctaaaaacgggcaactgcccacggcagagcctggagaggattacggcgacgcggactccggagaaccgagtgaacagaagcgctacatcggctccttggccagggccggcggattgatgacatatggaaagcgcaacgtgggcaccctggcccgcgacttccagctgcctattcccaacggcaagcgaaacatcgcaactatggcccgtctgcagagtgctccctccacccaccgagatccaaagcgcaatgtggccgccgtcgcacgctacaactcgcagcacggtcacatccagcgtgctggggccgagaaacgtaacctgggagctctgaagtcctcgccggtccacggagtgcagcagaagcgcgaggatgaagagatgctgttgcccgcggccgcccccgactacgccgatcccatgcagagctactggtggtaccccagctacgccgggtacgccgacctcgactggaacgattatcgccgggcagagaagcgattcctaggtgagtactcgacccgttcctgggagcgcatgaaatctcgcaggtaatccctccggaaaaggattatttttgcatacataatttaccagcacctgcacattagctagcatccatgcggcaccgccttctagcacatttttgtacatatgtttgtattattattccaaaaagacacatccaaggatcccgaattgttcggcatcgagcatggcaacgatgccactactgcagaacccgcagacgaggcgtatatggagtcggatgcggaggccgggagcgagcagttgccatcgccgcagaagcgtcacataggcgccgtttatcgctccggattcctgcccagttaccgctacctgcgcagccctgggggcagtagtggttttggcggggccggggggcgttttagtcgctcgggacgtgacgccaggcaatttgtatgagtaaatggcgatggttcgatgtgtgctgcttaattatattttgtttgttttccttgtttccttttttgtggaaattgtgattatttttcggttcaagttttaataattggcttcggagattattctccgtcgttagctgtgcctgcccctttaaagctgtagaaaatttgttgtcacgattcacaagtagcatgttagacgtcgttgatgttaaacgtactgttgtgatttgttgaatgctttgtgttattccggcgagaaaaccttctgagactttcttgtttcacttcccacttcttatccaacccactaaatgtctctacaacaataaagcgtatttccgttggcatcctaatgtaatattttccattcaagcggtcttcggaaattggatttccgagtacatttcacaacttgttttgcacaggattttacaagcggtcaatttccggcactttgtttgcgttctgttggcttctcaaacaagctggttaggttatattgaataaaatttaggtagtcttaggaagtttaataagattaattctaattattctaaattctaaattaattctaaaaacatgtacttagagcgtgtaaactcacgtcgagttcgtatttacgattcagtcgaaaagtatgcaacatacgcaggacaaggtttttacgcagtcacgaatgttttaaacatttatgtagagaaatactacaaaaccaaaaacttcaaatcatcgtggaaatcagctgttctaaacacttttatacaaattaatttaaaataaattattatctttgtttgacttagtggtgttctaacaatagttttgcattggcatgtttaagatcattggcatgatggtttttggttttttgtatctttggttcgttttgttaagttcatttcaatcttctacaacttattctgtagcgtagctgcggcgggagtttaataaatggactgcatcgtggacctagtaaattgagtgcaagactattgtta

SEQ ID NO: 6509 - DNA, 1356 bp, DROSOPHILA
acgactttgcggctaacgttagtgttacggcagctggcaaacggcaaagcttcgcgtccgtgtttccgttacggtttaaatcggtttggaagtgggtgctgcaaaagggcagttcaatttgtgaggcagtgcgagtgtggtcgatccttttgtcgcgttgcaaacgaacgaaactcacttaacagttgagccgcccccaggacgacatccacgatgcaggcggtgctccaatctgcgcacagcagcaggcggctaatgctgttgctctccatgctgctcaatgccgctattcagccacggtccattattgtgagtgctactgatgatgtcgccaatgtgtcgccgtgcgaaatggagtcccttataaatcaactgatgagccccagtcccgagtaccagcttcacgcctccgcattgcgcaatcaactgaaaaacttacttcgggaaagacagttggccgtgggcgaagaacagcctttgggcgagtaccccgattatctggaggaggacaaacgttcggtggccgcactggccgcccaaggcctccttaacgctccgaagagaagcttggccactctggctaaaaacgggcaactgcccacggcagagcctggagaggattacggcgacgcggactccggagaaccgagtgaacagaagcgctacatcggctccttggccagggccggcggattgatgacatatggaaagcgcaacgtgggcaccctggcccgcgacttccagctgcctattcccaacggcaagcgaaacatcgcaactatggcccgtctgcagagtgctccctccacccaccgagatccaaagcgcaatgtggccgccgtcgcacgctacaactcgcagcacggtcacatccagcgtgctggggccgagaaacgtaacctgggagctctgaagtcctcgccggtccacggagtgcagcagaagcgcgaggatgaagagatgctgttgcccgcggccgcccccgactacgccgatcccatgcagagctactggtggtaccccagctacgccgggtacgccgacctcgactggaacgattatcgccgggcagagaagcgattcctagacacatccaaggatcccgaattgttcggcatcgagcatggcaacgatgccactactgcagaacccgcagacgaggcgtatatggagtcggatgcggaggccgggagcgagcagttgccatcgccgcagaagcgtcacataggcgccgtttatcgctccggattcctgcccagttaccgctacctgcgcagccctgggggcagtagtggttttggcggggccggggggcgttttagtcgctcgggacgtgacgccaggcaatttgtatga

SEQ ID NO: 6510 - protein, 380 aa, DROSOPHILA
MQAVLQSAHSSRRLMLLLSMLLNAAIQPRSIIVSATDDVANVSPCEMESLINQLMSPSPEYQLHASALRNQLKNLLRERQLAVGEEQPLGEYPDYLEEDKRSVAALAAQGLLNAPKRSLATLAKNGQLPTAEPGEDYGDADSGEPSEQKRYIGSLARAGGLMTYGKRNVGTLARDFQLPIPNGKRNIATMARLQSAPSTHRDPKRNVAAVARYNSQHGHIQRAGAEKRNLGALKSSPVHGVQQKREDEEMLLPAAAPDYADPMQSYWWYPSYAGYADLDWNDYRRAEKRFLDTSKDPELFGIEHGNDATTAEPADEAYMESDAEAGSEQLPSPQKRHIGAVYRSGFLPSYRYLRSPGGSSGFGGAGGRFSRSGRDARQFV

SEQ ID NO: 6511 - DNA, 2814 bp, DROSOPHILA
ctaaaagtgatcacaaagcgaaaagaataactgttttgagcagctaattgcgaaggctaaccatcccaatcactttttgaccgatttggaaaaactaattttttggtaatttttcgcattttttgtaaggggtaacatcatcaaaatttgcgaaaaatggtcaaaaaatagaatttccatttgtggatacagtttgatagggaatttaaatacgagctcaacgagatatggaactccatatttggacaaatatttttaaagttgtggccaaaaaactgattcatttttgaacgaaatttggaaaaacagatcttggcaaatattaaataaaatttgtttatggtcatatggtcttggtcacctttctcgctgttatggaaaaatcagatgaagggagatttatattaaaagaaaactcacttgggcatcctgcatatcaggcatgttcaaggtttccggagtcgccgattgttgctgctccttgagattgccagtcacgttatcctttttggaacgcattcggaatgaacttggagtcccaatggacttcgagtcccacatagaatttttagccaaataacgtcgttgaaaggcaaaatgatggcccaaagagccatttccgaaacggcgtacgaacattactacttttagctgtaaatatatacgatatttcgaagtttctagttcgctttttctcttgtttttgggaatgtgaaagctagtgatgtaggatacaaaaatttattttgacaggaaagcgattgcgataaatatagggatggtatcaaacagttcggaatactgtatatactgtaataccgtataaacgtttgcacgttctactgtgacttgttgttgtgattgtctttcgataataatataatataaatcaaataaattgactcaacttttcacgttagaaaatatttttcaacttcgtttgcagtattcgccactttttggtatattttcgtcactacttggtattttaccctgccccaagtcaggccacactgccttggtgttatgcaaaaaacgtcatttttttgacaattcaacagattttttccctttattcgagcgtaagtcccagtttaccggccaaacagccgactgatatatactttgtaccacaggaggagtcaccatggcgacggcagtgccgcattgtcccccgaaacaggaccttccaccgccgggcggctacaagaagataccctttgcccgcgtgccaccgaagagctacttcacaggtgagctcctccaaatcccattgatctaaccatatatgtgctggtaactatatcaatccctcggcaggcttcaccaccatcggcacctatgtggttgtgacagccgttggcctgggcatctactacttgaccgccaagaaggtgaagcgcgacgagatcgagatgcgttccgcccagaatgtcatctttcccattttggtcgccgagcgggatcgcgaattcctgcgccagttgcgacgcaatcgggacgaggaggccgagctgatgaagaacgtgcccggctgggaggtgggcacctggtatggtgagcccgttttcaagaccctgcccgaggataccctggtcacgcccattttcaaggagttctacgcccactccgactggaagtcgtacgccaagcgtgcccacttgaagctctggtcctaaatcggcctagttaatggattagttaatgcctaagcacgcacctttttgtttgtagatcatccgcctaagcgccaaaaaaagaaagtatcgaccaattataatgtcagatcagattggctgaaataccgattctctttgtgtgtgtttaatccaaatcctgtgctggaccacccgaggtagccagagatttttaccaaaccgggggcgttgccgtccagctgcaatatagcccacgggcagtgctcaaaaatggccaaattagatggatttggtggcaccaacagcggggaatcccagttggctgtgtcaccaaattaaaatctaattgaaaatctgctgcttagtaaaaataataaattcacaacataaaacactacgaaatgcttatgattcaatagggattattaaaatagcaatgaagaaatcttgagccattgaaaaacattcttgatttattttatttttattttttattgaattcaacatcgatttgacgctcgttttgtgtgtcagtatttggagtttcgggttattacacaatagcgggtgatcgtgagctctaacattaagtagtcgtaattataagtaagtaatatatatctatacatgggccatgatcgacatccgtcgacatgcttttatcttcaattgtaaaccgcagagttggcctgaaatcatataaaaaaaaaaacaactgtgtgtgtggatttgtgtacaactaggtaaaagataaaccctttcctttggaatcgcttgacgacagtggcccccgttgtggctcccaaaaaatacaatatgggtgtggacttatgtttgcgtgtagataaacagcagctgctcctttctcctggcccgggcggctagtgtccgagttttgcatgggcgaatcattagaaactagctcgtgctccagctaatcctactgctcctaatctacgtactcctgcttgataacaacgtaacgcactggcggcggcgatttctgctcatcacgctccggctccagctgctgccgacgccgccagtgctcatcacgttgtggccgcctctacttcatgtcccttcgacgcttgatgctgccatcgcaggtgggcagatggcgctgtaggaagccctcgaaaacgaacttgcggcc

SEQ ID NO: 6512 - DNA, 693 bp, DROSOPHILA
aagtcaggccacactgccttggtgttatgcaaaaaacgtcatttttttgacaattcaacagattttttccctttattcgagcgaggagtcaccatggcgacggcagtgccgcattgtcccccgaaacaggaccttccaccgccgggcggctacaagaagataccctttgcccgcgtgccaccgaagagctacttcacaggcttcaccaccatcggcacctatgtggttgtgacagccgttggcctgggcatctactacttgaccgccaagaaggtgaagcgcgacgagatcgagatgcgttccgcccagaatgtcatctttcccattttggtcgccgagcgggatcgcgaattcctgcgccagttgcgacgcaatcgggacgaggaggccgagctgatgaagaacgtgcccggctgggaggtgggcacctggtatggtgagcccgttttcaagaccctgcccgaggataccctggtcacgcccattttcaaggagttctacgcccactccgactggaagtcgtacgccaagcgtgcccacttgaagctctggtcctaaatcggcctagttaatggattagttaatgcctaagcacgcacctttttgtttgtagatcatccgcctaagcgccaaaaaaagaaagtatcgaccaattataatgtcagatcagattggctgaaataccgattctct

SEQ ID NO: 6513 - protein, 154 aa, DROSOPHILA
MATAVPHCPPKQDLPPPGGYKKIPFARVPPKSYFTGFTTIGTYVVVTAVGLGIYYLTAKKVKRDEIEMRSAQNVIFPILVAERDREFLRQLRRNRDEEAELMKNVPGWEVGTWYGEPVFKTLPEDTLVTPIFKEFYAHSDWKSYAKRAHLKLWS

SEQ ID NO: 6514 - DNA, 5209 bp, DROSOPHILA
atattcgatcgattgagggcggtgcgtcgggagatcgtgatccagatgtacgatgccagtcagaagatttgcctgttagagcccattgtgatgtttctggcatatagtcgctatcgcttgtgtgaggagcccatcgagaagttcgatctcaagatatgcaatcagcatttgcaagagtgcctcacgggagtgctttgctgttacgaagaactggaggacttggaatcatctagagaacccaccgttcgtgagcttgagcggcgctgcttcatagagagcctgtatcaattgtttaatctgggttctcccgagtcctttacacgcgccctcaccttaccggactatgtgcgtcgggatgcgacgtttaagctttgttttgggatctgtttggccttccaacagggcaatttgtatagagtgctcatgggtgtgccacaattgccgcatattctgtgcgcggtagctgccgccaagttgcaggtgataaggaggtacagtataactttttctattggatctcttattgacatgatgcatttttaatgtaaatacatatgtatgtatgtatatttgcaggagtttgttgcagattttcacgcatgcctacaacaacaaacagcttacggtgccggttccttacttgttgcgtttactgttgttcgatgggccaacaggattgcaggaccaatgtcggcattataatatatccttaacagcggataggaaggcggtgcaatttaataagactgattttaaccacaatgcagaggtatttacaccccaacacgagcgctttgtggagtcgaagctgaagcgtatttatattccagaagttctattgctaaagaaatttaactagttatttatgagcaacaattgtaaatagctcgaaataatagtaaagccatggagattaatttattgttattgcgcatttgttttcttgtcgggtggcaaccctggtggcagaacaacaaacctatcgcttatcgaaagacagaacgccgcggtatttacagctaataaatggtttgccagttggaggttaataaaatgcaatttttgaatagtagttaagattacatttgtgctgttttgcgaagtaatgcgaagagaataaccaatctccgctgaataaaccgcttaagatatacacaaagcgcgcgcagggttgcattgtggcgcctgtcgctgcacactacacacacacacaccccacacacgcaacgcgagagaaagtaccgagccgtttctggaaaatacaattccgccatattaaccggcaaaattcaaaatatttacactgcccgaggtgagcgggatcgaggtggtcatccaaagcgagaattaacccgccattgggcagcaggagagtggcgggcggagcggagcgagcggtacgcatcattcgccgtctgccgccgccgtcgcacaataaacgataggcattggccacaaaaaagtggaaaaagaggtggagggaaaggccagttcagtgcagcaataccgacgaaaacacgtacgtttgtccactttggaagtctggcgaatatatagagatatatacataatacggatttttggccagatactaattgcccactttttccgcagcgcgctcgcacacacaacactaacactcacgcacgaagcaagagcgcccacaaatacaagcatacagatacaggcacacagacaggcagacggagcagccgcgatgacaagtcatcatcatcacgtcggcgtcggagggaacttccagcctcaactgcatcagatacgagcgcccatcgtgaagaatctatcgctggccgctgcggcggtaccgttgcccctgcactccgccccgtcgtcggcatacttcactcatgcacaccagcctacggcggctaccatagtcgagcaagatccgtacaccgttttggcgggcgatccgatgggcgaggaaagcgagagcttcctgatcgaggagatcatcgacgactatgatgatgaggctaatatcgtcgtagactcaggcgaattctttgagcactatgaatactatccggtggatcggctggacagacttacctcggtcacggtggctacggcagatgcactgccgccgccgatcatcatgcagcagaccagcgacgatgaggaattcatcgaggaggatggacagcagatgacatcctcctgcgatggcgatggcgatgaggatgatgaggctaccgcgccggctacgacaaatgccttcgagattgcctccgagatgctaaccaccatcgaggccacaaacatcaaggaggagcagctcgagagcgacttctatatgaaggcgaccgaggattcaaacagttcgaatggccagctgcaggattttaagctatttggaagcagtcgcgtcgagaggcccatgggaaattcagcggccaagcgctggaagcaaacaaaggtacccatacgcataacgcaggatgagttcaatgtcaccctttggtcctcgctcaactcggaggatgaggacgaggaggaggagttggaggaaccacctggttgtgctggcaccacatccgtgacgtcctcctccgccgcccagaatgaaggatcacccagcatgccaaagcttattattgacgagcacatgatcaaccacgatgttttaagcgatggcatcggcaacgagtacgtcatcctacccgatccattcagcgcctctgcggtcacggatgtggaggaggtggttaatgcatttatgggcgatgtcaaaggcgaggaggacagccagccgctaagtgaacagttgatctatgcggaaaaccagttggaagaagcttatggtaacatcgagcttatcgagaacatgccgaataatgtggagctgatacagacaccgggaccaggtccagccactgtgtcggtagcgctatcgaaggtcaacggatgtgtaccgaatccacagccggctctcccaaaactagtgctccagaacagcagcaccaatgtgcgactgaaaagtgcgggaaatcagtcaaaggtgacaaagaggcaactcacggcggcggctcaggtggcgacaccaaatcccccaccgccactagtggcttccagcaatccagcccgaccccaacgacccacaattgtaaccaaattaccgactgcagtggccaatcagacggctggtaatgccatgggagcagctggcgcggccggcgaagaggatgaggagccaaagtttcgctgcacccatcgcggctgcaacaaggagtttcgcaaccactcggccatgcgcaagcacatgcacacgcacggaccgcgcggtcatgtgtgcaacgtctgcggcaagagctttgtagagagctccaagctaaagcgccaccagctggtgcacaccggcgagaagccctttgagtgcacctttgaggggtgcggcaagcgcttctcgctggacttcaatctgcgcacccacgtacggatacacactggcgataggccctaccactgtcccattgatggctgctccaagtgcttcgcccagtcaacgaacctcaagtcccacatgctgacgcacacgaagcccaaaaggaagtggccgcgcgcaccgcaagtgagcaacaacaagacaccgctggtggccagatacgggcgactggagtttggcgaggatcctcgtctagtgtacgtagaacagaacgaggaggtggcgtcggtgctgctggatggcacgtccctaacatcctaactagtagtgcgctttaatgtgtggcaggtattggcatgagatggttaaaatattaaagctcctttggctccggaaggcattattgtacagttagttgtagccagtttttatctgtatctgtaacctgtaacgagcggagcggccggacaagattgtcacctggtgaacacatccgcccgctgcccgccctttaagtaagtagtgtaagttcattctctaacaaaataggattgcagtgcaaaaggaagttagatggtagccattaattaatttccttcacggatgaagagcagttctaagagtttagcttgtaccgtaggctaagtgagtccccccgcaaaaccaaaactgaaccgtaatccccgaagaactcagccaaactgtcaccttaaaaagccccaatttgatctgatactaatcgtgtgcgatcttcgctcgaataacaaaacgcgcactttcttttctacgaaaacaaaacaaacaaaaaaataagaaaaatacacaaaactagttttaccatattcaatacgcatacaccataggctatctatatatttttgtaatgaattataacacttagagcattgaagtacggatttagcatgttcaacgtctgttggcgctaacaataattcacaaatggaagcacatcagttaagtcggaataaacaagggaaatacctcttcaaaattaaacaaaaataaaccaggaaaacaatgcaacaacacttgcgtatatcatttatcatttctttttttaactatttcacagtgcgattgtgtaagcgttagatttattaactgactttaaacttgtaactactgctagataactacattaaacggtgaggcagctattgatggacagtcgccgggtgttgtccacttcagattcggatcagcaagcgattagatcgcctctttggacatgtgtcgcctacagctacgttccattcattgattgcggtgtataaacgcgtgcggattagataaagcatcgcggcgaggtacagatacgcggctattttggatattggaacggagaacagtacacacgattggtctgggcatggtctgatcggtattttaggtgaccttgagcccatgtccttgaactccgggaataatatccgcgatggaggcacttgttgggccaatcaatccggccagcgagagcagcacggagtagttgaagtaccagaaaacgcagaagagtaccatgaaaatgacgtctgcaatgaaccgagagcaataataaccctgataagcgtataaattctccagaagcatgacgaatccgtcggatattcccaactagttcgagggtgtgctattttattaacagcaattaacactcacgtatcgttatccgctcccacttttcaaccatgtacagctcggtgacctgcaagttaatggggttcatttaaatcaaaatcccgtggagcgcagcttctcaggtggaatatgtgcgtaatttta

SEQ ID NO: 6515 - DNA, 3048 bp, DROSOPHILA
aacgccgcggtatttacagctaataaatggtttgccagttggaggttaataaaatgcaatttttgaatagtagttaagattacatttgtgctgttttgcgaagtaatgcgaagagaataaccaatctccgctgaataaaccgcttaagatatacacaaagcgcgcgcagggttgcattgtggcgcctgtcgctgcacactacacacacacacaccccacacacgcaacgcgagagaaagtaccgagccgtttctggaaaatacaattccgccatattaaccggcaaaattcaaaatatttacactgcccgaggtgagcgggatcgaggtggtcatccaaagcgagaattaacccgccattgggcagcaggagagtggcgggcggagcggagcgagcggtacgcatcattcgccgtctgccgccgccgtcgcacaataaacgataggcattggccacaaaaaagtggaaaaagaggtggagggaaaggccagttcagtgcagcaataccgacgaaaacaccgcgctcgcacacacaacactaacactcacgcacgaagcaagagcgcccacaaatacaagcatacagatacaggcacacagacaggcagacggagcagccgcgatgacaagtcatcatcatcacgtcggcgtcggagggaacttccagcctcaactgcatcagatacgagcgcccatcgtgaagaatctatcgctggccgctgcggcggtaccgttgcccctgcactccgccccgtcgtcggcatacttcactcatgcacaccagcctacggcggctaccatagtcgagcaagatccgtacaccgttttggcgggcgatccgatgggcgaggaaagcgagagcttcctgatcgaggagatcatcgacgactatgatgatgaggctaatatcgtcgtagactcaggcgaattctttgagcactatgaatactatccggtggatcggctggacagacttacctcggtcacggtggctacggcagatgcactgccgccgccgatcatcatgcagcagaccagcgacgatgaggaattcatcgaggaggatggacagcagatgacatcctcctgcgatggcgatggcgatgaggatgatgaggctaccgcgccggctacgacaaatgccttcgagattgcctccgagatgctaaccaccatcgaggccacaaacatcaaggaggagcagctcgagagcgacttctatatgaaggcgaccgaggattcaaacagttcgaatggccagctgcaggattttaagctatttggaagcagtcgcgtcgagaggcccatgggaaattcagcggccaagcgctggaagcaaacaaaggtacccatacgcataacgcaggatgagttcaatgtcaccctttggtcctcgctcaactcggaggatgaggacgaggaggaggagttggaggaaccacctggttgtgctggcaccacatccgtgacgtcctcctccgccgcccagaatgaaggatcacccagcatgccaaagcttattattgacgagcacatgatcaaccacgatgttttaagcgatggcatcggcaacgagtacgtcatcctacccgatccattcagcgcctctgcggtcacggatgtggaggaggtggttaatgcatttatgggcgatgtcaaaggcgaggaggacagccagccgctaagtgaacagttgatctatgcggaaaaccagttggaagaagcttatggtaacatcgagcttatcgagaacatgccgaataatgtggagctgatacagacaccgggaccaggtccagccactgtgtcggtagcgctatcgaaggtcaacggatgtgtaccgaatccacagccggctctcccaaaactagtgctccagaacagcagcaccaatgtgcgactgaaaagtgcgggaaatcagtcaaaggtgacaaagaggcaactcacggcggcggctcaggtggcgacaccaaatcccccaccgccactagtggcttccagcaatccagcccgaccccaacgacccacaattgtaaccaaattaccgactgcagtggccaatcagacggctggtaatgccatgggagcagctggcgcggccggcgaagaggatgaggagccaaagtttcgctgcacccatcgcggctgcaacaaggagtttcgcaaccactcggccatgcgcaagcacatgcacacgcacggaccgcgcggtcatgtgtgcaacgtctgcggcaagagctttgtagagagctccaagctaaagcgccaccagctggtgcacaccggcgagaagccctttgagtgcacctttgaggggccctaccactgtcccattgatggctgctccaagtgcttcgcccagtcaacgaacctcaagtcccacatgctgacgcacacgaagcccaaaaggaagtggccgcgcgcaccgcaagtgagcaacaacaagacaccgctggtggccagatacgggcgactggagtttggcgaggatcctcgtctagtgtacgtagaacagaacgaggaggtggcgtcggtgctgctggatggcacgtccctaacatcctaactagtagtgcgctttaatgtgtggcaggtattggcatgagatggttaaaatattaaagctcctttggctccggaaggcattattgtacagttagttgtagccagtttttatctgtatctgtaacctgtaacgagcggagcggccggacaagattgtcacctggtgaacacatccgcccgctgcccgccctttaagtaagtagtgtaagttcattctctaacaaaataggattgcagtgcaaaaggaagttagatggtagccattaattaatttccttcacggatgaagagcagttctaagagtttagcttgtaccgtaggctaagtgagtccccccgcaaaaccaaaactgaaccgtaatccccgaagaactcagccaaactgtcaccttaaaaagccccaatttgatctgatactaatcgtgtgcgatcttcgctcgaataacaaaacgcgcactttcttttctacgaaaacaaaacaaac

SEQ ID NO: 6516 - protein, 647 aa, DROSOPHILA
MTSHHHHVGVGGNFQPQLHQIRAPIVKNLSLAAAAVPLPLHSAPSSAYFTHAHQPTAATIVEQDPYTVLAGDPMGEESESFLIEEIIDDYDDEANIVVDSGEFFEHYEYYPVDRLDRLTSVTVATADALPPPIIMQQTSDDEEFIEEDGQQMTSSCDGDGDEDDEATAPATTNAFEIASEMLTTIEATNIKEEQLESDFYMKATEDSNSSNGQLQDFKLFGSSRVERPMGNSAAKRWKQTKVPIRITQDEFNVTLWSSLNSEDEDEEEELEEPPGCAGTTSVTSSSAAQNEGSPSMPKLIIDEHMINHDVLSDGIGNEYVILPDPFSASAVTDVEEVVNAFMGDVKGEEDSQPLSEQLIYAENQLEEAYGNIELIENMPNNVELIQTPGPGPATVSVALSKVNGCVPNPQPALPKLVLQNSSTNVRLKSAGNQSKVTKRQLTAAAQVATPNPPPPLVASSNPARPQRPTIVTKLPTAVANQTAGNAMGAAGAAGEEDEEPKFRCTHRGCNKEFRNHSAMRKHMHTHGPRGHVCNVCGKSFVESSKLKRHQLVHTGEKPFECTFEGPYHCPIDGCSKCFAQSTNLKSHMLTHTKPKRKWPRAPQVSNNKTPLVARYGRLEFGEDPRLVYVEQNEEVASVLLDGTSLTS

SEQ ID NO: 6517 - DNA, 4393 bp, DROSOPHILA
aacagatgctgagcattgcctcccatcgggatggtgctgtgttgtcaatgtaggctcttgcgctcactactcacaagttgtctgaacaatgaatccgcatcgttgaacacaaagcaggcaccaagaaaattctgtatgtggcttctcatgtattatttaaattttgacccagcccactttaactcctggcactcgaaagttacttggccccgacgaggggagtgtcatccctcgtcgagtttgtcttctgaaacatatcacaataacacatcatttgtcaaggcaacaaatgatgttgcatgtaaccttatcatctcatatccgttgcagacggttacgttacggtttgccatgaaagggtcagtgtgggtgagcagctgaaagccggacacctagaggcaaatggtctgggttcgttataaaagccacctctgttgaaaacaacagcacattaccacggtgaactagacgaagacaagctgtattcatgctgccgtaaatgtgtattgcactcgtactaacatgaccgtgtcctgagcacaatgcttgctaatgaataaacatggcgaccagtcacttccactgcagcaaccttctcttcctttgctcctcttcgcccataaatgaaattacaaagttacgtatacgccgtgtgtccgcacgaaagttgcgcaagcaagcgactaatttattgggaatcctttccatagggaccacgtgcagacgtatagcatgttactcctcaaattgacagctcggtgctggggagttgtttgttgcagatcctcctactagactaataacaacagcgtacttgttcgccgtttaaatttttaatgtttatttgtgaagattttcagaaaggcgatcatgtgaactgtgaatgtgaatgtctggctcagtaaataaaaagcagtttgatggttttgataatgaaaatcgaatttcccttctggagattgcccaaaataacaatattttaaattatttgtgtgctttcatttttagatcccacctcttttgggcacaaactggattgacaaaagtcagagtccaatcactacgaagtacaatcagcacgatgacatcaaatagttgtttaatcagtctaggccttctcctggtccttattcaaattctagctccagcaaaggctgcggagcactcagtgttcacccacaaaaacgcatcatcggtcttgggtcaattggttacctcgagtaccctagtatgggaaagctatgaccccaaggatgctacacagttgcagttcgccgtggagggcggaaagtacgttactgaggatgagcattaccccatgtacgtatgtcgtgtaccaatcgatggtatccaagtgtccggccataccgagaaaatccttcagagacacgtctgccttgcggcccactataagcacggaaaatacgacaacttcgatgtccttatgaacaagggtcacctggggaaggttggctggcgtcattggcgtaagttcgatgctggtgttcccgtcggtgccatacgcattggagatgactcttacattggtcgccatcgggccccaagtcaaccgaacaaggacggggtcgtcacccattggggagcagacttcaatctgggccacttggagccggtgggtctgggaaaaattagggtcatcgaagccgaacgtgagaagtactacgacgacggcgaggttttagtcgaaacagagcccttccgatacgagctcagggacatcaaactggatcgattgcgcactgatattcaagagaatatgactgaactgggtaagtctgatcaaatataatttgttagctttttaataacgtcaaccgatttcgtagttactaggaagcttgaaaatctggaagataaatatagtacctgtggagactattctaagctatacctttaactataatcaatattggggatcccacgagggtgttgctcgtggtttaccaacaaaaatatttgaaaaagatgaagccgttccggctgaaattaattgggccttaaaacacaccgaaaagcgatcggaaaacaaggcagtgcacacgaaactttggcctggtacagcaattaatgttacgctacgtggcaattatgtgaccctggaggcgccgtacagtggcaagctctttgctttttattacggaagcgatgaaagtgtttcccgaaagatcagcgcagaggcaagtgttttaagttttatgtaaagccatgttctaatgaatttcaatctacaggtgcgaaagagctacttgaaggaggtgaagctggagttcagccccgtctactggattgagaacggtactctggtacccacaacgaccaccacaacgaccacatccacatcgaccacgacacatgccaccacaaccagcaccaacgagccgacgcccataaatgagcccccgctggtccatatgaaggacaacggtgtgcagcattcaggtcccgatacgctggagaagaccttgcatgactccccgtccagcaacgaattaaattcgcacgaggctccagagaacatgtcctccgacccgggaaaggatgtggcgctggcagggttcggagtcaacgcagcggggtcaacatttattgcggggtcggctttattaactctacttttaacaatttttttgagtctgtagatgaaattgagctgtggactcagtatagagtttaattgttgttgttgtacctgttgtacccgtctttgagagcgtcagagaaacgtaataagcagatagacattgtatgaatatataaactccaagaaccgggagcgaaaagcgaaaagcgaaaagcaaaagtcgatattttttatacttgtcccaaggcttcttctttaacacgcatgcaagcgaaagcgaatttaaatgatcattaaaataaacgtaatacattcctaaacagaacctcttacaatcggaaataaatcaaaagtataattaaaaataaatttattcatatttttatgtagaaatattttacaagttttttttatttgcaaggatttaaatggcttttcatttttgtagttagtaagcagcattaacagcaagtagaaaaaatattaaacttgaattgacatttgcttagggatggtattatagatcacgctctctaaaatgatgtatgtatagtatacctgtatgtcaaatatgtaaacctatgtataacataagtacgagtatgtatgctattttttaggccaaacactcaaaatatgtaaaatagatatttttatttgagccctttgatttaaagtatgatttgcgtttatttaaggctaatctctatcataattaatttgattttaattaaaacttcattaaagaaacaatgaatatatataaataaaaggcttgtaaatgaaaatcgaaacaatattggttttcttttgcttttaaaattttttttttataaaaaactacgctgaataagtgctgtcaattcaaaacagttaatgataagtttgttacattctaacgaccaatttatacatctttataatcaagccagtagctcaatcgggctcgagacaatactttattaaagtctctttaagctcataaaatattcagcgcacaataccactatcatcaatacattcgaattcgctctttgagtcacacctgcgcctaccttttcagcgcaatgtcattgaaatgatagttgacacgtggaaaataagcgagtgggaggaggaatcaaacatataaacatataaattaaattaactaaaatggggcaggggccatcggtctgtttccaatagatgtaagctatctattcgcatatggatatggaatgctgtctgctgggcttttgttaacaatgcaatttgtgctgaactgctttgatagtcttaaatctgctcagcttccttcgctccttcctagctgttggaatctagttctcaaaataaggttgatagcaacctggcaaaaaatggtttcgcattagaaacccatgtattgtcaggcgagcgatatttttaaagcgtgaccacatgatggctatgaaacgggttttgatgtggatgacaaggcaattgaactgtatcattattgcttagaggacgcctgttcaactcagtattctatgattgtaagagtacctatttatttgtgcttttgcagtgtagacaaagtcattgtgctattacccaatgatttaccaactgaaatgtggggagtttcagtccgcttgaacccagaactagggatgccggcatgttaaccaactcatcctcgactgttgctctgttgctctggtctgctgaccaaatttgatatgcatggattggttgaagcaaaagccgacagtaccgctggctccaacctcctatgttgcagtgcgctgacaggtttccctgcca

SEQ ID NO: 6518 - DNA, 2286 bp, DROSOPHILA
atttttagatcccacctcttttgggcacaaactggattgacaaaagtcagagtccaatcactacgaagtacaatcagcacgatgacatcaaatagttgtttaatcagtctaggccttctcctggtccttattcaaattctagctccagcaaaggctgcggagcactcagtgttcacccacaaaaacgcatcatcggtcttgggtcaattggttacctcgagtaccctagtatgggaaagctatgaccccaaggatgctacacagttgcagttcgccgtggagggcggaaagtacgttactgaggatgagcattaccccatgtacgtatgtcgtgtaccaatcgatggtatccaagtgtccggccataccgagaaaatccttcagagacacgtctgccttgcggcccactataagcacggaaaatacgacaacttcgatgtccttatgaacaagggtcacctggggaaggttggctggcgtcattggcgtaagttcgatgctggtgttcccgtcggtgccatacgcattggagatgactcttacattggtcgccatcgggccccaagtcaaccgaacaaggacggggtcgtcacccattggggagcagacttcaatctgggccacttggagccggtgggtctgggaaaaattagggtcatcgaagccgaacgtgagaagtactacgacgacggcgaggttttagtcgaaacagagcccttccgatacgagctcagggacatcaaactggatcgattgcgcactgatattcaagagaatatgactgaactggttactaggaagcttgaaaatctggaagataaatatagtacctgtggagactattctaagctatacctttaactataatcaatattggggatcccacgagggtgttgctcgtggtttaccaacaaaaatatttgaaaaagatgaagccgttccggctgaaattaattgggccttaaaacacaccgaaaagcgatcggaaaacaaggcagtgcacacgaaactttggcctggtacagcaattaatgttacgctacgtggcaattatgtgaccctggaggcgccgtacagtggcaagctctttgctttttattacggaagcgatgaaagtgtttcccgaaagatcagcgcagaggcaagtgcgaaagagctacttgaaggaggtgaagctggagttcagccccgtctactggattgagaacggtactctggtacccacaacgaccaccacaacgaccacatccacatcgaccacgacacatgccaccacaaccagcaccaacgagccgacgcccataaatgagcccccgctggtccatatgaaggacaacggtgtgcagcattcaggtcccgatacgctggagaagaccttgcatgactccccgtccagcaacgaattaaattcgcacgaggctccagagaacatgtcctccgacccgggaaaggatgtggcgctggcagggttcggagtcaacgcagcggggtcaacatttattgcggggtcggctttattaactctacttttaacaatttttttgagtctgtagatgaaattgagctgtggactcagtatagagtttaattgttgttgttgtacctgttgtacccgtctttgagagcgtcagagaaacgtaataagcagatagacattgtatgaatatataaactccaagaaccgggagcgaaaagcgaaaagcgaaaagcaaaagtcgatattttttatacttgtcccaaggcttcttctttaacacgcatgcaagcgaaagcgaatttaaatgatcattaaaataaacgtaatacattcctaaacagaacctcttacaatcggaaataaatcaaaagtataattaaaaataaatttattcatatttttatgtagaaatattttacaagttttttttatttgcaaggatttaaatggcttttcatttttgtagttagtaagcagcattaacagcaagtagaaaaaatattaaacttgaattgacatttgcttagggatggtattatagatcacgctctctaaaatgatgtatgtatagtatacctgtatgtcaaatatgtaaacctatgtataacataagtacgagtatgtatgctattttttaggccaaacactcaaaatatgtaaaatagatatttttatttgagccctttgatttaaagtatgatttgcgtttatttaaggctaatctctatcataattaatttgattttaattaaaacttcattaaagaaacaatgaatatatataaataaaaggcttgtaaatgaaaatcg

SEQ ID NO: 6519 - protein, 259 aa, DROSOPHILA
MTSNSCLISLGLLLVLIQILAPAKAAEHSVFTHKNASSVLGQLVTSSTLVWESYDPKDATQLQFAVEGGKYVTEDEHYPMYVCRVPIDGIQVSGHTEKILQRHVCLAAHYKHGKYDNFDVLMNKGHLGKVGWRHWRKFDAGVPVGAIRIGDDSYIGRHRAPSQPNKDGVVTHWGADFNLGHLEPVGLGKIRVIEAEREKYYDDGEVLVETEPFRYELRDIKLDRLRTDIQENMTELVTRKLENLEDKYSTCGDYSKLYL

SEQ ID NO: 6520 - DNA, 2363 bp, DROSOPHILA
tactatgttataatttatttaagcctaaagtatccgacacttgttattacagtttgtaaagggaacaagacgcgaaaataaataattgtgtatccaccagccgggcgacattgtgatgggcaatcagggcactcccattcatttagggggctgtgggtgaggtctcgtcgttcatctgaatgtcgtcggcggagtaaaagtcctgggttaccgggatgacgcggtcgttggtctcgtcatcctcctcatcgtgactgtccgtgtcctcgctgtcgtcgttggctgcacaagggcaattggacgtaaaaacgataatggtaatccgaatgcagtgtcctgccgtactcaccatcctcgtcgtcggtctcaattccgggtatggtgagcattttgcccagcggctgcagatctgtgccggccgtcttaagggactctcgctgtacggtttaagtttataacaatttatacagaaagcggtgtctggagagaactcacccagttgctcctttcatcctcataacgccgcgtctgcgattcttcgtttacggaggcaggagccatgtccaaccagtagcgattggccacggagactttgagcgtgggaaagaatggaatcattgacattttcgacggaatcttgaatgcgctgttttcaatatttgttgttctttctctggaagcctttgatgcgatctggcaacgccgcaacatacgctgtaaataataccaattttacaggggcgtagtcgtaggggcgcattaaacgcaaattacaatattaattgtaattgtaattcatcaatctaactatgtattttgttattgtcaagggaagtccgataaccaagggcttaatacagcttactcaaaaatatatatcttcactattacaaattgaccttaagaatcagaacataaccaaaacgaataatatatattattcaaaatctttttatttattaaagaagctataaaaattggacaaactagacacaggaacggtattcccttgcagttttattggtagtaaagttccagattcatgccatcgtgaatttcatctaagaaagcgaaaaagaaatgcgggtaaagcaaggcgttacaaggacactaaacaagggcttacagtcagataggcgaatcgggtccttgaagattgtgtaccacttcttcaggacaatcttctcgtgctttgtgcccgtttgtgccgcgattagtttcttgaggtccccaatcgtgtcgtccgggttgcacttgacgcgcacctgtgggttaatcgttggttaacgatgcttgcagttgccttgggtacttagctgcttaccttcttgccaagacgatcgttacacgttatttctatcatattttatggctttgctagacaaatcacaacaataaattcttgatttgttgtggtattattgcttagggttgtcaaataccctttaccgaataccgagtggtttgagggatcgctaattgtccgcaatgctatcgatattttatttaattttaaatatgtttaaataacaatcatatagaaagtcgaagttaaagatatcagaagtctgaaagtatacttagaaagctcaattgcttgtcatgacgcaaatctatcacatccttgtaaaacgataatatttgttaacaaatttatatttaaatttcagtcttcttcttagttatcaagccagaagtcgaatgtttcggcgttaatagaaaaataatgtatgtttgcatatttgcacacctcattcaaattatttttctttgttgaacaaaagataaaagtgtaaaaattaaattttttattcttgacccattatttctcttggttaatgaaaacaaattccgtttctcaacgttccctttaataatccatgtgaacaatcgataggcggcgaaacatcgatgattgctagaataatcgatgtgtcttccccgttcattcgaattttttcgccgctcggaatagacgtgattttgccgtcgtgacggtggaggctatttttaaaacggtcgcggcgcttgcaaacaaaattcatatccagctattcaacggaggaattcattagtacggcagtacaagaaatattactaagtatgtcacatatttgcgggcaaactgccgaaagcactgtgcggagtttttgtttgtgtgcgtgcgtgcctcatttttacattcacgtacatacatatgtacatatatgtacgctatgacgcagctgtggaaaacttgtttgggtttccatttcaccgaatcacggaatcaacgaatatttgcgcctgtgctgcgaactcattttgggcagtaagccattgtattgattatcgcgcgttgtttgtggatggcgtggtccgcc

SEQ ID NO: 6521 - DNA, 239 bp, DROSOPHILA
atgatagaaataacgtgtaacgatcgtcttggcaagaaggtgcgcgtcaagtgcaacccggacgacacgattggggacctcaagaaactaatcgcggcacaaacgggcacaaagcacgagaagattgtcctgaagaagtggtacacaatcttcaaggacccgattcgcctatctgactatgaaattcacgatggcatgaatctggaactttactaccaataaaactgcaagggaatacc

SEQ ID NO: 6522 - protein, 73 aa, DROSOPHILA
MIEITCNDRLGKKVRVKCNPDDTIGDLKKLIAAQTGTKHEKIVLKKWYTIFKDPIRLSDYEIHDGMNLELYYQ

SEQ ID NO: 6523 - DNA, 2708 bp, DROSOPHILA
cgcggcgaggtacagatacgcggctattttggatattggaacggagaacagtacacacgattggtctgggcatggtctgatcggtattttaggtgaccttgagcccatgtccttgaactccgggaataatatccgcgatggaggcacttgttgggccaatcaatccggccagcgagagcagcacggagtagttgaagtaccagaaaacgcagaagagtaccatgaaaatgacgtctgcaatgaaccgagagcaataataaccctgataagcgtataaattctccagaagcatgacgaatccgtcggatattcccaactagttcgagggtgtgctattttattaacagcaattaacactcacgtatcgttatccgctcccacttttcaaccatgtacagctcggtgacctgcaagttaatggggttcatttaaatcaaaatcccgtggagcgcagcttctcaggtggaatatgtgcgtaattttatgaccattacataccatgaggtatcgaaaccaccagtaactggcgaattccacgaggttgtcaagcattgcgggtgccgaatcgagtaaaacactaaaaagaggacaaacaataggggtgcagcgcgtttaatttgtttagttcctcctactggctgtgtactaacttaaacacggttaatcgatatcgctgtcatatcgataatttggaccgcctagtgctgcaaaatgcgtgtttaataaaataaaatattagaatgctaatagaagggttgtatatcgactgttaaagttaattagaacttaaatatttgagctctcggaaatatttgaagatgtatttatttatttaattttactgaaaagagtacatatacgtacacttaaacgttcgccataagcactctatcaaaattacatacatttaatcaatctgacaactcagttgtaaacagctgttttaaaaaccccgcaacagttgtttacatttagttgtgaaactaaaatattgccgaacatgtccacctttgtggttaaattacttcaacgctctcagctctcacatagtcaaatagacgtaaagccgtttatttatgtccgaagcaaatggatggacgacgacgtggagtttgacatcctgaccacttctgacaatcaaaactaccggtcaattgtaaaatacgatgagtttcgaagtggagccagtgaattggaacaggcctacgatgctttctttgcggagtgcaaaagtgccgtaactacgcacatgggactccaaggatttgattatgaaatatccatggaagatgtcgaaaaaccagcgttcaaagtgtacaaatgcgaaggatacgaaacgctgtacttggatgttccgcttagaaaagtctccaactgctaccagatgctggatgcagccatcgaagctggtcagcagaagccacaagcagctccagccaccgaatccgacgcccagacaaccgcatccctggctgaatatgaaaagtatgtgagggacagcaagctgaaggaggaggaacttctcaagaaattcctgctgcttttgaacagcaaaaaggcccacatccgggatttagagagtcagttggaaaaacgatccgggaaagtatcaagagcaaagaataatcaaaggattttttctgatgacgaggacgatgcctacggagcagctactcaagtcatgaatatagataacgactcagattaagccccttagtaatataaatatttaaacaaagacgaaatcggtatgtgcttgaaatgtatttccattttgttttagtttttcttttcgattttgtaaaataaattagctttataatgtatgtataaataaacaacaaatagacttgtaacgtaatacattaaattaccatcaatgtgtagacgtggcttacaattagaccaacaaaagatcgcttgtttttttggaatataatcaatagttatcgttgctgtttttgtaaaaaataaaagcattttacataaagtgttactatgtatctgctatcaaatagacgttacggataagtatgttagggtgtgtataacatttgaaagagtaaacaattagagccgatgatggtgctggcggagatcactcagagcgcgagcagatcctcttcggcgcccggtttctttggtgtctttcgtaagctatcggctcctgccgatcctgtcgtggcactggcggcggagttcgatgcactgatcgttggaagattctcggcggcagcggctctctcctctaggaatttgtcaaactccgagctggtcagctcctcaattccctcgatgtgctgtgtggtggaaacaaatgactcattagtcatattaagtactcgaaaatggatgacagaagctaagaagcaaaggaatagtatgtaaatcgagaaactgaagccgagtgcatggtaagatgagcttagaaaaagacaaaatgctattcgaatggctacttactgagctgcccaaccacgcctccatctcgtcgatctcattctctttcgtcgactgtgtgtgggcgccaaccgaacaacaaaacgaaacgaaaaccaaacgcaatttgcatagaacaaaaaagaaccaaaacatattttcaaatttagacacatagtgtaaatcaatggcgaaaacgaggtcaaaaggtaagggaacaaatcgaacgccattagttagaccggctgtccggcggctagttactcact

SEQ ID NO: 6524 - DNA, 708 bp, DROSOPHILA
atgtccacctttgtggttaaattacttcaacgctctcagctctcacatagtcaaatagacgtaaagccgtttatttatgtccgaagcaaatggatggacgacgacgtggagtttgacatcctgaccacttctgacaatcaaaactaccggtcaattgtaaaatacgatgagtttcgaagtggagccagtgaattggaacaggcctacgatgctttctttgcggagtgcaaaagtgccgtaactacgcacatgggactccaaggatttgattatgaaatatccatggaagatgtcgaaaaaccagcgttcaaagtgtacaaatgcgaaggatacgaaacgctgtacttggatgttccgcttagaaaagtctccaactgctaccagatgctggatgcagccatcgaagctggtcagcagaagccacaagcagctccagccaccgaatccgacgcccagacaaccgcatccctggctgaatatgaaaagtatgtgagggacagcaagctgaaggaggaggaacttctcaagaaattcctgctgcttttgaacagcaaaaaggcccacatccgggatttagagagtcagttggaaaaacgatccgggaaagtatcaagagcaaagaataatcaaaggattttttctgatgacgaggacgatgcctacggagcagctactcaagtcatgaatatagataacgactcagattaa

SEQ ID NO: 6525 - protein, 235 aa, DROSOPHILA
MSTFVVKLLQRSQLSHSQIDVKPFIYVRSKWMDDDVEFDILTTSDNQNYRSIVKYDEFRSGASELEQAYDAFFAECKSAVTTHMGLQGFDYEISMEDVEKPAFKVYKCEGYETLYLDVPLRKVSNCYQMLDAAIEAGQQKPQAAPATESDAQTTASLAEYEKYVRDSKLKEEELLKKFLLLLNSKKAHIRDLESQLEKRSGKVSRAKNNQRIFSDDEDDAYGAATQVMNIDNDSD

SEQ ID NO: 6526 - DNA, 2670 bp, DROSOPHILA
aaatccattaatgtatacagcagtagcaatcgtaaagaatttatagatgtaccaaacagaagtatatagtatatacaaacatatacgagtatctactctatatctaaatctaatatctaaacctatacctgtgcgtagcgagttcggtgggatcagtttgattacttagattatttcccgactgagaggaaaccgtgtagagttttcagtgtatttatcaacggagagccccaagtgaaacgagtaacttatacaaatataggaaactaaatctaaacgaaaaaaactgaacaatgacaaataatgaacaacgtgtgtaacgtgtgtattttaattttgatattaaaagcaaacaacgttctcctcatttgcatgcatgttattgtttcgcgcttctttggaaattaagccatacgtaatctatgaatcgaaaattgacgttaggagcaatgtatggacattgtttaaacaaacacaaagttggcaaggaaagacaccatatcgagtagctataacattttaaggaataatccccactgtatttaatataaacttagaatttcaaaaattgcggagattaccgaaaatctatttgttttggtttctggcgacaaagacagcatttatttcaaagcaagtttaggcgtgataaacattgatttattcgaaaggggttaaagcggaatatataatacttgaaaagtagaaaacaatttcgattttaaggcaaatcaaaatacattcgagcgagttttttataaccgagctcgaacaaaactatactcgtatgggcatgtgaaccatggaatcaaaatgcaaaatatacgtacatgcgaatataccgatgcagacaaacgtaaatatttattattgatgttgcacaagagagcgtatggtaaattcgaagaaaaatagaaaaattcatcttgaacgagcatattaaaaatgtatacaaatatgcgtatttatgtatgtgtaaaataaatgtaactacaactctctactaatctgcaactcgcacacagatacagatgcaccggcatccctgtgtttaaatggaatttgtgtttgaaatcaaattgaaatcaaatcgacatgaataaaccgaaacccaactaaggcatttcgaaacatggctctatttcatttcagtgtttgtaatcctatttgcaaaaggtaagactgcgagttaattaatgccgtgcatcattgtccataatgcgggcgaattggtccaccggcatacataaatcatgtagcccaaggttggtgcaacattagatacatatattcctcttatgatggctcatacatgggtgctatttactaaagtatcactttactctttccatcctgctagtcgtcttcgctgccggactcgaagcctgaatcctcttcgagttcggctagaatgaaggcttctatggccatctgcagggcaaggacgtctccttcgccaggatcgggtccttgcagcatggccgtcggtggacccgcgtagtgggagaaggcttcgcgctgcctgcccaaggaccgcaccgcgagctggttgtcccctcctccgtccatcttagtgggtccggtgcagggctattggtacccgatcggagctggaagtcggctggaaacaaatgatggcgcttgggcgctgggcttgtgttttttggaattttgagtatatgcttttcgatcggcattcaaaacgtgtttgaatatccctggccgatgtgacaggcctcgcaaaagcagtgcgaatgcggaaattgcctgcggcagattggctgtttaatattgttaaataaagcgcttcgggacgagttattagttttccaaagccgtttgtgtttgtgtgcgcagcgcaatcatcgcagtgacagccgaccgcagggcactttcaagctgtgtgtgcgtgtgtgtgtgtgtaaccggaagcggaagtcgcgtcccgttccgttcggcgccgctccctttcgcatgccgcctacgcacgcattacgtacccgccccgttgcctgaccgcataaagccatttggccattttggcaacaagccctagcccacagcacccgctgacacaaagtagtcagccgcacaatactttgctgtcaatttgtgataacggcagctttatttgaaaatatgtgcgactttatttcccggctgtgccgagccgattttgcggccacactggctgacagctgctagatggtttgtcggttggccagcagtggatagtggggtggtgggcagtgggctgctgatagaacgtgtgaaattgaatatttacaagagccctttcaggtggaagtgccccatgttgtcggccatgaatagtggggcttagagcgatttgcgatgttcgactcgcaaaaggaagccaacaaagggtggcggatccgtttcaaccacttctaccgagccgaaccgagttcgcattccgcattattatttttatggccagcagcagtgaggagccgaaggtctcaactaattaaatttcccagatgtgtgtgtgtgtgtgtttgcatgcacatatttaaattggctctgccaggccacatagctggctatgtatgactatatgactatattccggactgcattctgggtcggagagttggttgagcaatgcacatttttaattacgctgcacatttgcatttgaattgc

SEQ ID NO: 6527 - DNA, 670 bp, DROSOPHILA
attccaaaaaacacaagcccagcgcccaagcgccatcatttgtttccagccgacttccagctccgatcgggtaccaatagccctgcaccggacccactaagatggacggaggaggggacaaccagctcgcggtgcggtccttgggcaggcagcgcgaagccttctcccactacgcgggtccaccgacggccatgctgcaaggacccgatcctggcgaaggagacgtccttgccctgcagatggccatagaagccttcattctagccgaactcgaagaggattcaggcttcgagtccggcagcgaagacgactagcaggatggaaagagtaaagtgatactttagtaaatagcacccatgtatgagccatcataagaggaatatatgtatctaatgttgcaccaaccttgggctacatgatttatgtatgccggtggaccaattcgcccgcattatggacaatgatgcacggcattaattaactcgcagtcttaccttttgcaaataggattacaaacactgaaatgaaatagagccatgtttcgaaatgccttagttgggtttcggtttattcatgtcgatttgatttcaatttgatttcaaacacaaattccatttaaacacagggatgccggtgcatctgtatctgtgtgcgagttgcagattagtag

SEQ ID NO: 6528 - protein, 70 aa, DROSOPHILA
MDGGGDNQLAVRSLGRQREAFSHYAGPPTAMLQGPDPGEGDVLALQMAIEAFILAELEEDSGFESGSEDD

SEQ ID NO: 6529 - DNA, 11271 bp, DROSOPHILA
tttgtatatagagtatttatgtatgtatatgtatatagtcttcattttacaatggttgtgaattacaaaatcggtaggtgtttaatgacgctgctctcgccctcggttctctaacaaaactaatgaaagtaaaatcaaatgaaagaaaagaaaagtaaacaaatttttataaaaatagtttcgatggtttcttactttctttctgattttgttgcatttattgttactcttattatttcaaaatacagcttatcattagtttgaacaataaaattttgattacgaaaacgaattaagtccgatgacccccatcactttcttactaaattcgctatgtttgacacgacaatttgcagggaaatgtgactgattaagggggcctcagctaggatgaacagtatcgattctatcagctattgtcatgaaaacttccgggacgtacaaatatacagacgttacagaaaggagctcgtacaaatttggtaggtaggtgttaactcttaagtgattgaggtttagtctatgatttgcctttgttaaatttacaacaatttcatacttgcgtaacaacaagccgatcaaagggccgagtacctgcccttcgctctgcttgattttgggcgcaaaatgtaggtagttcgttaggttttttatatatttttggcaggatgtagttttatgttatgttttatacgttaagcgtccaggtctgctcggttatgctcgcttaagttcgattagatgatttagctcggcattctctaaccctatctgtgccacacccgcactcaactgatttcgctaatattaaattataaaaaataaataatcgaaaccataatggtaatagacaataagttctttttcaattcgtcctcagcgcgctttgttgcaatagagaaattaagcgtagctacgagcttctacaagcagttctctgtctctcctccaatccattccgcccatttttatcagttcagtcctcgtttcattgctagacctagtcctcgtcctttgacgttccggctgatgtggacgcgtggtcgttggcactttcactggctttgccgtcagacgtggctgctcccgctgaagccggcgcagcatcgcttccattcttgttgcgggcgtcctccttggcctccagagcgcggatgcggttctcttgcttgacgatgatcgccttaagtttgcggatctcgtcttgtatggtgcgcaggtccttttccttttgaagtgaaccaataagttaatcatacaaccgctgaaggagtgcaagtactcaccgataaaaccgctgcaggcggtccaccttcgctagcctcattgttatttccggacgcaaagttgccgccgcccgcgctgctgctcgttgcaccggagctagcgctgtcgcctctaggcttgttcaggatgttgcccgccttcttcgctggtagcgatttgtttaccgacgaggacacgtagccaccctgtacaatggaaacgcgatcctgattaggcgggtaagaaaatctgttcgtttcagaacacaacaaacaacaatgaacacaacgacaagcgccacgcgcattcgcgtgcgtgttagggccaagtgtgcatttatgcggcgtgttactgtatccaataggagactttaataagttagctaacatttagaatactaaaccattttagatcattgtgaatactctttattccggtcgtcactaaaacattcttaagatgcctcgtctcaagtgacattgtacaacggagaacgaggactgtagtctgtgtattggagtggaatgtggctgggcggacaaggcacaaacgtagataacgcagaaaaaacgtaagtaaagcaagcgcaggcatcacacgctggtaggtagccaccggcaaatgctgggagtaagctttaaacggaactcacaagtagctcacttggagtccttgtgctagcagacaaaagcaactgcaaaagccgttggaatacattgtagaaggggcgtccacagtggcagcgactgcctcatcgacttcgagccgcattgccatctgtggacaagccccgctggcgcacatgctgatatatatcctatatcttgtacgctcttatcgccggcggaatggttggcagtgtggccgaaccgttgccgcattcggcggcgagcgctgtattcgcaacacggaataaaagtctgagctgcttctgcaccttagccacttactttgagcgaaaatgtgatcggatccgcatccttgccatcgatccactcctccgcggtgatggcagcgtcttccgctagcgtatcggggtagagatcctcctggaaaagatccgatttgcgcggcacagtcatcgagatgacctgacacagaccgttgttgttcatgcgatagaacttggcgacctcgcaggtggtcacatcacagcctcgcttgggcatcagaccaataccacgctgcggctctgtagtctgaaacgtgtttatgtagtgcacaaaaggaggttcgggcgttacctgttcgatgagattttggttagataatattcatatgtaatattgtagatttacttgtactaacctcgaaataccgaatgaccgagtcaccttttccacacaagtagatcatgttcgtgtctgcgtcgtaaagagggaacattacgccgttggacgtgtccagctccaccatgacaatgggttcgttaagggcatccggtgcgcgcagggagtactgacgctccgagctacggttgaagcctgtggtgaagatcagaccgtgacgtaggaaaatggccctcgtggccttggagccctcatgacacatggcttcgctctccagctcggcagtgcgcggatcgtagatgcggatctttttatccttgcaggtggtaaccaacttagagccatcccagttgaagcaggcgctgtaaacgatgtccggatgggagtcgatgtgcacgaggatttcaccagtgcccacgttccaaatcacgaccttcgcaatacagagagtataagcatgggcttctgaagaagtgttagcattcgctcacctggttatcggagccggcggtaagcagcacgttgagcgcagagggatgccacaacaccagacccacgcgacgctggtggaaaaccaggtcgaccacgggttcggtgagtgttcgcgacagcccgccatcggggatctgccacactttgaccacacagtcctctgagccggaggcgatcacgttgtcgttgtgggggcaccaggcgatgtccagcacaggacccttgtgaccgcccaccaaagggtggtcagccgcaatgcgaccaacctgaaagagtccattaaatttcaattagctcgatacgccacagtaaatttttataattgatggcgactaagtcatgagcagcaaccattgcaaaactgcaacctcgcgacccattagcccaattcctgaattattatttatagccgactccgactgcactcggttctgctatgttcgctaatctgccaagcaggcaatttataattgtaaacttcatgccaattgcttccgaatatggccctagaattatagaaaattggaatgccgaatagctcccatcgaaatctatatatttcgaagcatattataacaaatagtaatggtaaactatttcaaatttaacattgttatatattattagataatattctttgttcatcgctttcaataaatgtattaaaatgtatcattccaaaaagtttctcgaatgagttccatgagtgtaaatctattttggttttttcaagaacttgtgcttgttcttgcctacacttgccacatgcggccaaccttggcgactagatggatctcactcatcatccagtgcccataaaataagtaaaatagggcgtgtgaaagccgctccacatagaaatcatcacttaaaaaagcggcaactgcttagagtgaaaaaaacgatcgcttgccgcgcgttttgcatacaaatttttgtttcaaatggaacgaccatcggtgtacttccatatatgttttcatcaaaagaggagcatcggaagattaggggaatgggtgcttctgctgcccacactatttgctggagctgcgcgcaaaactacaactaaacagaagcccgaatagctgaatctggggcaggacggccaaaagattttgagattgaaaatgcaatttagtggaatacaaacaattagtttttagcggaataagtcgccgagctgagtgtgcatttcgatgcaatgattcgcccgaatatcatttttgtattcatttaactggctgctcctctgcctctctctaaaattagacgatttgtttgtcatgttggctagtggccaaattacaaaagtgcgccagctagcagtatcgctgccgcggtagtagcagaatctataactatttataaacacatgtgagattgggtggagtcatgcgaaatccgtcgacgtcactcgcgacgtggcaacaagcccgcaaatggccgcaaactttatgccaaaagggcgctataaatagttgcccattgtcttgtttaaaaataccccaccaagctggccgcgtcggggcagacgcacgtagacgagtgcaactataataggtccggtggcgcactcactttgttgtgtggcaggacgatgaaggctccgccgcccgccgactctacgataatggccaggaacttgggattcaccgcgcagaatgtggagtcccagctggacttggatacccgtatgttgtcgtagcactgctcccgcttgagagcctgtccgtagacgtggcggaacttggagctgcgcactacgcgaaatgacatcttgatgctgcagtggcttgggtcagcgatcagtcctgagcttctctacgtctagctctgaaaagaaatgagacgtacgaaggatagttagcaatgtaggggaatttcttacgcgtttggtattttccaccctttgcccttaataacaagtcttcaagcgaaatcgtttagccgtattctttccgcacctgaatgagatatgaaacccctactttttggcagagatttgaacactcatttgataggttttgttttctacacagttctgtgaaacctgaaaatcgtgatcttagccttatccgagttctgagcgacgcataaaccgaccgaatagcaatgttattcgctttcagcttcgctcacttatgtgttagcttaacgcgtttttctttcaccgcgcttcgcagcctcgattagttcaataaatttgcatatgctaatttcgcttgttgcgaaaatcaatgagctttccattcgcagcttgctattgacgcgctgactttgtccgcgagaggttgcatcaaattgcttatggcatcactaatgttggcgactgaaagcgccggaaacggcgggaggcgcctagaacgctttcacctgccacttggcaactgccacattcgggtccactttcgttaatgaagcgccagccggaacgtgtcgaactatcagttttccatacccctttctttcaggatgacatcataacgccaaaatagccactccagcaatgagtagccttccaacacgtaagttatggctgagcaaaccgatcccgcaggccaacctaagcccaaacatatacctaacactccgggagacttctagatagctacgtgtttgaagcagaattcatttctgggttgggccgagcccggcaggcttccactccgaacagctttcgtttttaatcagagaagtgccataaaattatttgcctcttttgcctcgttgcttcgttttgttttgctcaaagatattcatatttattgcaagcactaaactttgtcattgacccctttaaactggccccaaagcagaccccagaattgattactttctacgctgtctgtttttggccacaaggtgagccccggagggctttgttcttgggtgggtgtgggtatcgacatggcctctccactgataaggaaatatcagctcggagttggctaaacaccacagagataatgttaagtgctacgcctatgtagtccaaaacgacgccgaaatgtttgccaccaactggaaaatactcctaagcactgtacccggaatatatctatctatatatatatatatatatctgcggcgtgtgtatgcgttgttatttatgtgtttatatgccaaacaccttcgtttgcaggcgggaaaatttttgtttcgcggctgaaggtcaaacttattaatagaaaattaaatcatcttaggcgaaatgaaattttcatatacaaacacagtgcacgatgctcaaagcagcgttgtaaatcgcatttgatgtgtttatttatttcgttggcatcgctggcacctgccatgcctgagttatcatagtcgagccacccccatccactcccacttccccgatcgatcataattgcattcgcaattccgctcgcaatggccaaaaaagtggcctcttctgcgcttaatcaacttgaccgtcggtggttttatcagcggaccactcagcgattaacggaagtgtgggttcaagaaaatcgctgaagaaatgaaaatctttgaagaactcattcccgacgcccattacccgggtggtgtgattgaatacccagcatcacattgcattccattctttacagtgggccccaaatgtaaggctgtttctgaagatattcgaaaggaaattaagtcaaaggttcaaattagtaccggatcttcaaaactcacattagatggaagtccacaatctacctagttattgtgtttaagtctagtattatatttattcacaatagatgtcaaaggtgcgagcgtcactagtttctcaaattgttcaacagtgtttttcttttcttctaaaaactcgcttgagtacattcggaaattacctataacctgcgattctgatcaggaatatattcttcatagggtcggaatcgttgcaacgttttcgacgaatcagaataaacttctctataaatgaaaggtatgtataccttaataacaatgaaatggggttaaataacataatgattttgatagtataattagaattaatagaattccgtttgaaaaaggtcttgaaaaaggtcctgagtcagattttggttctaggaggcgtctctgccagaattagaaacaggctgttgctgaatcattattgaaaagtaaccaactaatccgcacgccacttaaccagcgggtgtcaaccaactttcagcagcgactgtcttgtaatcgcgttaaccatttgacaatggggctgttgtggggccctccagcaatttgtgttgaaatcgcgagagatgcaaccgtcgctgaattgatgcgaatgcgatggtccagcgatcggggactggccgagaattgacttaatgcttgattgcaaatcttgccgctttgtcgacacgttgtgttcaccggccacttccgttataatgacatctctattccccaagtacactcgaaaaagaatctattaaatgtgtaggaccacatgccatcatggtttccggattaaagtagctacaactgatagttcaaacttttcctaaagcatagggcacaaaaccattcttgtatagacaaaactgttattaataaatatgtattaaacatactccgcttaactcatgtgtagagttattggatatggagttttgtaaactcaagtgcttccctttaacgtgtcaccacaattacatagaggcaggtggtttaaaacaaaattaatactatataattatggattaaaactttgtcttgatacgtgaagatatcagaccagttgtagctcagtcaggtgttatcaatacggcatcatacattgtatacatatatgtttgcgttgcgcggcttggttttgattaactcgtggtatcttttcttcctgtgcacagctgcagcgacacctaatcagctggccaatgatcaatgccacatgcatgagtcacccctgataaggggcccgctgtttatcggctgtcggctgcactggaaactttcgccgttcgcctcatctcgactggatggtgaggttgatggcgatgatgatgatgatgatgtcattgatgcaggcgcaacgtcattggttgtgcagctcatatacatgcacatacacacacaggcgtgtgtgtgttgaaggttcatcaaactgattgcagagtgtgcgtgcctgacggcgattagccaaagtttttgacaaaaagcgcgcaagtgtcgcggcagactcactggcttgcagcacagtgggtgtcgtcgctgtacgagtgaaagtggaactctgctgctaaaattaaccccatgcatatgcagtgccccacccgacacccatcacgtcccctcgccatcacaagtggcgctggcttttgttgctgtcttaattgccgctcgttctttttctccccagctccccccactgtgaccgccatccgtttgtttctatttttccatttgcgcttagtcagaccgggcggcaattgtgaatgcctgtgcaccctagaaattcaaagtacatggatttttttgagaccgaatgggcgaataaaagtacctttcccttttaagaattacacattcgatgcctaactatagccctgaacgcgtattccaggtaaaacgatgtctacctgattaatgtgaaacgtgaagcactgagaaaaaattatcccgggattttagaaaatcaccttttattctcaaacgctataaagacgagcaattgaacaaagaagacttttcttacgtctagagatatccatgtaatattcattttagaaaagttaaatcaatggttttagaaaagctttcaagaaaattttttttctttatatgtatgttgccattacaagaaaaagaaaaatccgtaactaatgtacactgatgcttaaatgggtggagatattttgaatcaatgacggtttcctaaaatcaaggttaattttattctaggtgtagtcaagtaaaagttaatttatccagatatggcttagaaataatagataaatcaccctatgtaggttttgtagattaaattctaaattaaggttttgggctttcttaagcattattagcgatctatatttttcggttccaagtctatgatgatgataatttcttaatttaatattagtgggtggactgtaaaactccaacttcagatgttccttctatccaaaagggtattcaagcagtggcttcccaaaattacgtgcttcctagttcttttcggaggtattgccgccaattggcgtgtccattgccagtctaactggcgttcatacgtgcgcctgttttgcgatcgtcgaacagctgttgttcgccgagtaatcgcgacattggctgacgcataaacgcgatcggcgtttggactcgaatgtgtatgtgtgtgtgcttcattccagtgcatttctcatatttttgtcactaattggtgttggctaagtttcgcttcttaacccatttggggagcaaccgaaatagctgtgcgtgtgggcgtatgctgtgcgctctctcgcttgctcgcgcgcactttggaagacacctctggaggtcgcttgtttttcacacttgctctcgctcgcacgcacgaaatgaaccgtaattgtggactcgggcccattggaagccacgtttatggctagccaatattccgaaattttaaatgccagctcattttggcgccctttgagagcacacccccttcgaccatcagtaacttgttgcttccaccagcaacaattggcacagtctctcccccttttcctttctcccgcactcggccactcttccccgctctctcgctcacgcgcagcgtaaacaagtgagagccggaaaggaaaagccagacaaattacagcgaaacgcaaggaagaaaaaacaaataccataaaaaaacaattaatacaatcaagtgcgaaacaacaatttcgactgcgagttgtttgatttcattcgctcgtttttgcaacgtttttcggcactggcgctgccaaagacgctgctgcttggctctctttattcccttttttgggtgttggactcatataacacggtgagcgagcgggagagctgatggcgaaacttttatagcggtactcttcacatgcactgcgttcgccgctccgctcgcacaagaaagcacgcacaccagcgcacgcacgccacactcggcgcacacatgctcacacgcacacacacgtatggtcgcaaggcggctgtcgcacttatttttttaccgtgatttttaatgattttgtaatacgcgcgttcattacttaagcgccgcatttgcatcgagcactcgcaacgtcacctggaaaatgcgcagcttcagctgacaccgagcttaaatactcatattccgcaaaaataccgctgtgattcattgcaaccgctttgcttttgcttgacatttaatgtggcggcacagaagcggccgcaagaaaccaaaataccaccactcactttatctatcactccactcactggggccagcgcattcagcgggattcaactagagattttgcacacgactccggctggaaacttaaggcacttcttttcagacttttcagtcagcagaaagacgggacgagtacaaaatgccgacgagagcgcgctgagcatctaagagcaagttcgacactgttgttcgaggcaagttgttgatatcagcgcagttcgcgttcacgttcaccgggcgctgcgttcatccgcgtggcgttgccacctgggccgaaactgccatggaattagctagatccagctattgtttgtgttgggctgaaggctcccaattggacaatttttattgaccacttaaataaatataattgcttattcaatatctattatcatttaatttcttatctaaatccaagtccaagacagtaaaatattttttaattatgtaccagcagagctgtcggaactaagaaaatcgcgaaaacatagcaacattgtctgtcggtggccgcatgcatccctgacggggaatatggtagccctaaacagctgactgcgcgggtctcatttgaatttcgggaccgacttcttccggacctgaaatatttttaatttagctggagttttgtcaagtgcggaaggtgtatacctttctcgggctttatcaggcatcgtagcacctctacaaaaggatattctagcagcaccgccaccagcgctgccacgaattgagtgagtatgaacacgctaaatacgttgcacagctaaaatggtgataaagtcaattggaccaaaagtt

SEQ ID NO: 6530 - DNA, 1880 bp, DROSOPHILA
cccggtgaacgtgaacgcgaactgcgctgatatcaacaacttgcctcgaacaacagtgtcgaacttgctcttagatgctcagcgcgctctcgtcggcattttgtactcgtcccgtctttctgctgactgaaaagtctgaaaagaagtgccttaagtttccagccggagtcgtgtgcaaaatctctagttgaatcccgctgaatgcgctggccccagtgagtggagtgatagataaaagctagacgtagagaagctcaggactgatcgctgacccaagccactgcagcatcaagatgtcatttcgcgtagtgcgcagctccaagttccgccacgtctacggacaggctctcaagcgggagcagtgctacgacaacatacgggtatccaagtccagctgggactccacattctgcgcggtgaatcccaagttcctggccattatcgtagagtcggcgggcggcggagccttcatcgtcctgccacacaacaaagttggtcgcattgcggctgaccaccctttggtgggcggtcacaagggtcctgtgctggacatcgcctggtgcccccacaacgacaacgtgatcgcctccggctcagaggactgtgtggtcaaagtgtggcagatccccgatggcgggctgtcgcgaacactcaccgaacccgtggtcgacctggttttccaccagcgtcgcgtgggtctggtgttgtggcatccctctgcgctcaacgtgctgcttaccgccggctccgataaccaggtcgtgatttggaacgtgggcactggtgaaatcctcgtgcacatcgactcccatccggacatcgtttacagcgcctgcttcaactgggatggctctaagttggttaccacctgcaaggataaaaagatccgcatctacgatccgcgcactgccgagctggagagcgaagccatgtgtcatgagggctccaaggccacgagggccattttcctacgtcacggtctgatcttcaccacaggcttcaaccgtagctcggagcgtcagtactccctgcgcgcaccggatgcccttaacgaacccattgtcatggtggagctggacacgtccaacggcgtaatgttccctctttacgacgcagacacgaacatgatctacttgtgtggaaaaggtgactcggtcattcggtatttcgaggtaacgcccgaacctccttttgtgcactacataaacacgtttcagactacagagccgcagcgtggtattggtctgatgcccaagcgaggctgtgatgtgaccacctgcgaggtcgccaagttctatcgcatgaacaacaacggtctgtgtcaggtcatctcgatgactgtgccgcgcaaatcggatcttttccaggaggatctctaccccgatacgctagcggaagacgctgccatcaccgcggaggagtggatcgatggcaaggatgcggatccgatcacattttcgctcaaaggtggctacgtgtcctcgtcggtaaacaaatcgctaccagcgaagaaggcgggcaacatcctgaacaagcctagaggcgacagcgctagctccggtgcaacgagcagcagcgcgggcggcggcaactttgcgtccggaaataacaatgaggctagcgaaggtggaccgcctgcagcggttttatcggaaaaggacctgcgcaccatacaagacgagatccgcaaacttaaggcgatcatcgtcaagcaagagaaccgcatccgcgctctggaggccaaggaggacgcccgcaacaagaatggaagcgatgctgcgccggcttcagcgggagcagccacgtctgacggcaaagccagtgaaagtgccaacgaccacgcgtccacatcagccggaacgtcaaaggacgaggactag

SEQ ID NO: 6531 - protein, 528 aa, DROSOPHILA
MSFRVVRSSKFRHVYGQALKREQCYDNIRVSKSSWDSTFCAVNPKFLAIIVESAGGGAFIVLPHNKVGRIAADHPLVGGHKGPVLDIAWCPHNDNVIASGSEDCVVKVWQIPDGGLSRTLTEPVVDLVFHQRRVGLVLWHPSALNVLLTAGSDNQVVIWNVGTGEILVHIDSHPDIVYSACFNWDGSKLVTTCKDKKIRIYDPRTAELESEAMCHEGSKATRAIFLRHGLIFTTGFNRSSERQYSLRAPDALNEPIVMVELDTSNGVMFPLYDADTNMIYLCGKGDSVIRYFEVTPEPPFVHYINTFQTTEPQRGIGLMPKRGCDVTTCEVAKFYRMNNNGLCQVISMTVPRKSDLFQEDLYPDTLAEDAAITAEEWIDGKDADPITFSLKGGYVSSSVNKSLPAKKAGNILNKPRGDSASSGATSSSAGGGNFASGNNNEASEGGPPAAVLSEKDLRTIQDEIRKLKAIIVKQENRIRALEAKEDARNKNGSDAAPASAGAATSDGKASESANDHASTSAGTSKDED

SEQ ID NO: 6532 - DNA, 3976 bp, DROSOPHILA
ccgcagattggcgcccattgttaagcccgcctgccgctgcatgaacgccggaccagtgcccatggtggatggcgcctgggagggatcggcggtgctggctcacggcagcctgctgcgattcggttgcctgtcgtttgtgtttgtcgtgccgtcggtggatctgctgcaggcgcaggcgcgcagcaagcgttcgtagaaccagtacccagactccatcagcagaagcagcagcctttagtttaagcattaagacacagaaacatatacgcgctcaaccgcagccaactccagtggagcagcaccaatctcagtggggcagctagcagccaggcatagggttagggttagcagataccagttcaacttcatcgcatcaatcatcgcaatgcaaagcctcggcagtacttttaaatcacacaatcctccaatcccatccagcattaagggtatatatttgccttatgaccagtgcaataaatacggagtacaaaccacggatgtgcacggctgcaggctgatccatgccagtgggcagtggatctctggtatcaaacgccgtatttattgaattaaccattacgttcataaatcgcataaacccgcatcgcatactttacttttattgtaaaaacagatgtataaattgctaaaacgaaataaacttgtaagatcagagattttttcacatgcaaatggatcgatggagccaccaattagcagtaagccccgcccaataagtgcacatgacttttagtttcttttgaaatgaatgtgtttactttataaccagatcaaatccaactggttaaggcattatagagaacgagaagagtatacacaataggtgccaggcggcgggacgccttgactttgtggagtacacgaaacgtcggataagtacattcggtatggctaatatgcaaaaaatatatatgtatatatttgtaattgtaaagatctaagactacgcatgcaccgcgtccaggtgccggctgccatcctagagtgcggccgcaggacccggctgagcctgtgcctgtgacgggttggtgtgctgcatctgctcctggacgccagccttggccgccgagcgcgtggctcgcgatctctcccattccgctttgtgcttgcgcttagtgtgatggtacatattcgacttggagcggaattccgtgggacagaaggcgcaggtgtgcagcttgacgcccgtgtgcgtggcaaagtgctcctgccgcagaagaattcattatcattagtggtatccatgcagctgcggataactgaaacaatgcaaggcagtgcagtactcacctccaaatatcgcttcatcttgaagcttttgccgcacacatcgcatgcgtacttgggcttgctcaggcagcgatgattctggccaggaagctcaccgcaattgggacaaatgatcgaaacgggtgccgcatggatgacagcctgcagcggagccgccggtcgtttatccgtctctgaaggcgggtggttgctgtaagagattcgttagtaagcttgctgcttgctgcttgctgctggagtatccaatcgacttacccatagggatgcgccatcattgtcccagttgtcgttgtcgtcgttgttgtggcactgctcgttcctacggccgccgctgcagccgccgttgccgacatgacagcaaagagttgttcctgatgttgctgttgcaaaaggctcgcacacagacgctgctgcaggctatccggttgtcctggcggattgcccgttagcgaagcggctgccacgacagcagcggctaccgcattataattggccagtatgagctcgttctccttgagccttttctgcggcgaatcctcgtcgctaacatcgctgccctccgtgtgctggacctttttgggcgagtgcgtctttcggcgactggatcgattgcgtgagccccgactaccggatggcggtgtcttggttatggtgaggttcatggcctcgctgggttgactcttgattaccgacagcggcagctgttggacagttggtggcgatggtaaaggagctgctgcgagattggtggtgggtgtggcagacgaagcaggagtagcagtagcagcgggatttactgtgtttccaggagaagcagaagatgcaggagcggaagcaagagcaggagcaggagcagggacaggaactaaaactgctggagcggtctcctccggcgtcgtgtgattctgattcgacttggccgcatcccgctcttcgcgagcctttagccactgcgtggtgtgcttgctcttcacatgggtgtacatattcgaacggcagcggaaggccatttcgcagtagggacacgcaatgggtcggtcgccggtgtgggtggctatgtgctcctccaggtagcggcgcatcttaaatgacttctcgcagaacatgcagggaaacttattcgccgttgtgggagtcaccactttgggctcctccgccggctccagtagcaattgcggttgcgcatccaactgcgtttcgctgccatcctccgaccagttgacatcacaatcgatagccaaaaactggctgcacagcgtcgtctgctttagctccaccagcttccagaagttgtggaagctctccagttgcgagcagcactcggtgcagatgcaggtggagatggcgtcgtcgcgggagagctgcggcagatgagcggtagcattagggcgaggcggtgggctaaataatcatcagcgaatactcacgcagaggtacaagtgaatcgagatcagttggaccaggtagctctctggcatcgccttgccgtcgtcctcgtcatccggtgcgggcgcactggctccgccggcgccgtcgaacagtagcaccgcgctctgctcgtcgagcgcgttcagacacaggcgacagatcattttattccgctttaaaatatacaatttttttactttattccattggtttgtgttcttcacacgggcacggtcacactttcacctagcgatggcatttcgtcccaattcaacgcctatcgatgtgccaatcgttacgtgacgttggcgcaggtcgtacttaacgttacgtcacgtaacggaaaagcgttaattcaaattgcacttatttttgaatttaaacttgctttataaagttaaatttctgtactttatataataacttaaaacttattgcacttgagattaagaaaaaatattaaacttagtggaatatattgcgttagaaagtattatttagtcaactgagtggtaaatgaagactcatgattgatgttccaggatgcatgaagaaatatttgattgaagtggctctcaactagtgtgttgcaattatgctaagttgcgaagccagcaaaaccctatttttcgaccgatcgccggttgcacaatgtccaatgatttcttttttttttgcgatgagtggagtgtttgaagcttttggcgctttgcttttagccttatctgaaaaaaagcatgtatcattctttgctttgcaacgaaatgcaaccgatttgcatgacttgatgatgctgcgaccgcaattagcaggcagtgctaaaattctaactaattgatttgcaaaatgatgcaaacaaagttggcaaacagcaagtgcattattgctaaatgcactttgccgtgattggcactctggccaatcggaatttttaatattcatacactaaaaacgattagttttgggaacaaagtgcatgtatttagttcaatataaggctgaatatatttctctcagtgcaccaccctgcagctaaggtcgccgcaaagcgccaagaatgtagcttaccattcacatgaccataatttctaactccacgcttgtgaatctcacatcgtacgttgaccattttaaattgtcagttagcacttttttgttgttgttgtaccaaacctctgacttgggcattgttttaaagcattttatgggtcggttaagttccattttcaagggcagt

SEQ ID NO: 6533 - DNA, 1762 bp, DROSOPHILA
tgaccgtgcccgtgtgaagaacacaaaccaatggaataaagtaaaaaaattgtatattttaaagcggaataaaatgatctgtcgcctgtgtctgaacgcgctcgacgagcagagcgcggtgctactgttcgacggcgccggcggagccagtgcgcccgcaccggatgacgaggacgacggcaaggcgatgccagagagctacctggtccaactgatctcgattcacttgtacctctgcctctcccgcgacgacgccatctccacctgcatctgcaccgagtgctgctcgcaactggagagcttccacaacttctggaagctggtggagctaaagcagacgacgctgtgcagccagtttttggctatcgattgtgatgtcaactggtcggaggatggcagcgaaacgcagttggatgcgcaaccgcaattgctactggagccggcggaggagcccaaagtggtgactcccacaacggcgaataagtttccctgcatgttctgcgagaagtcatttaagatgcgccgctacctggaggagcacatagccacccacaccggcgaccgacccattgcgtgtccctactgcgaaatggccttccgctgccgttcgaatatgtacacccatgtgaagagcaagcacaccacgcagtggctaaaggctcgcgaagagcgggatgcggccaagtcgaatcagaatcacacgacgccggaggagaccgctccagcagttttagttcctgtccctgctcctgctcctgctcttgcttccgctcctgcatcttctgcttctcctggaaacacagtaaatcccgctgctactgctactcctgcttcgtctgccacacccaccaccaatctcgcagcagctcctttaccatcgccaccaactgtccaacagctgccgctgtcggtaatcaagagtcaacccagcgaggccatgaacctcaccataaccaagacaccgccatccggtagtcggggctcacgcaatcgatccagtcgccgaaagacgcactcgcccaaaaaggtccagcacacggagggcagcgatgttagcgacgaggattcgccgcagaaaaggctcaaggagaacgagctcatactggccaattataatgcggtagccgctgctgtcgtggcagccgcttcgctaacgggcaatccgccaggacaaccggatagcctgcagcagcgtctgtgtgcgagccttttgcaacagcaacatcaggaacaactctttgctgtcatgtcggcaacggcggctgcagcggcggccgtaggaacgagcagtgccacaacaacgacgacaacgacaactgggacaatgatggcgcatccctatggcaaccacccgccttcagagacggataaacgaccggcggctccgctgcaggctgtcatccatgcggcacccgtttcgatcatttgtcccaattgcggtgagcttcctggccagaatcatcgctgcctgagcaagcccaagtacgcatgcgatgtgtgcggcaaaagcttcaagatgaagcgatatttggaggagcactttgccacgcacacgggcgtcaagctgcacacctgcgccttctgtcccacggaattccgctccaagtcgaatatgtaccatcacactaagcgcaagcacaaagcggaatgggagagatcgcgagccacgcgctcggcggccaaggctggcgtccaggagcagatgcagcacaccaacccgtcacaggcacaggctcagccgggtcctgcggccgcactctag

SEQ ID NO: 6534 - protein, 562 aa, DROSOPHILA
MICRLCLNALDEQSAVLLFDGAGGASAPAPDDEDDGKAMPESYLVQLISIHLYLCLSRDDAISTCICTECCSQLESFHNFWKLVELKQTTLCSQFLAIDCDVNWSEDGSETQLDAQPQLLLEPAEEPKVVTPTTANKFPCMFCEKSFKMRRYLEEHIATHTGDRPIACPYCEMAFRCRSNMYTHVKSKHTTQWLKAREERDAAKSNQNHTTPEETAPAVLVPVPAPAPALASAPASSASPGNTVNPAATATPASSATPTTNLAAAPLPSPPTVQQLPLSVIKSQPSEAMNLTITKTPPSGSRGSRNRSSRRKTHSPKKVQHTEGSDVSDEDSPQKRLKENELILANYNAVAAAVVAAASLTGNPPGQPDSLQQRLCASLLQQQHQEQLFAVMSATAAAAAAVGTSSATTTTTTTTGTMMAHPYGNHPPSETDKRPAAPLQAVIHAAPVSIICPNCGELPGQNHRCLSKPKYACDVCGKSFKMKRYLEEHFATHTGVKLHTCAFCPTEFRSKSNMYHHTKRKHKAEWERSRATRSAAKAGVQEQMQHTNPSQAQAQPGPAAAL

SEQ ID NO: 6535 - DNA, 3764 bp, DROSOPHILA
acatcggtacagaatgtggcctactcgccagacggacagctgctggccgtgaccaccagtggaaaacagaaagctctcctgctctatcgttcacggccggagaacgcccgcctgctctccgcccgcccactggcccgggcgtccagtgccctgcgcttctgcagcgacagcagctccattctggtcacagacaagactggcgattgctatcagtacgactgcgttgaggtggaggctccgccgcgcctgctgttgggccatttaagtgtggtatacgacatcctgtggtcggaggaccagcagcatatcatcacctgcgatcgggatgataagatacgcgtgaccaactatcccgccacctttgacatccacagctattgcctgggccacagggagtttgtctcaggcctggcactgctcacggagcagcatatcgcctccgcttcgggggacaagaccttgcgcgtatggaactacattcagggcaaagagctgctgcagcacgagctaccagcaccggcggttcgtttattggtacgccagctggagccggagaaggtcttccaggcggcggtgctcttctacgagcacgtggacgccctgggattgtatcgcctggagcgcagctccgatgacacctggagcgtgacggccacacaactggtttgcgccgaagcgggctcatggagcattagcaactttactttaaccagcgaccggatctacatcaccggcgcagagaacgaacgcttaagcttgcgcgtctacgacatcgcaactggccagccggcgagcagcggcgtgcccgagggctggctgaagatggtgctagacggattgggtgccaacgaggagggcgcaccgccattcattcccgaggacttgtccgtttggtttaagaagcgcttcgacaacgttagcgactatttggagcgcaagaagcggcgcatcgaggagcagcagcagcagaagtgcggctaatccccgggcgcccacatacccaaaggaaattaaatgaacctaatctttacatagcatttaattagcatatggagaagaagcaacggactttgtgtgacaggcccgttgtgggcataatatatatatatctgtatatgtgtgtaaatggtgtatggttatctctatggggggcggtggcgagcactggctcctagacgggcttgtagtccagcttgctctccaacttcttgttgtccgacaccttgcgcaccgccttcatgaagtcctcctggatgacgtactcccgctccgcactggatttgcaagaatagttacattttagggagcttatcaagcggtggaaacttcgcacttaccgaatggcaaagagacccgcctccgtgcagacattacgcagatcagcgccattaaagttgtccgacagcttgacaatggcctcgtagtcgatttcgccgtgcttggcgatcttcagtgcgtgaatcttgagaatttccaacctaaaaggagttggggttttaccatcagtatgacaaagtatgtaagtatctaatctgagaaatccctattcatatttcaccaagaagacatcaaagataagagccaatcaatgtgggaatatagcttacctagcctgctcgttgggcagcggaatctcgatcttcctgtccaagcgacccggacgcagaagggcaggatcgagggtgtccggacgattggttgccatgatcatcttgacttggccaagcgaatcgaagccgtccatctggttgagcagctccatcagggtgcgctggatctcgcgatcggcagaggtgccctcggagaagcgccgaccaccgatagcgtcgatttcgtccatgaaaatgatgcagggctgatggtcgcgggcatagttgaacatctcgcgaatgagacgcgcactctcgccaatatacttgtcgacaatcgccgaggacacgaccttgaggaagttggcgtccagctgggaggccactgcacgggccagcagggtcttgccggtgccaggaggtccgtacagcaaacaacccttcggtggcgtgatgccgacgcgcaggaagagctccggattcagtaggggcagctcgatcacttcgcgcagctcgcgaatttggtcggttaggccgccgatggccgagtaggtgacatccccgggatcctcgtgcgacatattgtacaccagtgggtccacctcgcgcggcaagtagcgcataatggtcagtgtggtcatgtcgagggccacacgagttccggacttcagcttggctttgtccagctgccggcggcagccgaccacgtagcggggtccattggtggccttcacaatgactgtgtggcaagtaagtagttagaatagaggcaatcttagacagaatatgggagagttctcacatttatcctcggtcagctgcttcagcacctcaccaacgatctgtcccacgctctgcagggcctttagatcgttctccgacttgtcgtacagcttggtcagatccttgatctcctcgcgctctgaaaatagccaggttaatacgcatttgctggcggagatcagcggatagacgaactttctttgaggcgtccctcgatttccttgtgctctagcaacttctttcggtactcggataaggctttcacccgcagattgtccggcatcggtgtggcggtcacggtcatcttgttcgaggatttacgctgtactttcggctgtgcaacgcttaaaataaattaaattcagaaaagtagtgagttgcaacttttgtcgcaatgcagtgtgcccgtaacgtggcacgcaataaatgtacacttacttcggtatatttcatttggcatataccaaatgcggtgcgtgcactggctaagtgcagcgtgtgactggccacaccgccagccggcataattcttattggaattattgtgttaagcgagaataattttaatctaaatttaaatttaactaatgtataatttacgcctgctacgaaatctcctgccgatcgccgggcacgcccatccgcgctggctggctagccagcacaagcggcgcccgcagccgggcagcctgccggccgatcggctggaccagctgcgcagtgatctcttcgagcgtcgccatgagctgagtggcgcggagtggacggaggtgcggaggtcgctcgtggacgggtacaagcacatcaacgggcacaacgtggacgccgtcattctgggcgtgtgcagtgcacccaaccaattgtcgttggccaaaagctatgtggagttcctgaggagcaggggctccaaaccgaatgcagcgacactgggtcgcctgctgagggtctacaatgccgcctaccacgagcgaccgcttagcgaggcggaacagtcggagatactgcagatctgccgatcattgcaggcggagcacgaaactctggacgccagcagctgcgagaatgtgattcatggactggtggccaccagcggcgatgattggcagcgcggactgccgctgctcgagatgatgaaggtcaccagtacgcccagtgtggccgcctactccgcgctggcggagaaggccttcagtgtggcgacaccggagcaggaattggcctggcgcctactggaagagatggccacggcacggaagccgcccaaatgcgaggtctatctggcgctgctcaatcgactggccaacgaaacggcacaacttcctgcacagcttagccttttgttgcaattcctcgaacgccatgagattctagtcagccagcgggtggcgatac

SEQ ID NO: 6536 - DNA, 1453 bp, DROSOPHILA
cgacaaaagttgcaactcactacttttctgaatttaatttattttaagcgttgcacagccgaaagtacagcgtaaatcctcgaacaagatgaccgtgaccgccacaccgatgccggacaatctgcgggtgaaagccttatccgagtaccgaaagaagttgctagagcacaaggaaatcgagggacgcctcaaagaaaagcgcgaggagatcaaggatctgaccaagctgtacgacaagtcggagaacgatctaaaggccctgcagagcgtgggacagatcgttggtgaggtgctgaagcagctgaccgaggataaattcattgtgaaggccaccaatggaccccgctacgtggtcggctgccgccggcagctggacaaagccaagctgaagtccggaactcgtgtggccctcgacatgaccacactgaccattatgcgctacttgccgcgcgaggtggacccactggtgtacaatatgtcgcacgaggatcccggggatgtcacctactcggccatcggcggcctaaccgaccaaattcgcgagctgcgcgaagtgatcgagctgcccctactgaatccggagctcttcctgcgcgtcggcatcacgccaccgaagggttgtttgctgtacggacctcctggcaccggcaagaccctgctggcccgtgcagtggcctcccagctggacgccaacttcctcaaggtcgtgtcctcggcgattgtcgacaagtatattggcgagagtgcgcgtctcattcgcgagatgttcaactatgcccgcgaccatcagccctgcatcattttcatggacgaaatcgacgctatcggtggtcggcgcttctccgagggcacctctgccgatcgcgagatccagcgcaccctgatggagctgctcaaccagatggacggcttcgattcgcttggccaagtcaagatgatcatggcaaccaatcgtccggacaccctcgatcctgcccttctgcgtccgggtcgcttggacaggaagatcgagattccgctgcccaacgagcaggctaggttggaaattctcaagattcacgcactgaagatcgccaagcacggcgaaatcgactacgaggccattgtcaagctgtcggacaactttaatggcgctgatctgcgtaatgtctgcacggaggcgggtctctttgccattcgtgcggagcgggagtacgtcatccaggaggacttcatgaaggcggtgcgcaaggtgtcggacaacaagaagttggagagcaagctggactacaagcccgtctaggagccagtgctcgccaccgccccccatagagataaccatacaccatttacacacatatacagatatatatatattatgcccacaacgggcctgtcacacaaagtccgttgcttcttctccatatgctaattaaatgctatgtaaagattaggttcatttaatttcctttgg

SEQ ID NO: 6537 - protein, 397 aa, DROSOPHILA
MTVTATPMPDNLRVKALSEYRKKLLEHKEIEGRLKEKREEIKDLTKLYDKSENDLKALQSVGQIVGEVLKQLTEDKFIVKATNGPRYVVGCRRQLDKAKLKSGTRVALDMTTLTIMRYLPREVDPLVYNMSHEDPGDVTYSAIGGLTDQIRELREVIELPLLNPELFLRVGITPPKGCLLYGPPGTGKTLLARAVASQLDANFLKVVSSAIVDKYIGESARLIREMFNYARDHQPCIIFMDEIDAIGGRRFSEGTSADREIQRTLMELLNQMDGFDSLGQVKMIMATNRPDTLDPALLRPGRLDRKIEIPLPNEQARLEILKIHALKIAKHGEIDYEAIVKLSDNFNGADLRNVCTEAGLFAIRAEREYVIQEDFMKAVRKVSDNKKLESKLDYKPV

SEQ ID NO: 6538 - DNA, 2965 bp, DROSOPHILA
gaatcaataagttttgaagttagcactccatcaaaatccaccaatcacaaccattgaactgaaatgcaatgtaatcccaattcacaggtatgtttatgagccttacttcgctgcccatgccgaagccggatccgatacgtttcaatgtcgaccatccatttacattttacatccttaacaaggactcaaccgctctcttcgctggcagcataaagaaactctaaataggcaaacatactaaccaatccacaatgttactcgagggtctcgtattcatttaacgtgcaagcgggtcagtcctatattgctggcttgacgagcatattcagcttttacattgtctataaggattcacaaaattatagtctgtgcgcaattgatgatcttatatatacacttaatatttttatactaaccaagcatgtagccgtagcctcaataaagtctaaaagcaaatgtctaaaagtctgcttcgttttcatggttcctcctcagtatggcgggtgatggccgtagctgccttcagtcgcaaacacttcattgccaaccatccttttgctttctacgtgaagacccattacgatctgccgatattcactgggcgctacttgggttaagcaataggaagcttcctatgaaaaaaaaaattgaagttcaataaaataaaataaacggcagccacttaatagctgtgatttcgtcaagtcgaagtaatttatagaaatatctttggaaaacgcagccaagcttgacggtgtagcacgctatcgctaaattggtaagacaaatcgagcaaagattcgcaatagttgatcttcaagtgttagaccaaacacacgcaacatgctccgctggttggaaataggtgttctttcggccatattgtctctgggacaaggacactttttatctggatcgttcaactgtaagtaccgtgaacttaatcctatatcgaactatatcaggtgaaattgggagcgcagtaactctctacagacacatgcctgccctgtaccaacttgatgactacgatctctgtctggataatcaagctggtacttactgtttggtgtacgtcgagattttacccaatgctagctctgctctatggcaccaaatcgaccaagtttcacaggactcaaaacaccgttttcgccatgatcgcgtttttaggggcgtgtgtctggagagctgtaagcaaagaatcaatcacttatccgagttcagggagtacgagaaagaagaaattctggataaggaacttatatcttactacgataaggtacaccgtcgggatgcaatgaattcagatagggatctctttaataaagaggttgtgaaaggctgtctaaaccaaaagttcagtgagaagttttcacttagaactcggagccttatcgagtactgtgtctcggcctcggataaggacttgaagatgggtaagtagggctaagtttattgctgacaagctatagttgcactttctaaaaactttgcactgtacagctattgtactgttattttctgcttttggtatgtggagcactgcgtaaagtttatttccttagatttgcttgatttggcgttttatggtattctggtagttatactctttataactttgtgttcgtctttccttgactatcgcctgagcaagatgaactcgcaaaaatcagaaagtttttatcgagagccactaatggatcgacgtaagtggatatgaactacagaattagacaactctcaagttgatttcggtatgcctccaggacagcgactccttacatccttctcagtggttcgaaattatcatcgattggttgagccgtataactcagatttctcgcgggatgtgagctttttcgacgggtttcgggtgatcggcgtatttgtagtgatcttgggccacacgcttatggtctttatgactgttccaatagaaaatccggagttcttcgaacagttcctgttccggttcgagacttcaatatttcaaaacggcagcctggtcatccagatattttttgttatgagcggcttccttctctacgtgaaattcaccaaacgccaacagattcaacccaagactggcacgcttgagtgcattgctgtgtactttcgagtgttttcctacagatactttagacttctgccatcgcttctcgctctcatcctgttcaatggaacactgctggtgcgccttcaaaacggacccttttggcgacatcttacggaggccgaacgggtcttctgtcgcgccaactggtggaagaacgtgtttttcgtgaccaaccacatgctggaagacagtgtacgttattaaaacaattcttcggtatttcagaaaggataacttgagtttaagccaccttacccatcctaattgcattatagtgctcccatcagacgtggtacttaggagcagacatgcagctattcgagctcttccttatagtaattattataaccaaaaagtgagtcccttgccctttttgtagtattacaaaaatacctctgtgattttaggcatcccaagctgacaaggacaatctacacaactcttttagcacttgcctttgcagtgcctgctgtactgacctacgttctcgagctggatggtatctaccatattcgtccggagtaggtttttataaatatcgatctatttttcagtctatgataagtgaatatccctagaacatatcgctacttgtacttccgacattccgacacattttaccaaatgtatccgcccttttacacaaatttgggtggctatctgtttggttttctgtgcggtcatttttaccttaggcagcgttctggaaatgtagaacttctgggtcatcttaagtacgatctggccatgtggctgcttgtgctggccacgttgggagtccttttctccggctacatctttattcgacaggactttgcgaagccatcgctatggctagccttgtat

SEQ ID NO: 6539 - DNA, 993 bp, DROSOPHILA
atgcctgccctgtaccaacttgatgactacgatctctgtctggataatcaagctggtacttactgtttggtgtacgtcgagattttacccaatgctagctctgctctatggcaccaaatcgaccaagtttcacaggactcaaaacaccgttttcgccatgatcgcgtttttaggggcgtgtgtctggagagctgtaagcaaagaatcaatcacttatccgagttcagggagtacgagaaagaagaaattctggataaggaacttatatcttactacgataaggtacaccgtcgggatgcaatgaattcagatagggatctctttaataaagaggttgtgaaaggctgtctaaaccaaaagttcagtgagaagttttcacttagaactcggagccttatcgagtactgtgtctcggcctcggataaggacttgaagatgggacagcgactccttacatccttctcagtggttcgaaattatcatcgattggttgagccgtataactcagatttctcgcgggatgtgagctttttcgacgggtttcgggtgatcggcgtatttgtagtgatcttgggccacacgcttatggtctttatgactgttccaatagaaaatccggagttcttcgaacagttcctgttccggttcgagacttcaatatttcaaaacggcagcctggtcatccagatattttttgttatgagcggcttccttctctacgtgaaattcaccaaacgccaacagattcaacccaagactggcacgcttgagtgcattgctgtgtactttcgagtgttttcctacagatactttagacttctgccatcgcttctcgctctcatcctgttcaatggaacactgctggtgcgccttcaaaacggacccttttggcgacatcttacggaggccgaacgggtcttctgtcgcgccaactggtggaagaacgtgtttttcgtgaccaaccacatgctggaagacagtgtacgttattaa

SEQ ID NO: 6540 - protein, 330 aa, DROSOPHILA
MPALYQLDDYDLCLDNQAGTYCLVYVEILPNASSALWHQIDQVSQDSKHRFRHDRVFRGVCLESCKQRINHLSEFREYEKEEILDKELISYYDKVHRRDAMNSDRDLFNKEVVKGCLNQKFSEKFSLRTRSLIEYCVSASDKDLKMGQRLLTSFSVVRNYHRLVEPYNSDFSRDVSFFDGFRVIGVFVVILGHTLMVFMTVPIENPEFFEQFLFRFETSIFQNGSLVIQIFFVMSGFLLYVKFTKRQQIQPKTGTLECIAVYFRVFSYRYFRLLPSLLALILFNGTLLVRLQNGPFWRHLTEAERVFCRANWWKNVFFVTNHMLEDSVRY

SEQ ID NO: 6541 - DNA, 7215 bp, DROSOPHILA
gagtatcctgcgaacacattccgcatgatctttcaccttgaattccttggctaggtggagtttataataattggtatgttcgctctggtggcaagaactctctggcaggacttgataatgtggtttatcatctgtgtgctgtttgtcttcatgtttgtgctgctgggatccattataccagtaagggtgtttgcatatttgcaatatttttgcttgaatttgtattcccagcacgatcttacattggacgttgtaatattgtttgtaatggcatttattttcctgatcatcaccgtattctttgtcatgatgcacattctgatcgatatgccgtactcctttgtggtattccagatcttcataagccttattgtgctcttggtaaaaattgaacgttttacttatcgagccattagtatgataatatataatttccttagttcgtgatgtaccatgcccagacgatcaatggtggacgctttgccgagatgcggctgaacgatcacctgttggcctcgctcatcctcttccacgacttcatcatcatcttcctgctcaccttctatgcacagattatctaccggttcgcttcgaatgccgcgaaaaccacgggatctccgttagagggcagttgggttcagacgacaccgattaatggggatgacgtcgtggaagacaatgacgaggacagcgaggatggaccgtcggcagtgggcagtgagaattccccaggtggaaatgcatcataaccctccaaagggggcaatgtattcatctagaggcgaagagactacttttctccaggagtaatgatcgagggcatcaaattgcaggatggcttggtacttagtcgacttgtaattagtgccaattaatacccaaaggtattaaggagacatatttggtatcctgaaaacgcgaaaaatgctgtgacttatacaacaaagaatccaaaaatgggcttagaatagcatattttgtccataataaaacagatatattacttgtgttgtaactagaactttgaaactttaatcacactgaaattgattagacatggagatacatatgtaagccggtaagtttttgagttttgagtcttgaccgattgttagcttaaaataggaaatttatagtattatggtatgggcatgcatattttgtagagtaacgtacggcacaacattgattggaattacgattgattgcattattgattgattgcacagcagcgttcgatgatttacccctctttcccaatcacacatacatatatacaatgaactgaggtgtcaaataatattgaataataacgtaagtcatgggatccaaataaaatgtgtaacttcagattgagtaagctaaacaaataagatgtatagttggatcattaccaactacttcttggtttaaacaaagagaaaaagattctataattaggtactttttctgtccttagattcattgtatagtaaaacttaatatggaatttttaaggctatcactaaagcgactccatcgatgaggttgtcgaacaaacggtggcatccgagtcgctgccctgctcccgctgaccctcgccaatgccatgggcggagagcatcggctgcgagggggatgcgaatgagagcagcagtggtgtcaccaattcatccaggctgctcatgggagtgggcgtgggagtggccccgccgctgagactgctgctctccgtcgaggagttattgcccagggactgggactgcgaggagtagcgctccagcagcagctggctgaaggtctttgccggccagtccggatcctccggcgattcccgggtgggcgtggctatgggtgtcggcaggcgaaagatgctgctgctgaaggaggcactggtctgggcgagattctcgaggggctccagaaaccgcttgccatggtagacattgcaggtggtgaccgggttcaggaggctatcgacggacacggtgacattgcgattgggcaggggcatggcaaggggcattgaaagttggctttgactgggcactgcgcacaaagtaatgggtcggaattggttgactggtgaggatcgcggcgaggattgagtgagagagtggatcagtgagtgggagctggagctacagctgcgactaggagtggatagggagtgggcgtgctcgggactgggtacattgctggtcctgcacagtgacagcaattcagtttctaaaatgaaattaaataactgaaatggttagcagaaatttctctaacattgaccaataatgccgcattgactgattttaagcgacacccacatatataaatatatataaaatatataaatatacatattttcttctatattcaagatattctacacatttattgggtgtctgggtaaaattgtcacttgacatcactggtttgattactgcaagagttcctcaatttctgactagctctggcgatatatctaaaaagccgactacactacctgggcttcataccttccggcgactcctcgttgtcctcctggatgctggcttgcctctccgagtttgcctgggccgcagaagtggtgtggccataggagttggtggtgctggtacgagtggctccattgccggcgtccagggtcgtctgaaccaccacgtccatgtgggagtccaaagagaactgcttgcccgacatgaggatgccacgcacacgtcgtctcatcgatggcgattcctggtgctgaaataccgtaagtccaagaaccggctgcttaactaacccatatcgacttaccgctatccggacgccggcataggttttggccaggaactcatccgcatcgaatatggccgcaaaagagccgtttaccaccttaggcgagagcggagaattagagagcagaagactcgagccgaaggcttcgtttttctccttggtttctgcggggtaacaagatggcattagaagaaactaaaccgccttggttgaaaactagacgacaatagcctacaagagattttctctcagcttaacgccgtttgaaagaaatatatttacaaataataacaaaaaaaactgtaaatcaaaaatctaaaaaatacaataaagctcaattgtatattagcaaaaccacataatcgggtgaatcggagtgcataaacaagctgaaaacatgaacaggaacggaaacggaaacaggaacggcaacggaagcggaagcggtggctacttgaggcggtaggccttgcgtttacccttgagatagacgcgatttgaaattgtgatgttcatctcctccagcacagtggaggccacctgacggatctccatccaatccttgacaatatcgtccaaggtcgtgtgcgtcgatgtgatggtgaaccggatgacatactgtcccttcagcgacgatgggatgcaatgaaggttgcctcggtgattcagcctcttcagcagcttctcggtgatctcattatcgccgcgtatccggaataccaccaggccaagatgccttttagcgggcagctcgaaacgatgatcggccagaacgagggcctcgaatttctgagccaatcgaacgccttcgcgaatgtggcgctgtaggcctttgatcccgtaggatcgcaggacgaaccacaccttcagggcacggaatcggcgactcagcggtatctgccagtgcataaagtccactgccactccggaattctcgtgctgcagatacagcggctccacattgaaggtcctgtggacggcggtgctatcccgtacccacaatgcggtcgcatcgaagtgcaccatcagccactttgacggattgaaggctatcgaatccgcccgctcaatgccacgcagccaggtgcgaaactccgggcagatgaaggcgctgccggcgtacgcggcgtccacgtggagccacaggtggtgctccgcacaaacgatgccaatctaagagaacaaatgttaaattatttattttgggccaaaactatgcgtaataatagttaattacttcaatttgttaactattaaattcatttaaattcaattcaatcactttaaaatacttttgttacgaacaaacgaagtatatgacctttaaaggagtatccttgttattccctactaaaaaaatggcctcttcaaaacgatttactttaagctttgtacaataaactagtggaacaatatattatcctttatataaattatagctttgtttatcactggcagatgtttcgaggccacttaatttaggccattggattattcctattttcttgtaattattccctaagcacccacctcctccaggttatcgaagctgcagctgccggtggtcccgagtgtggcgcagacctaaaaataaaccaccgcaggacacttaaatgctgacatgtattaattggctccagtgggagtcgtgaatctggcgtttccagttgggagttaggaatcaagaatggggaatcagctggctgcggaaggcgagccaattaattttgacagactgccactcacccagaaggggaccaggccctgcttaatgtcatcctcgatggcctcgcgcaacagtttgccgcgcatcgccaggtcatcatccgcctcgatgtaacgcatcctcacgagtcctgcggagcaaaagagtgggagtgtggcttaaactgtaagcggcttaaacaatgaagttggctatggtcgagcgtgccgaccaagagatagaatagttgcaaatgtggatcatacgtatttcggtgtattagtgtaaatggttttctctataagggaatgtaatcaaactaaaggatcacctaacaatcaataactataaagttagttagattaaacccaccaatgagcgccgccttctccacactggagtgcgcctgatcggagcagtaggccaccagccgggcgttgatctccgcatcctgatagccaggatgtcgctcatggaatcgctgaatagcccgagtccgtcccgccagcagacaaactagagtagcttcactggcagtggtctgcagcactccaccgccctgactttgggagctcaggtggagaaaggcatccggcagaccgatcatcttgcccagccagttcatcactatgatctccagctcggtgcaggccggcgagctcgcccaggtgaatcccaggcagttaatcgcatccgccagcatgtcgcccagtagggaaggcatggagttgagggccggaaagtaggcgtgcatgtggggcgattgccagtgggttatgcccggcatcacgattcgctccacatccgagaatattttcggccacggttcaccttcgatcggagcggactccggcagtaactggcgcatatagcccggactgacatccggaaaaactcggcgttcccggatgttctccaaatagtctgcaatatagtcgaccatctccttgcctgtaaataaaatgtactttaatacagttcaagcgattttgcttagtctttgtccctaattaatatagaatattttttaaaatatttaattattttaattagaataaaagtacacaattattaatgactaggaaaggtgttaaagtgttaataaaaccaaaagggatatagatgtaatatactaacaattcgtagattatgttaaccacgtgtgtgtaattaacttacaattgcaattatttagttgttcagctaaagtatctaataaataattgccacacgctttaaacaaaagcagccatgtaagctcgaaaatgtcaatgaaaattgatttgaaaatatgatactgcattgctgggattttctccgtgtgtgggatttcaattacaggccatggaacgaagacaaacggccgggacaaatccgccttgggccaatcaaatatattgtatatggtggtgacctttggatgggatttccatccggtatttacttacacgcgtctgccgctgtgcattttatggcccagatttggacagtactcacccctttggcggtattccttgaagtccatggtgcaatcgcctcacttaaccgatgctgacgtaaatactgtgcaattgtcgcacgcaatcacggcttgtagatgtatcttcaggcgtttcgtttcgcaatgagtttggcctaatcctgttggactctggctaggctagctccatttttcggggacgtatgccaaattgaaatgccgaattgggaacgtcaaccgtctgaccgctggtgggaaatagtaaaaaaaaaacaacggagaacaatataatggaatagaaacttgtgcacttccgatgttgtggggcttctggcgttcgctggaaatggaaatgacaagaaaagcgcttggaaaagctatgaaaacgctaacagctgtgaaaacacctagttggtgcacctcgggcactggaagggttcgaatccgatggatggttacctaattgcggccgtgataatatttatcctataactagggcttttgggatagcgccgggcttttatagacctggccggaaccaattagcttgttggctgcactacaaatccgatctggctgtgggatgtgttggcaagttgttggaacacacggagctccctaattggccatcccataggcagcacgacattaggggtgtaaccaagggggatgcgctcggattgccagctgatttccaacaaaattccgtttaaattggaaagcaccctctaattgtttatgcttgctgacttgcattgcttgattatattttaaataccgcaaattaactatatctgtaacgatctgcagtgtgtgcacccatactccaactgcattttgtcatgcatttagaacgatggaaacatgaactgaaattcatcgatcgaaatcgaattaaatatttgccgtttcacaaataatgttgatagtcatagaacagcaacattgtggctttttaagcatttgtaaataacgagggaatttaaaaaatatgttagcattcattagaaattatcacagaaaattcaaacaactacaagataatctggttacattttatatggctattaatcatttacagcagatattagtttttatttatatacttaaaataattttattataataaatatattgagattaagctaaacactttcttcaaacacttatttaaaaatcttctggacaataattatagtatttcaaaattttttatatatttcgggaatattttactaccaagttatatacgcacaattacaatagatttcaa

SEQ ID NO: 6542 - DNA, 3276 bp, DROSOPHILA
ttttttttttactatttcccaccagcggtcagacggttgacgttcccaattcggcatttcaatttggcatacgtccccgaaaaatggagctagcctagccagagtccaacaggattaggccaaactcattgcgaaacgaaacgcctgaagatacatctacaagccgtgattgcgtgcgacaattgcacagtatttacgtcagcatcggttaagtgaggcgattgcaccatggacttcaaggaataccgccaaaggggcaaggagatggtcgactatattgcagactatttggagaacatccgggaacgccgagtttttccggatgtcagtccgggctatatgcgccagttactgccggagtccgctccgatcgaaggtgaaccgtggccgaaaatattctcggatgtggagcgaatcgtgatgccgggcataacccactggcaatcgccccacatgcacgcctactttccggccctcaactccatgccttccctactgggcgacatgctggcggatgcgattaactgcctgggattcacctgggcgagctcgccggcctgcaccgagctggagatcatagtgatgaactggctgggcaagatgatcggtctgccggatgcctttctccacctgagctcccaaagtcagggcggtggagtgctgcagaccactgccagtgaagctactctagtttgtctgctggcgggacggactcgggctattcagcgattccatgagcgacatcctggctatcaggatgcggagatcaacgcccggctggtggcctactgctccgatcaggcgcactccagtgtggagaaggcggcgctcattggactcgtgaggatgcgttacatcgaggcggatgatgacctggcgatgcgcggcaaactgttgcgcgaggccatcgaggatgacattaagcagggcctggtccccttctgggtctgcgccacactcgggaccaccggcagctgcagcttcgataacctggaggagattggcatcgtttgtgcggagcaccacctgtggctccacgtggacgccgcgtacgccggcagcgccttcatctgcccggagtttcgcacctggctgcgtggcattgagcgggcggattcgatagccttcaatccgtcaaagtggctgatggtgcacttcgatgcgaccgcattgtgggtacgggatagcaccgccgtccacaggaccttcaatgtggagccgctgtatctgcagcacgagaattccggagtggcagtggactttatgcactggcagataccgctgagtcgccgattccgtgccctgaaggtgtggttcgtcctgcgatcctacgggatcaaaggcctacagcgccacattcgcgaaggcgttcgattggctcagaaattcgaggccctcgttctggccgatcatcgtttcgagctgcccgctaaaaggcatcttggcctggtggtattccggatacgcggcgataatgagatcaccgagaagctgctgaagaggctgaatcaccgaggcaaccttcattgcatcccatcgtcgctgaagggacagtatgtcatccggttcaccatcacatcgacgcacacgaccttggacgatattgtcaaggattggatggagatccgtcaggtggcctccactgtgctggaggagatgaacatcacaatttcaaatcgcgtctatctcaaggaaaccaaggagaaaaacgaagccttcggctcgagtcttctgctctctaattctccgctctcgcctaaggtggtaaacggctcttttgcggccatattcgatgcggatgagttcctggccaaaacctatgccggcgtccggatagcgcaccaggaatcgccatcgatgagacgacgtgtgcgtggcatcctcatgtcgggcaagcagttctctttggactcccacatggacgtggtggttcagacgaccctggacgccggcaatggagccactcgtaccagcaccaccaactcctatggccacaccacttctgcggcccaggcaaactcggagaggcaagccagcatccaggaggacaacgaggagtcgccggaagaaactgaattgctgtcactgtgcaggaccagcaatgtacccagtcccgagcacgcccactccctatccactcctagtcgcagctgtagctccagctcccactcactgatccactctctcactcaatcctcgccgcgatcctcaccagtcaaccaattccgacccattactttgtgcgcagtgcccagtcaaagccaactttcaatgccccttgccatgcccctgcccaatcgcaatgtcaccgtgtccgtcgatagcctcctgaacccggtcaccacctgcaatgtctaccatggcaagcggtttctggagcccctcgagaatctcgcccagaccagtgcctccttcagcagcagcatctttcgcctgccgacacccatagccacgcccacccgggaatcgccggaggatccggactggccggcaaagaccttcagccagctgctgctggagcgctactcctcgcagtcccagtccctgggcaataactcctcgacggagagcagcagtctcagcggcggggccactcccacgcccactcccatgagcagcctggatgaattggtgacaccactgctgctctcattcgcatccccctcgcagccgatgctctccgcccatggcattggcgagggtcagcgggagcagggcagcgactcggatgccaccgtttgttcgacaacctcatcgatggagtcgctttagtgatagccttaaaaattccatattaagttttactatacaatgaatctaaggacagaaaaagtacctaattatagaatctttttctctttgtttaaaccaagaagtagttggtaatgatccaactatacatcttatttgtttagcttactcaatctgaagttacacattttatttggatcccatgacttacgttattattcaatattatttgacacctcagttcattgtatatatgtatgtgtgattgggaaagaggggtaaatcatcgaacgctgctgtgcaatcaatcaataatgcaatcaatcgtaattccaatcaatgttgtgccgtacgttactctacaaaatatgcatgcccataccataatactataaatttcctattttaagctaacaatcggtcaagactcaaaactcaaaaacttaccggcttacatatgtatctccatgtctaatcaatttcagtgtgattaaagtttcaaagttctagttacaacacaagtaa

SEQ ID NO: 6543 - protein, 847 aa, DROSOPHILA
MDFKEYRQRGKEMVDYIADYLENIRERRVFPDVSPGYMRQLLPESAPIEGEPWPKIFSDVERIVMPGITHWQSPHMHAYFPALNSMPSLLGDMLADAINCLGFTWASSPACTELEIIVMNWLGKMIGLPDAFLHLSSQSQGGGVLQTTASEATLVCLLAGRTRAIQRFHERHPGYQDAEINARLVAYCSDQAHSSVEKAALIGLVRMRYIEADDDLAMRGKLLREAIEDDIKQGLVPFWVCATLGTTGSCSFDNLEEIGIVCAEHHLWLHVDAAYAGSAFICPEFRTWLRGIERADSIAFNPSKWLMVHFDATALWVRDSTAVHRTFNVEPLYLQHENSGVAVDFMHWQIPLSRRFRALKVWFVLRSYGIKGLQRHIREGVRLAQKFEALVLADHRFELPAKRHLGLVVFRIRGDNEITEKLLKRLNHRGNLHCIPSSLKGQYVIRFTITSTHTTLDDIVKDWMEIRQVASTVLEEMNITISNRVYLKETKEKNEAFGSSLLLSNSPLSPKVVNGSFAAIFDADEFLAKTYAGVRIAHQESPSMRRRVRGILMSGKQFSLDSHMDVVVQTTLDAGNGATRTSTTNSYGHTTSAAQANSERQASIQEDNEESPEETELLSLCRTSNVPSPEHAHSLSTPSRSCSSSSHSLIHSLTQSSPRSSPVNQFRPITLCAVPSQSQLSMPLAMPLPNRNVTVSVDSLLNPVTTCNVYHGKRFLEPLENLAQTSASFSSSIFRLPTPIATPTRESPEDPDWPAKTFSQLLLERYSSQSQSLGNNSSTESSSLSGGATPTPTPMSSLDELVTPLLLSFASPSQPMLSAHGIGEGQREQGSDSDATVCSTTSSMESL

SEQ ID NO: 6544 - DNA, 8568 bp, DROSOPHILA
tgctatctatatagcgaaagaaaagacctctactgtaaatcgaaaaatagacagaaattcaccttaagccttagttagctgacgaagcgagtggcgcacgttcgtgactttctcgccgcataaacgaacgactttccgcgctgatcgctgggggtccaaatggcaaacggctcagctccgatcatccaccacagtctggtgtttttctgagccgagcctgataagccgcgttgagatctatatataatgtagcgatgtgccacctctcctggcttgccgattcgaggggcaatggacaatggaatcgtaagcggaatctgccaaataaccgtgattatggggaccgtgctaatgagcagcgggcggactggaaggccgaggtcaatgggtgacttgggggctgataactgctttgatttggtttgcttcgctttggcccgccacctatattagcatatattctggggctttatgtacatgggattttaaatttaacctgttcgctgctgagcatataaatgagaattaaatagattaactaaaaagttgtaagttctagttgttaactagaagttgttgttttgaaaaccccagttagaagaattcgcagaattcccgtccccctctgtctgtcagattgtacattccccaccaaattgtaaggtctatctgttttgaatgtttttagcaggttcaatgaatttggccgagctcggctgataaccagggcagacacaccagcgacaacatcctcttcatcacgtgttttcaatatgctggaacttggcaatgactgccctctaattgctttcatttgtttaccgtttcagttgctgcaacatgagccgctggctttaaggagcacatcccatcagcaacagcaggagaagcagcagcagttgccacatacaggcagcaagtgcaaccggagaggagacccaatcgcaggtcaaggttcttccggaaaccaaagcaatcagcccagggcgacaccagcaacatggtacacggaccgccggctcgcagaaaatcacagcagcagcatgaggcctgcgagatggacatggagcggcagcccacaccgccagacggcggatggggatgggtggtggtcttcggctccttcatgatacacatagttagtaagtgaaagtcaactggcctcgccagtttttcagcgattaggggcgttataagcaaagcttaaactcagtactactgagtttaagaacccacggtatttactagtcgattccccgactggaatgtgcaacacccctcgaatcgggtttcaattaatctgcggaggtgccagtggggctctcgccggtggaagactggaagacttgaccaactggggttgggcaactgcgccgggtagactagccatcggcatcgccactgccaccgccaccgccacctttacggctgccataaatcaaacccaagagcatggggtcgacccggcaaccaaaagtggccaggaataaaagtattaggcatttcgtggatttttggggatcgtaaatactaaggcactctaatcgccgcaaatcagggtgttcagcgggatagattggaagtgggacttatcggcgaggtccgatccagatactgacacccgatacgctgaaggcttaggtggtggtggaggtgcagttggagtacggtcaccacttgagccgtgcgactatcaattggatgataattgtggccaagtgtccagtgcgtcgatacgcagtcgataatcttatcgccgtgtgggctgtaattgcctggttacggaaatagttgcctctcggtgggatgggggctagaacagactggtggggcatggggatcctgatgaaatgggagccctaattaattacccactaaactgatttatggccagcgcccgacaaccagtttgatcggacgaaatccactttgggcacgctcttggaatacggtcatgcttagggcatccgatatatacatacgcgtctaatcccggagtgatctcttctccctcgcagccgatggcatgacctactcctttggcatcttctacaatgagttcctggactatttcaacgagggcaaaggctacacggcttggattgcctccataatggtgggcgtgaccttctcatccggtaagctatactcagtccgatcttgaggatcaactatgattgttgatgatacatttatcctgcaggaccgatcagctcgtcgttcgtaaatcgatatggctgtcgtgcggtgaccatagcgggctccattttggccgccagctgcatcatcgtgagcatgttcgcccagaatgtcctcacgctgatcattacgatcggtttcggaacgggcttgggctttgggctcatctacctgccggccattgtgagtgtgacgcagtatttcgaagccaagagatctctggccacgggaatcgccgtctgcggctccggattcggtacgtttgtctttgccccgctcacggagttcctgatcggcaactacgggtggcgcggtgcgatgctaattatcggcggcatcgtgctcaactgcatcatctttggggccatgttccgaccgctggagctagaggcaccgccgcagacgccgccgaacacgccgagcactcccaagctggccaagaagtcggccattatcgatcagaacaccaccgcggcggagctggagcccctcaaggtcctgcctaaggatcagtacctgcagctgccgcagcgcacggatacagcggtctcggggggtgccctctgccggtccaacagcgttggccacaacctcaagcccaatctggtgagtccattaaaataagttgcgtattcgacccctttattgattttactttaactaacatgctacagaacaacaactcgaacggcgccgtcaatggacagggacccaccttggtgaccccaccgcaggcggtggtgaagagcaccagcaacgatgacatcgcccgcaaatgccacagccagttgcagctgactcctctcagggatgcgcatcgcgagcggagtgccagtggtaccatgtaccgaccggatgctctctaccaggtgggctagccgaattgagatgttcgtgtaatggagtatctaatgctattctgtcttcgtgcgcagggctccctccacaacctacccgactatgtgagctccaggaacgatctgagccgttccatgtccggctccggcgttataaagcggtacggatcccttcgccagagcaacaacgtgtcccagagtcaggtgagcttatgagaacaaatgaaacgcatatcaagtgctgattagggcttatgcatagtactaagaaacttactaggtgtgctggtgctgcaggttgtcattgcactagtataagtgtgtccctcctctcctcgaatatgatctgtaaaatccgtatactttttagccactacttattttaaatgtactcaccttgtgtgtgtgccgaaggaggactaacttgcttaacccttagtccgggcggcgcgtataaagtatataaaatgtaaaaaagggcgagaatcagaagtacttagataaatcattgaaacggcgtgcccccttggcatcctggtgcttgggtctctgaaggaagagcgagcgctactttcccccccattaaataggcccgcagcccttcgaagattcccttcatccagtcggccaggagtagtcgaagacgaggcatccaatggtgcggttctggttctggtagaacatcaaggcgatgaagggcataactaccaccgaaaaaagcctcatcattcgaaaacagggacaccccatctaggtttaggttccacttgatacggcgtcgatactccatgcagacggatatattgacactagcactataaacatgtagcagagggtccaaaacaacatcttccccctccggtcgaacaccttcatccacgataactgagtccatagtcctgtccaaaatttatccaaaattttgttatatagaacgcgaagtctgacaccggttaaaaagtagaatgacgttcgatttatttgagctgacttaaaattcaattctactagattaaaaaaaaaaaagggaaaaaaggtaacattgaaacattgtagtctagaagagatgcgccagatagcttctccaaagccagaggatcagcttgtaaagcaaaaagaggcgaagcagccggtagaggaacaccttgctgcaagaatttcacctgaagtcaactgtgtatcaaacaagaacatgtactcacatccttaagattctcttggaacgctccagagttttcggatcttctcgaagcaagtgcgttcggatactgtggagcatgttgctgcaggattggatcaccaggccatggatgtccggatggttgaaggcatcgaagttgaatgcagaactggagcagaaaggattgaacggtgatatggggctactaactagctactaagtggaccgcacgtacccctcgccgtgcttggacagcgtctccatgtccgaaaccccgggactgtcccaattgttgaacatgaagggctgcatcacctccagcgtttggtaggccttgcgaaccgcactcatcagcacgggcttctgaccgaaaatccttagaagcaagtcgagaataagggccggcaggatctgcttggtaaagacgagaaactggtaggcccaccgtttgtccgtgtagtggcagcccgggatcatcaggttcttttcaaatgccacatcccgccacaagtccagcgtgtccatctgctcggcaatctgggtgaaggtgtgcggcacgtgggtgcaagacgaggacaggaaaactggcagatcagccggtgggccctgcctgtaaatatcgtagcccattttggtgtaacacagcatgctcttgatgccaatgtcctgcggcgtgatgtccaatcgaatgtccttgcccaggtaaacagtcttgaggattccagcgccgaccagcgcgaacagtcccatggcgcccatcaaggatggcgagaatccgggcgatgggtcctccacggcaaagagaactggaaaaagctttttgtaaatcagggtcttagggatttgcagtcctttgattacctatggaaggacgatacactattactggcagccgatggcggtagtcattcaccagggattcggccaggtttttggtaaacgtatacgtgttgggaaagcccatgatcaacctggggcagggagccatgagataaccaaatgatatagcattatataaagtgcatcctggtaaaacacaggtcgatagccaagtgtattccttaccaaaggaatcaatatggaggcaagacttactttcttgttaacgcgttgagcatcccgtcgtctgcgacatcgtcgatcattcggaggcacaaccgccagtccatcggcgaggagtagtactgcaagtatcagagccacaaagtcagggaaacaagcaaggtagtccaggatccgtaacacacccaccttgggctccacacgtgtcaaatagggattactgtagaatgtggaaacgtggatgaaggccctcagctggggcagagtctcggcgaacttaagcgcctccaaggtgcctccgacattcagacgtactgcctcgcgaagcggctcatcgaatcgcaccgtggcggcacagtggtagaccagggaaacacctttcatacgctgcatcatcgagggatcgatgcccagtcccggcaaagagacgtcgcccgggaccgccacgatcttgtccagctcttcgggtttttgtacggccagtacgtggaagacagtggcctgccgcagtcggacgagtctctgctccgctgttagctgtttgcgaggacgcagcaggacgtagatgcgccgaacgttgcaggagcgcaggagcttctcgaccagcgccttgcccaccactcccgatccgcccgtcacgaatatttcgctatcctcgaagaattcctccatttccccggatagtggatggtgcattgtgattcactgaccaaagcccgcaaagcaatggaacgcagctccaggggtcgatccgcttaactgaacgctagtcggcgcgcgttcattaaatccgtgatttgataaacatgagctgcgccactacatttcatgctaatttcgggctcaatgcgatcgtaagcactttacagttgacagtggcccggcaatcccggatcgggctgaccttaagcgggttccacttccaatgaggtggagctgccgtactccctgcacttaggttaataatatataggattgatgatgataagccgattcatccgtttcaggaggaggccaaatgctgtggctgcatcacttgctccaaggagacccgcgacacattcgccgaaatgatgaacttctctctgctcaaggacatggtgttcgtgatcttctccgtgtctaatttctgcacgagcattggcttcaacgttccgtacctgtatgtggtcgcctacgcggagaccctgaaactcaccaagacggatgccagctatctgatatccacgattggcgtggccaacacagtgggccgcataatcctgggctacatatcggataaaccgtgggtgaaccgcctcctggtctacaacgtctgcctcaccgcctgcggagtttgtaagtttgtgatctgatcggcgcgaccttcagactaatcccatcctgctcctccgttccctttccactagccactgccatggtgccgctatgccacgacttccaatccctggccttctactgctgcgtctttggcttcacgatcggcgcctatgtgggcctgacctcggtcattctggtggacctgttgggactggacaagctgaccaacgcctttggcctgctgctgctcttccagggtattgccagcttcatcggtccgcccatcggaggtgagtactcgccatagctggaagtagtgctatgtgtctgacctttgctctccaggctggatgtacgacctgacggactcgtatgcgccggccttcctgatggccggactcatgatcgccatcagcggactggtgatgttcgccattccgccgctgcagcgcctgcaggttcgcaagtcggagcgaaagccccacaccgagcacctggcccttagttagtagttcaccgccacccatccaccacccacagtgccctgtttattcctactccatatttttttgtttttttttctactgtaactataaatctagatacgtactgatgcacacgacacttggttagattaagtcctagacctaggccagccatgtaccgaggtatgcgtgtatgccgcagctatggcatatccgaataattgtgtacgggcgactgtcaccgaaccgccggcttctgtcccccgagccatgacctctgaccccagaccccagacccctgacccctgaccccagaccccattaaaggcccccattgcaagtgcatgcaaatgtatgcctacacgtacatgtacccataccaaattattgttattctattatgactgtatgcctgtgcgtgtgtgtccgtctgtgtatgcgccattaaagaaagcttttgtacaacaacagaaaaccacaaaagtccattttgaaatcgattggctgaaaaaccacacatgcccctgacaatgggaatatgaaatgtgcgggtaagtagcgttgtgcttgaaacaatctattttttacgaaatcaaatacgaaagatacaggctctagaaattcatacgcgttaagattactgcaatcagttttggccaatagccccagaaatgcaatagataatccatgtaccatataaatcacatgccatatacatactgcccagtcgacttgctcctcgtcaacacagcattcctttcacatactacagtgcttgccaagacgatcccaaaaaaacgaatgagagcccagagaatctacatcgtggcaattttcaacttgttggtcaatcgcagaccggtgatcttcgtggctagttggctattcatatttattgtcagggcacagaggcgttcctcgaaaggggtccacatacagaacggattgcagatatagttcgaaaggattcggtgtttattggattcttaagtgactacgaataaaatagcaacaaagggctcggatgcgattcacgccaccccgaaaagtacgcattcacaaaagcactcactcattcacacctaaaaaaaaaaaaatgaagttttgaagctaaatatgaatcactgaatctccccggtgatcagcttctttagggtacactctccggctcccagcttgtggaggatggccaacacttcctcgcggtagcgatccatgtggcccatctcctccggagtgtactcctcgtggtcgaaccgcgtcatcctccagatcacattcagcttggcctcgatcagcacgtagttcgaggagggacagaagcgcggacacagctcgttgatgaagtggatcatgtcctggacactgcacgagttgatacggttattgatggtgttcagcgcgaagtcctggtacttggccatctttgcgtgcgggaacacgttctcgcaagtgatgcaccgcc

SEQ ID NO: 6545 - DNA, 2322 bp, DROSOPHILA
atggtacacggaccgccggctcgcagaaaatcacagcagcagcatgaggcctgcgagatggacatggagcggcagcccacaccgccagacggcggatggggatgggtggtggtcttcggctccttcatgatacacatagttaccgatggcatgacctactcctttggcatcttctacaatgagttcctggactatttcaacgagggcaaaggctacacggcttggattgcctccataatggtgggcgtgaccttctcatccggaccgatcagctcgtcgttcgtaaatcgatatggctgtcgtgcggtgaccatagcgggctccattttggccgccagctgcatcatcgtgagcatgttcgcccagaatgtcctcacgctgatcattacgatcggtttcggaacgggcttgggctttgggctcatctacctgccggccattgtgagtgtgacgcagtatttcgaagccaagagatctctggccacgggaatcgccgtctgcggctccggattcggtacgtttgtctttgccccgctcacggagttcctgatcggcaactacgggtggcgcggtgcgatgctaattatcggcggcatcgtgctcaactgcatcatctttggggccatgttccgaccgctggagctagaggcaccgccgcagacgccgccgaacacgccgagcactcccaagctggccaagaagtcggccattatcgatcagaacaccaccgcggcggagctggagcccctcaaggtcctgcctaaggatcagtacctgcagctgccgcagcgcacggatacagcggtctcggggggtgccctctgccggtccaacagcgttggccacaacctcaagcccaatctgaacaacaactcgaacggcgccgtcaatggacagggacccaccttggtgaccccaccgcaggcggtggtgaagagcaccagcaacgatgacatcgcccgcaaatgccacagccagttgcagctgactcctctcagggatgcgcatcgcgagcggagtgccagtggtaccatgtaccgaccggatgctctctaccagggctccctccacaacctacccgactatgtgagctccaggaacgatctgagccgttccatgtccggctccggcgttataaagcggtacggatcccttcgccagagcaacaacgtgtcccagagtcaggaggaggccaaatgctgtggctgcatcacttgctccaaggagacccgcgacacattcgccgaaatgatgaacttctctctgctcaaggacatggtgttcgtgatcttctccgtgtctaatttctgcacgagcattggcttcaacgttccgtacctgtatgtggtcgcctacgcggagaccctgaaactcaccaagacggatgccagctatctgatatccacgattggcgtggccaacacagtgggccgcataatcctgggctacatatcggataaaccgtgggtgaaccgcctcctggtctacaacgtctgcctcaccgcctgcggagtttccactgccatggtgccgctatgccacgacttccaatccctggccttctactgctgcgtctttggcttcacgatcggcgcctatgtgggcctgacctcggtcattctggtggacctgttgggactggacaagctgaccaacgcctttggcctgctgctgctcttccagggtattgccagcttcatcggtccgcccatcggaggctggatgtacgacctgacggactcgtatgcgccggccttcctgatggccggactcatgatcgccatcagcggactggtgatgttcgccattccgccgctgcagcgcctgcaggttcgcaagtcggagcgaaagccccacaccgagcacctggcccttagttagtagttcaccgccacccatccaccacccacagtgccctgtttattcctactccatatttttttgtttttttttctactgtaactataaatctagatacgtactgatgcacacgacacttggttagattaagtcctagacctaggccagccatgtaccgaggtatgcgtgtatgccgcagctatggcatatccgaataattgtgtacgggcgactgtcaccgaaccgccggcttctgtcccccgagccatgacctctgaccccagaccccagacccctgacccctgaccccagaccccattaaaggcccccattgcaagtgcatgcaaatgtatgcctacacgtacatgtacccataccaaattattgttattctattatgactgtatgcctgtgcgtgtgtgtccgtctgtgtatgcgccattaaagaaagcttttgtacaa

SEQ ID NO: 6546 - protein, 626 aa, DROSOPHILA
MVHGPPARRKSQQQHEACEMDMERQPTPPDGGWGWVVVFGSFMIHIVTDGMTYSFGIFYNEFLDYFNEGKGYTAWIASIMVGVTFSSGPISSSFVNRYGCRAVTIAGSILAASCIIVSMFAQNVLTLIITIGFGTGLGFGLIYLPAIVSVTQYFEAKRSLATGIAVCGSGFGTFVFAPLTEFLIGNYGWRGAMLIIGGIVLNCIIFGAMFRPLELEAPPQTPPNTPSTPKLAKKSAIIDQNTTAAELEPLKVLPKDQYLQLPQRTDTAVSGGALCRSNSVGHNLKPNLNNNSNGAVNGQGPTLVTPPQAVVKSTSNDDIARKCHSQLQLTPLRDAHRERSASGTMYRPDALYQGSLHNLPDYVSSRNDLSRSMSGSGVIKRYGSLRQSNNVSQSQEEAKCCGCITCSKETRDTFAEMMNFSLLKDMVFVIFSVSNFCTSIGFNVPYLYVVAYAETLKLTKTDASYLISTIGVANTVGRIILGYISDKPWVNRLLVYNVCLTACGVSTAMVPLCHDFQSLAFYCCVFGFTIGAYVGLTSVILVDLLGLDKLTNAFGLLLLFQGIASFIGPPIGGWMYDLTDSYAPAFLMAGLMIAISGLVMFAIPPLQRLQVRKSERKPHTEHLALS

SEQ ID NO: 6547 - DNA, 5522 bp, DROSOPHILA
ttgtttcgcacacaaaagttagtttatttctttacttttggtcggcactttttgaaatattcaaaaactaggttttttcacttgctcggacgtccgctctctacgactttcacacagcttatgattcgtttcgcagccccgctctggtatttataggcaagctgactggaaattcgccgcctgctctctcgatcactcggacggtaggttactttgttttcgctctctgccgcttaaagtgattttggtcaacagcctttagacaatttccaatttccccaccaacacactcgcaaataagccagtctgcgtacacagatatttacatatgtatgcgacttaatgcatcttgaaagttcctagaatggaaagggctgatgaaaactaatagtaaacgttattaactttttgagtacaaactttaaagatataagataatatacacaattatacaaataattgtcatgactttctcatactaacattccagtgtacatgtattcaaatgtaccccgtgcataaatattaaaaaaataaattgtacaaagtcattaaaagcaatcctttaaaataacacaaaaaccctttctcaagaaaatacatgggggtccgcctttgtgacctaaattaagccaatttccgaccagtgaatgtaagggtacagagaaattcaaatgtatttactcaatttttatttatttctgtatagtttacccctacatatgaacattttttttatttatactttaaaaactcttaaaactaaacaaaataaagtttttcctataaaaaattgaagattttttggaattggtagcttcttaccataaaatagttccaagttacacgagatttcattaagttgctttatattaagaaataaattaatgtatttatggatacaaatataagaaatgttttacaattatggaatttaaaaaaatgctaccctaatatttatttatgtccaaagccccttaaagacagaatgaaatggaaattttatttatacaatttcgtttttattaggctttttttttcttgtttagttattgttcttctaaatgcaattcagtgtcctcaaacgaaatacgacgccagttgtcccatcttatccttggccactcgactgccacgcaccccgcccccagcattaggtccaccgccagccgtaaccgctcctccggagccaaaagccgccccgcccattccgccaccgcctcgacctgccttgccgccacggaagccgccgccactgcgaactggtctggatgccaccgcccgatgcttctcgaccaagtgcgagaagtctgcggagcagaagatgcagccgctcttctcctcgcttccgtccttgaacttgctcttgtccgacttgtagaccacattcacctgctgggcgccacactcctggcacttggcctctgcaaaatataatcaaatgtttgtataatcgtctcacaaatgacataaggggggttgtgtgagggtagcaacgccaacgtaccttccaccgtgatcttggtggctcccttgaagcagttgatgatcacgtcgcagcgattgcagcccagcttccaggttggcgcaagcgtacaatcgagcaccaggaccccggtggggcactccacgcagctggagatgcccagcgtgttcagcgagtgcgggcagttggcgttcgtgcaggtgttgcagccccccaagtggggcatgtcgctgaacggcggatggttgtaacagtacgggcagaacggatacgaacgccccttcacgccagtggagaaagccagcagatcaaagtcgtccagcgggcacttgaactcgcgatacaccttcacattgccaatgggcagggcgtatgtctcatcgcaatgagagcagtgcaatctcgccggtttggtctgcaattaaacgttagcagggagattacaagttgaacggtgactgacaggcagattgacccacctgtatgtacttcatgtagcgcctacacttgccgcagcgcgagtgcgccttgcccgactcggccagcggcgagaaggatacctcaaacagtgcgtccatgctgtcgatgttcttcacaaagtacataaacttcagcttgaaaatcttgatggcgtgtcgcagaacatcctgaaagttagccgatccctgggcaatcagtgtcagcatgcgctccacctccgttcgcatggtgggcagcaccagttccggatcgatcttctgatagccgtggaccagcacaatgcccagcgtcgttggcatcagcttgcgaccgttctcaatgtgcacatagttgcgctggcagatgttgttgatgtgcaccggtatggaggcatccgtcccgatgccgtgctcctccatcagtgtgattagctccgattcggtgagataatccggcggtcctgtctggctttcgataagtcgcacatcgttgatggccacctgagtgccctgaacgaacggcggctggggttcgtccttgccgaaggccgaccacgtcatcaccttggtgaaaccggcatcgatcagcacactggccgtgcaactgaatgtctccatgccaacactcagctttgccgtcgtcacgcggtacttaagatccctcgacaccgtgcccatgaagtgccggcagatgaactcgtagacacgccaggtgtcgcgatcgaagtcactgcggttgcccagtttcattggcgtgatgggtggatggtcgccggcatccttgccctttcgcggcgtctgaatgtcgcccaaaatggagcgcgcctcctcaccgaagtccgccgatggcttcagcacgtgcagcacggccggcagatcgaagttagtcggatactgattggtctctgttcgcggatagctgatgtagccctgcgtgtacaggcgctcagctatctgcatcgcctggaagggtccgatgcccagtccggagctgcagatacgcatcagttcgacggtgttcagtgcctgtggtttgctcttgtaggcctccttgctggccacgctctccacactgaaaaaagaaaagagaggaagtggtcactagatggaaagggaaaagatagtcaattcttggtgagctttcttaaattctggggatcagcagcattttgtttgtttgcattcgttatgaacacaaacagaaattatgctaattcggcatgattgcttctctggcagatacatagatgatgtaggcaccagatttggaaggaatggcgtaatgggtggaaaaaaaagagtcagctgtctttcgagtgaccaaaaagtggttataagcaaacggaaaagtgacgaaagcatgcttatttatagactagccgtagtgacagcagccatgattaggtcttacgtggccttcttgtgctccttgacgcgattcagcagcatgatggcgatgtccttcttgaagacccgaccgcgcgcccattcaagcgtgacttccggctggccggcgaggagctgcagatgccagaagctctccggcttaaaggtctggatgtcgtcgtgccgcttcacgcagaaaccgagcgtgggcgtctggcagggaccgtaggagatcagcgacgaatccaggtcaccgtagcgatcctgaaagaacttcgtttgaaagcgggtaaaggcgcagccaatgcgcaggtccaattcctgccgggcgtccaccgacttggcctcgttctcgttgggatgccccaacgtctccatggctttcttgatgtccttctccgtgatagccgagaagtgggcacggtatgtcacctgatcgctgtacacattgttgatgacatgcttcacggcgtccatcacctcgaagcagatgttctcgccctccttgtcgcaatccagccagagcaccagatagtcacagccgcgcgcctcgtgggccagaaatttgcgcatgttctgcttgggattcgtttccttcttttcggtggcacaaccgaagagctggatgggatccaccttgtcccagcagttgtacttcttattgaagtccagcgacatgacatgaccgcacacggaagtcatccggaagtggacgctgccctcgttccgaaagttgcccgtccactcgtgcgtggagcagccgttgccggtgcctggagaggattacatacaatttcggttgcttgctgagtttgggagttcgtgttgatctactggcacttaccacgcttggccgtgcagcgtccgtttgagagaatccccgccagcgaggccgccagcgagggcttctcggccaccatcagcacgctcttcatggcccaaatccaagtcccgcaatccaatggcctatataattgatgatgagatttttgcagcgcttcctcctgcccactcgttcactcgcatgggattcgccggtttcgtgctgcacacacactcacacaaacgcacacgcacagcataaacgcacacgaacacgggctaatggatgaattggacttcctcgctatacatccgtataatcccctctatttaacaaatttcacgggcattattttccagccaataatacggtctcactgccgttggcagcaacagggtcacactacattctaacgaatgcatcaattggtcataccgcagcgtgcagccctggtgagcagatcttatcgctcgtcgataccagtagtcagtagttgtgcaaacctatcggtggctatcgaatcgagtcgcaagaatgtgcacaacaatttcgttcgcggaacccgaaatcgtgctcggccatggccgcagggtgctcttcgtgaaccccgacgacctgcagatattcaaggagatcgagctgccgcccgaccttggcctgaaaggccatacatcccagtcgcaggaatcgtgtacagccgcagcagccgcatccacagccacagccgcatccggtcaggcaccgggtggcaaggagcaacagcttgccaatcagccagaggagggcggaacctctgccagcgcctccggtttgggatgtgccaccagcacatcggtacagaatgtggcctactcgccagacggacagctgctggccgtgaccaccagtggaaaacagaaagctctcctgctctatcgttcacggccggagaacgcccgcctgctctccgcccgcccactggcccgggcgtccagtgccctgcgcttctgcagcgacagcagctccattctggtcacagacaagactggcgattgctatcagtacgactgcgttgaggtggaggctccgccgcgcctgctgttgggccatttaagtgtggtatacgacatcctgtggtcggaggaccagcagcatatcatcacctgcgatcgggatgataagatacgcgtgaccaactatcccgccacctttgacatccacagctattgcctgggccacagggagtttgtctcaggcctggcactgctcacggagcagcatatcgcctccgcttcgggggacaagaccttgcgcgtatggaactacattcagggcaaagagctgctgcagcacgagctaccagcaccggcggttcgtttattggtacgcc

SEQ ID NO: 6548 - DNA, 2965 bp, DROSOPHILA
gtattattggctggaaaataatgcccgtgaaatttgttaaatagaggggattatacggatgtatagcgaggaagtccaattcatccattagcccgtgttcgtgtgcgtttatgctgtgcgtgtgcgtttgtgtgagtgtgtgtgcagcacgaaaccggcgaatcccatgcgagtgaacgagtgggcaggaggaagcgctgcaaaaatctcatcatcaattatataggccattggattgcgggacttggatttgggccatgaagagcgtgctgatggtggccgagaagccctcgctggcggcctcgctggcggggattctctcaaacggacgctgcacggccaagcgtggcaccggcaacggctgctccacgcacgagtggacgggcaactttcggaacgagggcagcgtccacttccggatgacttccgtgtgcggtcatgtcatgtcgctggacttcaataagaagtacaactgctgggacaaggtggatcccatccagctcttcggttgtgccaccgaaaagaaggaaacgaatcccaagcagaacatgcgcaaatttctggcccacgaggcgcgcggctgtgactatctggtgctctggctggattgcgacaaggagggcgagaacatctgcttcgaggtgatggacgccgtgaagcatgtcatcaacaatgtgtacagcgatcaggtgacataccgtgcccacttctcggctatcacggagaaggacatcaagaaagccatggagacgttggggcatcccaacgagaacgaggccaagtcggtggacgcccggcaggaattggacctgcgcattggctgcgcctttacccgctttcaaacgaagttctttcaggatcgctacggtgacctggattcgtcgctgatctcctacggtccctgccagacgcccacgctcggtttctgcgtgaagcggcacgacgacatccagacctttaagccggagagcttctggcatctgcagctcctcgccggccagccggaagtcacgcttgaatgggcgcgcggtcgggtcttcaagaaggacatcgccatcatgctgctgaatcgcgtcaaggagcacaagaaggccactgtggagagcgtggccagcaaggaggcctacaagagcaaaccacaggcactgaacaccgtcgaactgatgcgtatctgcagctccggactgggcatcggacccttccaggcgatgcagatagctgagcgcctgtacacgcagggctacatcagctatccgcgaacagagaccaatcagtatccgactaacttcgatctgccggccgtgctgcacgtgctgaagccatcggcggacttcggtgaggaggcgcgctccattttgggcgacattcagacgccgcgaaagggcaaggatgccggcgaccatccacccatcacgccaatgaaactgggcaaccgcagtgacttcgatcgcgacacctggcgtgtctacgagttcatctgccggcacttcatgggcacggtgtcgagggatcttaagtaccgcgtgacgacggcaaagctgagtgttggcatggagacattcagttgcacggccagtgtgctgatcgatgccggtttcaccaaggtgatgacgtggtcggccttcggcaaggacgaaccccagccgccgttcgttcagggcactcaggtggccatcaacgatgtgcgacttatcgaaagccagacaggaccgccggattatctcaccgaatcggagctaatcacactgatggaggagcacggcatcgggacggatgcctccataccggtgcacatcaacaacatctgccagcgcaactatgtgcacattgagaacggtcgcaagctgatgccaacgacgctgggcattgtgctggtccacggctatcagaagatcgatccggaactggtgctgcccaccatgcgaacggaggtggagcgcatgctgacactgattgcccagggatcggctaactttcaggatgttctgcgacacgccatcaagattttcaagctgaagtttatgtactttgtgaagaacatcgacagcatggacgcactgtttgaggtatccttctcgccgctggccgagtcgggcaaggcgcactcgcgctgcggcaagtgtaggcgctacatgaagtacatacagaccaaaccggcgagattgcactgctctcattgcgatgagacatacgccctgcccattggcaatgtgaaggtgtatcgcgagttcaagtgcccgctggacgactttgatctgctggctttctccactggcgtgaaggggcgttcgtatccgttctgcccgtactgttacaaccatccgccgttcagcgacatgccccacttggggggctgcaacacctgcacgaacgccaactgcccgcactcgctgaacacgctgggcatctccagctgcgtggagtgccccaccggggtcctggtgctcgattgtacgcttgcgccaacctggaagctgggctgcaatcgctgcgacgtgatcatcaactgcttcaagggagccaccaagatcacggtggaagaggccaagtgccaggagtgtggcgcccagcaggtgaatgtggtctacaagtcggacaagagcaagttcaaggacggaagcgaggagaagagcggctgcatcttctgctccgcagacttctcgcacttggtcgagaagcatcgggcggtggcatccagaccagttcgcagtggcggcggcttccgtggcggcaaggcaggtcgaggcggtggcggaatgggcggggcggcttttggctccggaggagcggttacggctggcggtggacctaatgctgggggcggggtgcgtggcagtcgagtggccaaggataagatgggacaactggcgtcgtatttcgtttgaggacactgaattgcatttagaagaacaataactaaacaagaaaaaaaaagcctaataaaaacgaaattgtataaataaaa

SEQ ID NO: 6549 - protein, 875 aa, DROSOPHILA
MKSVLMVAEKPSLAASLAGILSNGRCTAKRGTGNGCSTHEWTGNFRNEGSVHFRMTSVCGHVMSLDFNKKYNCWDKVDPIQLFGCATEKKETNPKQNMRKFLAHEARGCDYLVLWLDCDKEGENICFEVMDAVKHVINNVYSDQVTYRAHFSAITEKDIKKAMETLGHPNENEAKSVDARQELDLRIGCAFTRFQTKFFQDRYGDLDSSLISYGPCQTPTLGFCVKRHDDIQTFKPESFWHLQLLAGQPEVTLEWARGRVFKKDIAIMLLNRVKEHKKATVESVASKEAYKSKPQALNTVELMRICSSGLGIGPFQAMQIAERLYTQGYISYPRTETNQYPTNFDLPAVLHVLKPSADFGEEARSILGDIQTPRKGKDAGDHPPITPMKLGNRSDFDRDTWRVYEFICRHFMGTVSRDLKYRVTTAKLSVGMETFSCTASVLIDAGFTKVMTWSAFGKDEPQPPFVQGTQVAINDVRLIESQTGPPDYLTESELITLMEEHGIGTDASIPVHINNICQRNYVHIENGRKLMPTTLGIVLVHGYQKIDPELVLPTMRTEVERMLTLIAQGSANFQDVLRHAIKIFKLKFMYFVKNIDSMDALFEVSFSPLAESGKAHSRCGKCRRYMKYIQTKPARLHCSHCDETYALPIGNVKVYREFKCPLDDFDLLAFSTGVKGRSYPFCPYCYNHPPFSDMPHLGGCNTCTNANCPHSLNTLGISSCVECPTGVLVLDCTLAPTWKLGCNRCDVIINCFKGATKITVEEAKCQECGAQQVNVVYKSDKSKFKDGSEEKSGCIFCSADFSHLVEKHRAVASRPVRSGGGFRGGKAGRGGGGMGGAAFGSGGAVTAGGGPNAGGGVRGSRVAKDKMGQLASYFV

SEQ ID NO: 6550 - DNA, 2633 bp, DROSOPHILA
cgccctacccatcaagtcaaccagccaacagccactagcaacatctgcagcagcaacatgaagttcttggtaagcagcaacaccaggacattaggataccaggataccaggacaccggtcaagcaaacgagtggacttttttttgagtgacagtttatccaacaaaatacaagttatttaaaattgctggaagtgctctggctacaatttgaaacaaatcatttgttaacatcgtttcaaatgtttcatataccgaacctttttttctctgtgcagtgcgtgttcgtcatcctggccatttgcttcatgagcacctgggcagcagtttcggagcctgctcctgaagctctggagccggagccatccgccgtggatgagaagaagacggagaagagaggcatctacgggttcggccacggctatggcggctacggcggatacggcggatacggtgcctatggacacggtcactacggcggctacggtggactgagcagtccctactacggcggctacggatacgtccatgcggcgccctactacggcggacaccacggctactatccgtaccaccatggccactacggcttctactaggaccactacctatccccaagatcgtaatgcatactgttttttttttctcgatcgctccatgctcatcactgcaccatcattcgtatatgtatatgtactggttttcccccatcattcaccgcaatataaatgtactgcaaatagcgaatacattactcgcatgtctttgaatttgggttggatgtagtacaaatatgatatatgtacatatgtaaacaaagttaaatcctactcaacaataaagaatcgattacattgcatatgtatgacagtaaaagtgattttcggtcactctatgggggccagtgaaggtataaagccgctattggcccagtgactgttatacaaaagtcactgttctaattgcgatcggcgcgtgaccaccagtctttcggatcatcagcaaaaatcaggaattcgacttcgagatgctgaagcgcgatctgcagaaaatcacactcaagctgtccgatctcaaggactatgaggttgcccgccaaaagaacaagttaaagggcgccccgcgacctaggctttctcaggacgccctccccggagacgacgcctccacttcgggaacaacggcaagttgcagttccaacacggaaacggccacggaaaccgcatcgggatccggatcagggtctggatcgggctcgggttctgggtccgggtcgtacattacgggaatgggctaccgttcggagacaccctcctccgcatcgtacaccacgtcgacgaccccgactccggccactcaggaggagatactgagaccctcgtccgccgtcacggccaccacaaccactggcaccactaattccggctccacggatgacgtgagcgtggcggccgtagtggatgacacggataccattgacgaaatcagcgatgacaactgggtggacctgaatgcggacaccaacgataccgttgatacccagccggaggagcaggaccaactgcaagaggtggaggaggaggatggggctaggggaggagtgtaatcctgaccgcttatcgcgttatgaaaacatagcgcagctgacttcaaagcccaccccccccccccccatttcacattccatttatcataacaatttgtatacgtaaacaagtataataacccattgcatgctccacttacctagctgctaataataatagtttgcaaggttatatgtcgcttatgtcatcttcaaatcgaaacatatgcattttatagatttggttaactacggtaaatggttttgcggccttttaatcgggaggacgtgcgatcggattatatcgagtggggaatgcgggtcctcctaattggctctcctcagaaggagctaggcaagcggcagacgacaacaagtggcttatggccaccggcaacaggtggacgcagtggagtgggcactagggactgttgtggaacgagatgctattcaagcgcccaaggggtacgtgcaacgtgacttgagccgtacaaagcggaggagggggtggcctccaacggagctgcctccacgaaagcttccctcaaaagctgaaaagctcgcaggcatcggcgctgcattcaaaatacgtggccatactgttttcgggcggcaggctggccaaaacggcggtttgaactcaatcccatccgattcggctcggctcggcagtacggagcacggcaaacggacgacggaaagtggatagcggatagcggatggcggatggccggccttccgccaattacgggtcgctggagtccacggccaagcgattgtcaattaattactcgcctaggttcgatatccaacggctttggttactgtgttccgtggtacaagtgcccgtctcagcttccgcatccgtgtaccgtgcgcatcggtatcggcatcccaagcggcatcggtgaccgtgacccaaggatcgaccggtagcatcacgtgccacgtgccggttcatcaaaaagtgcaagggtaagtggccatgtgcacggtgatgaggaagttctgccctccttcggacgtagcaaatacctcttactccaaggg

SEQ ID NO: 6551 - DNA, 633 bp, DROSOPHILA
caaaaatcaggaattcgacttcgagatgctgaagcgcgatctgcagaaaatcacactcaagctgtccgatctcaaggactatgaggttgcccgccaaaagaacaagttaaagggcgccccgcgacctaggctttctcaggacgccctccccggagacgacgcctccacttcgggaacaacggcaagttgcagttccaacacggaaacggccacggaaaccgcatcgggatccggatcagggtctggatcgggctcgggttctgggtccgggtcgtacattacgggaatgggctaccgttcggagacaccctcctccgcatcgtacaccacgtcgacgaccccgactccggccactcaggaggagatactgagaccctcgtccgccgtcacggccaccacaaccactggcaccactaattccggctccacggatgacgtgagcgtggcggccgtagtggatgacacggataccattgacgaaatcagcgatgacaactgggtggacctgaatgcggacaccaacgataccgttgatacccagccggaggagcaggaccaactgcaagaggtggaggaggaggatggggctaggggaggagtgtaatcctgaccgcttatcgcgttatgaaaaca

SEQ ID NO: 6552 - protein, 192 aa, DROSOPHILA
MLKRDLQKITLKLSDLKDYEVARQKNKLKGAPRPRLSQDALPGDDASTSGTTASCSSNTETATETASGSGSGSGSGSGSGSGSYITGMGYRSETPSSASYTTSTTPTPATQEEILRPSSAVTATTTTGTTNSGSTDDVSVAAVVDDTDTIDEISDDNWVDLNADTNDTVDTQPEEQDQLQEVEEEDGARGGV

SEQ ID NO: 6553 - DNA, 4142 bp, DROSOPHILA
atcgttaattgacttgaattgcggcaccacattcagatagcggaaagtactgcccatctggtccgtgaacaggaagtccgcggaagccaccatatgtcctcgattaatcaccaagtagttggcattttgcaagtaggactggtcatcaccgtaaatgcatttgaacgcaaaatagatgttggacttcatgtaggcagcagcctcctgcggactgaacatctcatccgccacaaactccacaaatggccgcttcggaactataactccttacactatactaggggttcaaaaggccaaactttgtgatttactcacaaaacgttttgtagtagacatcgctctgcgagtacacgagtcttccctgcccgcaatcgaaacatgtgcgatacagctccagatccttgccatctatggtatatcccacggcatacaggttccccgcacaatccccatcgcgaatatgcttggtcaccggttgcattggacttaaacagcgcatgggcagtgggaccgagaactgtccattgtcctggcaaacagtttctttgaaaaccgagggactgcagtacacgagtagagtgacaccggatggaactgtttccaagcgctgcagctggatagatccgctcgcatcgcgataggtgaaaattccattggattgctctaccatatattgtaaaatttgacaatcgccgtgcacttcccaagctgtcgatcatgtgccaaatcatgtgccaaattcacaatcttaaaaaataatttttcaactcacccagaaagcatatgaaatatatgtaaataaataatgtgatataggagcaatccataggagcaattttcatatactatgaaaattttgaaaaaatgccaaataaagaagttaaatgtactaaattcctaaatcggaagcttctatcgatacattctagttagcagttagttcaacatactattttatagaagccatttcggaagcaaatttcggaacctattaaataagtaaccacattttttttgacagtccactcgtggataacactttattgcttctatcacatacaaaagttgttgtttggttgctagttgaactctgcttcgaaacaattgatcaattcttgtattcgtggtactgtacttcaagataataatcagtatttaaatttttttttgttttttgggttttttctttctacttcaaacaattgatattgatgtggttctacaaacaaatatataatagttctttatgtgataagcatacgccataacgataaaagaaattaaaagtaggaaaagaacgaatcgaaatccaatcgcatcggagaattaaatgtgcatatgtagtcgtatatcgtaggtggtataaaatacatataaaataaacaaaacttaaaatgagaactgaaaacgaaacttaaatattttgcactagttctttaacaaagattttagggaacagggttagaggctgcttgctttttacttgttcaaaattgctgcgcgaaatctcatacaaattaaaacctatatagaaaacggtttcgatgtgccatcttactgcgtgtaaatgctataaactatacttgattgctcgggtggtctctactgcagtgcatacgcgttgccagaacatcgcttagttgttgtcctgcttgttgatcagcttaaggatcaccttgccggcctgcacctccagcgcgtagaggctgccgtccttgatctcgttgttcagcacctcgtcggtgatggtcacaaggatgcccgatggccccgatatgtacacgcagctcttgttggcgtcgttgaagatattggagccgctgcccgaatacttggagtgcatcccccaattgttgaagagtgctgcagcagctgcagtggctgctccaccggctccgttctcctgggcactggccttggccatgaactcgtagaagccgggcatcttgaaaagcttctgctgcagctccttggccgtgttcgacaacaagtagatggcattgtagctgcatccatccacgctggcgtacaacgttagcctgggagcaatagttctgttggaaggatcacaattagaacaagtatttgagtttttcaatatggttacactcacttggcgcgcaaaatgttgaacatgcgaatgccatcggccaggccgcaaatttgaatcaaatcctccttggacatgctaaaaataattcgaaattataaataagtcggaagaacaaacaaatttcaaatgtgtggtgtggcactagttaaagatagaactattacatacataaacctataaaatgcatacataaagtaataacgatcaagtatctgacggagtagtccagctatctaatcaaggtatttaataatcaaaaactttatggtttgattggtcgtaatcaattggatgtgaaatcatattgttccttagctgttttcttttagttccgctatctgttatatgtctgtcaacaagataacacaactaactgattaaaaaattatatggtttatcgcttgattgtaagaaatggtaatcaaaaacacctaagtactcgtagcttagcagacaaataggggcgtgacgataattaaaacgcttttatatataagtcagtgagttggttgtaacttcaatcgaacgatgcttttaattagttttaattagttttttaatattagtttgataaaagaaaactactcgactctcctacgatttggttggcataaaattgggtcacttagaagcagaaaaactataacattaattcggttcgaattccagatcacataccgcatgatatccgctcccgagaactgtgcaaacgttgaaagataggccgtgaggcgatgattggtcagccactgcgtcacttgcgagggcgtcgattccggcattatgttctggctctgaaatggacaatagtaagtcatttatttagtaagtctgcttagggagcagtgggcaatggcacctacataatcgtccatgtcagcgggcacatgctgcggtgagaccatgtttgtggcgtccatcagcttgagggtgggcgagttggtcgatgtcaccgagttgatggctatggggctgctgctggtagccggcgatgctgcacttggcgcaaacggaagcattccatcgtacttgggtatgtgcacgggcgagtttggccaaagtttcatactgcaaggaagaggatacaggaggagattagtacaagccagctttaagtgagttcttgcagatcctacaaatccaatagagctcgttccgtatctgacgttggcaggagcgacgatccttcagatgcaagcgcatgttcacgaatgcgaggaactccagcgcggaattcacaattcgaatttcccatggtcccgctgctccccgggtaatctggtttgctcttcgccaagccttgcttagaaggcacccgatacgcccagttgcggctgattggccagacaaacccgttttcctttccaccggggaaattttacagatttgcgtctttcgccgccccccatgatttccggtttttgtggatggataatacataagcgtaggcttttctgcacctgatcgatataatcgatctcaacaatacaagaccttatacaatccccatatcattcgccatcattatctatagtgctcggaatgcaaacaaacgaaatcattgaacagagaccaaaaccaaaaaccggttaaaagcaactttaaactaaaaataacttggagcagacgcaataacaacaaagaccgcagcgcaaagtgctcttaactgatctcttagctttccactatccttcggattctctctataaatctctctggatctctttctccccatttctccggatctctcaccgatcgaggtgttctctctttatatgaaacacgtatacacccgctctcaattcgattgatctttatgattttgtgatcatgcaaatgacaaactgaatgattttcatttgctctcgttatggaaaatttccaaccaaatatctgtaaatagcgtttttctatgcacactagattctaaataaaatacatatttaatagaaccacaaaaaacaacgtgtaatcgcttggtttgtttgtttatgttttaaattcgcaaataaacagaaagcttttgatc

SEQ ID NO: 6554 - DNA, 1411 bp, DROSOPHILA
gtacgatggaatgcttccgtttgcgccaagtgcagcatcgccggctaccagcagcagccccatagccatcaactcggtgacatcgaccaactcgcccaccctcaagctgatggacgccacaaacatggtctcaccgcagcatgtgcccgctgacatggacgattatagccagaacataatgccggaatcgacgccctcgcaagtgacgcagtggctgaccaatcatcgcctcacggcctatctttcaacgtttgcacagttctcgggagcggatatcatgcgcatgtccaaggaggatttgattcaaatttgcggcctggccgatggcattcgcatgttcaacattttgcgcgccaaaactattgctcccaggctaacgttgtacgccagcgtggatggatgcagctacaatgccatctacttgttgtcgaacacggccaaggagctgcagcagaagcttttcaagatgcccggcttctacgagttcatggccaaggccagtgcccaggagaacggagccggtggagcagccactgcagctgctgcagcactcttcaacaattgggggatgcactccaagtattcgggcagcggctccaatatcttcaacgacgccaacaagagctgcgtgtacatatcggggccatcgggcatccttgtgaccatcaccgacgaggtgctgaacaacgagatcaaggacggcagcctctacgcgctggaggtgcaggccggcaaggtgatccttaagctgatcaacaagcaggacaacaactaagcgatgttctggcaacgcgtatgcactgcagtagagaccacccgagcaatcaagtatagtttatagcatttacacgcagtaagatggcacatcgaaaccgttttctatataggttttaatttgtatgagatttcgcgcagcaattttgaacaagtaaaaagcaagcagcctctaaccctgttccctaaaatctttgttaaagaactagtgcaaaatatttaagtttcgttttcagttctcattttaagttttgtttattttatatgtattttataccacctacgatatacgactacatatgcacatttaattctccgatgcgattggatttcgattcgttcttttcctacttttaatttcttttatcgttatggcgtatgcttatcacataaagaactattatatatttgtttgtagaaccacatcaatatcaattgtttgaagtagaaagaaaaaacccaaaaaacaaaaaaaaatttaaatactgattattatcttgaagtacagtaccacgaatacaagaattgatcaattgtttcgaagcagagttcaactagcaaccaaacaacaacttttgtatgtgatagaagcaataaagtgttatccacgagtggactgtcaaaaaaaatgtggtta

SEQ ID NO: 6555 - protein, 221 aa, DROSOPHILA
MDATNMVSPQHVPADMDDYSQNIMPESTPSQVTQWLTNHRLTAYLSTFAQFSGADIMRMSKEDLIQICGLADGIRMFNILRAKTIAPRLTLYASVDGCSYNAIYLLSNTAKELQQKLFKMPGFYEFMAKASAQENGAGGAATAAAAALFNNWGMHSKYSGSGSNIFNDANKSCVYISGPSGILVTITDEVLNNEIKDGSLYALEVQAGKVILKLINKQDNN

SEQ ID NO: 6556 - DNA, 3825 bp, DROSOPHILA
ctgccaactggacatagatgcctcggtgggttcctgcgccactctggtggcccagcggtatttggcagaggaccaaccccgatccactagcgtggcccagctgctgcacgccaccatcgtgctggacacaattaattttgcacccgcggccaagcgctacgggccaaaggacgaagccatggtacagaagttggagagcgagcttaaccgtaaggacgctcaaagaagtagcctttttgatgagctagtggctgcaagggcggatattagtaagctaactctcaccgaagttttgcgcaaggatatgaaggtcttgcaaaccgatcgtcaggtggttcccttagctggaatgcccatcctagtcagagattttgtggagaaaagcggcgccgaaaaagccgttcgcgagtttggcgtggagagtaaccttttggttatcctgggaatgtatgtatcacctgccgatggccaggtgcagcgtgacctggccttgatctctctctccggccaaggccaattcgttcaacgcgtccagcaagcactgatggagtctaacgatccaaaattggagttgcgacctcacgaggtggacacccgctttatgggcggctgcttcttgcgccaacacaacgtccaggccaccagaaagcacatcctgcccattgttaagcgagcgctgcttgaatgggaagcggatcacgcctgcgattgtgacgaggtgtacttcttcaaggagaagccgcagctgggactctcttaagaagagatcaggccaaacggaagcttagacaagacttagctataattttagcgcaaccgttatgttaccaacgttaagcttacaccaaaaagacatagcgaatttcccatttacgataaattgacgaaggcaagcgagtgaaatatggaagcaatcagtattccaaatttaagttactttgcaaccttggtaacataaaggcaaattagtttcagagtattcacacattaagctctatccagtttcctagttgtttatatggattaagcgattatgtacagggtatacatgggtaaaagaaagcgttatgattaataaaaaaaaggactacaactgtggctcggtatcgtcagcacctccctcctcgcccatttcgtcgtctgcacactctaatgtcatatcttccaacatctcctccagtgtgatctggggcacatcacctccagcggcctgtacctcgattggtatcgtcttgttagtgtcccgatagatgttgacctgaccgcggatatcctcgttttcctcgagatcgtcaagaaactcgtggtagtcgtacttgctgcgctcatcggtagcctccgccgccagatgcttaatcttccacacgcgctgactgagtctggtctgtcgatcgtagtgcttgcgcacaagaattacatccggaatttcatccgacgacaatttgtcgaactccagatcgttgatgttggcctctccggtgttgtagcccattacggaatcgcccaccttgagcaggtggcccaagtgggagcgtgtgtgaatggggttatcgttgatgcccagctccgaggcgcgcaccacccaaatgtcgcagagagcgtgcttgaaggaaacctgcccttgaccaggataggtctttcgatccttttccatgatcacatcaatgtccatgacgacgtactcaaccagctgcttgggattgcagacggcctcaaagggagctctgaaaaaagcaatttaattggcttactcgaagataacctttgtcaaataggagtcccacctgaaatagacctgcgaggtgagttctgcaatctgtgcggtcaggggatcaatcaagtgaatgctgctagacacccggttgaccagaaccaatggcgagagatttcccagctggtggcgcagctttttggacaggcaaactgcactgtccttcgatactggtgctatttccactgaccagttgtacttgtagttatagttgttgctgtggatgtcgtgagagatgagacgcttcgaggttgttaccttgccgggcaccatggtcaggaggaaatcaaccatgcgccgggcatgattatcattggcatagaagaaatccaggccgccatgctccggctttatgcccagagtgttctcgtgggctttgtgcttaaggatcagctgttccagatagtaaaaggttttcttgttctcggcccgctgacgaacctgcacgaggcagcgccagaagtccttggcctcggtccgatggcagtcgttgcacatctggttctgcacagtgaactccaccacgaatacctgctggagcatcgttcccccgatgatctccccatgcacagtcagcttcacctttatgcgcttggagtgctgttctgtccagatgaagccggcatccaccaacttcacttccttcaggccttttagcttcttaaggcaaatggccaagagttcgcgggactccaaggcggcctgtatccactcgttcggcggttgcagatagcgctcgcaattacgacagaagtggagcacggcctgctttgggatgttctccgtgatgtcgacatggttgcgcaggcaggtgacgcacatgttggccggattcggctggatggccactccgcactcgcagcacaggatgacggcgttcgatccggcgcccttgccgtccgctgcgcccagcgggctaaccccaacgtattcgtgatccatgaatcctccggaggtctattcggtccagctatttcacaatggcgttgtagaatacgatgaaatattcccacgaagtacacaaatttgtaaacacgtgcgtataggtgtatatcgattggccagagatcagcgatattattaatcggcgatttaagttaagccttttccagctagagtagctaaaagtgagattaacgataaaacgacgttaaacgagtgagactcaaagctaaatgggacatttggaacgatttcctaaaattcacttaaaaatatagtactcattcgactgtcttcatctttattttggctagtaaatgtacgcccaattatcgatacattcgccgccgtcatcactgacagaccagctgaggcgacggactcgactgccggaaacttttatggacttggaagggatttgccgccatgcagaagaagccgattaacaccaacacgctgctggacaagctgcaccgcggcgcggtgtatgcctgcattggagtcaccctgtacggcacctacatcctgggaatgcgctactaccactactgcacggtcatccgaccggagaagcagcaggcggagctgaagctcctggacgagggagcccacgacaaggccaaggaactgaagtactaggcgcgccctcctccgcccctttaattgttaaatgtctgttaagcgcaataaactgtaaggaaatgtaagcattttcagctgaaaacggccaacgccggttgttgttgtgtaacctcggacagctggccaaagtggaggaccgtcggcaggcccggtgggattgtaagattccagattcaagatctaaccctggaaccaagccaacaatgcgcaattagccgtctgggccgtaaatcaaactggtcggctacaatgggaaatcaatcaatcgacagcgacatggacatcgacccgttcggcggactagacttagtcaagaattataatttagctggcaatcaaatatgttgtcatctccggatcgtgaccaggtcccagtccatagaccaaaccccttggctgcttggtcttccgcttgcccaacgcgtctcgcgtgcattcacctccaatgggcagagcataaatattaaacg

SEQ ID NO: 6557 - DNA, 1765 bp, DROSOPHILA
atatacacctatacgcacgtgtttacaaatttgtgtacttcgtgggaatatttcatcgtattctacaacgccattgtgaaatagctggaccgaatagacctccggaggattcatggatcacgaatacgttggggttagcccgctgggcgcagcggacggcaagggcgccggatcgaacgccgtcatcctgtgctgcgagtgcggagtggccatccagccgaatccggccaacatgtgcgtcacctgcctgcgcaaccatgtcgacatcacggagaacatcccaaagcaggccgtgctccacttctgtcgtaattgcgagcgctatctgcaaccgccgaacgagtggatacaggccgccttggagtcccgcgaactcttggccatttgccttaagaagctaaaaggcctgaaggaagtgaagttggtggatgccggcttcatctggacagaacagcactccaagcgcataaaggtgaagctgactgtgcatggggagatcatcgggggaacgatgctccagcaggtattcgtggtggagttcactgtgcagaaccagatgtgcaacgactgccatcggaccgaggccaaggacttctggcgctgcctcgtgcaggttcgtcagcgggccgagaacaagaaaaccttttactatctggaacagctgatccttaagcacaaagcccacgagaacactctgggcataaagccggagcatggcggcctggatttcttctatgccaatgataatcatgcccggcgcatggttgatttcctcctgaccatggtgcccggcaaggtaacaacctcgaagcgtctcatctctcacgacatccacagcaacaactataactacaagtacaactggtcagtggaaatagcaccagtatcgaaggacagtgcagtttgcctgtccaaaaagctgcgccaccagctgggaaatctctcgccattggttctggtcaaccgggtgtctagcagcattcacttgattgatcccctgaccgcacagattgcagaactcacctcgcaggtctatttcagagctccctttgaggccgtctgcaatcccaagcagctggttgagtacgtcgtcatggacattgatgtgatcatggaaaaggatcgaaagacctatcctggtcaagggcaggtttccttcaagcacgctctctgcgacatttgggtggtgcgcgcctcggagctgggcatcaacgataaccccattcacacacgctcccacttgggccacctgctcaaggtgggcgattccgtaatgggctacaacaccggagaggccaacatcaacgatctggagttcgacaaattgtcgtcggatgaaattccggatgtaattcttgtgcgcaagcactacgatcgacagaccagactcagtcagcgcgtgtggaagattaagcatctggcggcggaggctaccgatgagcgcagcaagtacgactaccacgagtttcttgacgatctcgaggaaaacgaggatatccgcggtcaggtcaacatctatcgggacactaacaagacgataccaatcgaggtacaggccgctggaggtgatgtgccccagatcacactggaggagatgttggaagatatgacattagagtgtgcagacgacgaaatgggcgaggagggaggtgctgacgataccgagccacagttgtagtccttttttttattaatcataacgctttcttttacccatgtataccctgtacataatcgcttaatccatataaacaactaggaaact

SEQ ID NO: 6558 - protein, 521 aa, DROSOPHILA
MDHEYVGVSPLGAADGKGAGSNAVILCCECGVAIQPNPANMCVTCLRNHVDITENIPKQAVLHFCRNCERYLQPPNEWIQAALESRELLAICLKKLKGLKEVKLVDAGFIWTEQHSKRIKVKLTVHGEIIGGTMLQQVFVVEFTVQNQMCNDCHRTEAKDFWRCLVQVRQRAENKKTFYYLEQLILKHKAHENTLGIKPEHGGLDFFYANDNHARRMVDFLLTMVPGKVTTSKRLISHDIHSNNYNYKYNWSVEIAPVSKDSAVCLSKKLRHQLGNLSPLVLVNRVSSSIHLIDPLTAQIAELTSQVYFRAPFEAVCNPKQLVEYVVMDIDVIMEKDRKTYPGQGQVSFKHALCDIWVVRASELGINDNPIHTRSHLGHLLKVGDSVMGYNTGEANINDLEFDKLSSDEIPDVILVRKHYDRQTRLSQRVWKIKHLAAEATDERSKYDYHEFLDDLEENEDIRGQVNIYRDTNKTIPIEVQAAGGDVPQITLEEMLEDMTLECADDEMGEEGGADDTEPQL

SEQ ID NO: 6559 - DNA, 3483 bp, DROSOPHILA
actttcatctttgagggtcacgatacgacgacttcagcggtttccttctgtttgtatctgctttcccgccatgaggcagtgcaacaaaagctttttgaggaactgaggatgcactacggccaggatttattcagaggcgttattctctcggatttcgcgacgttaccgtatctaagctgcgtggtcaaagagtccctgcgtctttatccgcctattccggccgtcgcacgctgcctggaaaaggatttggttataggtgagtgtaaggtctgagaatttaagactcacctaagtcaatctacgtcaatctacaccagatgagggctacatccctgtgggaaccaacgtggtcgtacttctctggcagctcctccgggatgaagcgatcttcaccgatccactggtcttccagccggagaggcatctaggagaagaggcacccagactgagtccctacagctacatacctttctccgctgggccgaggaactgcattggtcaaaagtttgctctgctggagatgaaaaccatggtgaccaaagtgatacgccactaccagctgcttccaatgggagccgatgtggagccatccattaaaatagtgctgcgctccaagagcggggtaaatgttgggctgcggccgcggttgtattgaaaatctgggagtcaagaataaaaacaaaggatttaggatcagctggcgccagacagcttgaatctgcttatcgctatcgataacagcaaactgcaatcagctggcgcagtgatgggcaggtgtagtttttcaccgccaaaaagtgatagaaattagttcaaatttaaatgtctaaactaataccaggaattcaatataaatacaagtgcttatacatcacatatacagcagaagtcaaaccaaaatggatgcgctgccttatcagctaaatgggatcagctgaaagcacagaatgtggaataaacccaattaatgtgattaagcttagtaaacgagcgaccacagattacattactgcgttacaaacaaatgcattatatatgtatttatatacattaaagcattatctttgtaatttatttatttcagtttcgcgctgatcaatcgataaatgtcacatcgaatcgatacgcgcaactgttgaaatatatggaagctatcagccgtttgttttcccagcttttccgagatttccctaacaaatgtgctttctacgatttttggcccaggccaggggcaccttgggacgggtgagaattctgaaagagcaccagaagtgagaaggtcaagcactaatagggtttctcttctcgcgcagcatctggcggaggcctcaccagttgcctgggctgctgctcccgacgtttccggccggaaattacatctggtaatgggcaacgaatcgtgtgacttggactccgccgtttcggccgtcactttggcttttgtctacgcgcagcgtcatcgggagcacgactatgtacctatactgaacattcctcgccgggactacccgttgaaaaccgaggtgggccacttgtttgtgaaatgtgggattgccgagcccgtgttgctcttccgagacgatattccccgggaagtggtccaggatgtgaacgttattctcgtggaccaccatgtaagcccgctggcgccaaatgttactgaaattttggatcacaggcccttggaggacagcagtccatccttcaagcagctgccaacactctgccaactggacatagatgcctcggtgggttcctgcgccactctggtggcccagcggtatttggcagaggaccaaccccgatccactagcgtggcccagctgctgcacgccaccatcgtgctggacacaattaattttgcacccgcggccaagcgctacgggccaaaggacgaagccatggtacagaagttggagagcgagcttaaccgtaaggacgctcaaagaagtagcctttttgatgagctagtggctgcaagggcggatattagtaagctaactctcaccgaagttttgcgcaaggatatgaaggtcttgcaaaccgatcgtcaggtggttcccttagctggaatgcccatcctagtcagagattttgtggagaaaagcggcgccgaaaaagccgttcgcgagtttggcgtggagagtaaccttttggttatcctgggaatgtatgtatcacctgccgatggccaggtgcagcgtgacctggccttgatctctctctccggccaaggccaattcgttcaacgcgtccagcaagcactgatggagtctaacgatccaaaattggagttgcgacctcacgaggtggacacccgctttatgggcggctgcttcttgcgccaacacaacgtccaggccaccagaaagcacatcctgcccattgttaagcgagcgctgcttgaatgggaagcggatcacgcctgcgattgtgacgaggtgtacttcttcaaggagaagccgcagctgggactctcttaagaagagatcaggccaaacggaagcttagacaagacttagctataattttagcgcaaccgttatgttaccaacgttaagcttacaccaaaaagacatagcgaatttcccatttacgataaattgacgaaggcaagcgagtgaaatatggaagcaatcagtattccaaatttaagttactttgcaaccttggtaacataaaggcaaattagtttcagagtattcacacattaagctctatccagtttcctagttgtttatatggattaagcgattatgtacagggtatacatgggtaaaagaaagcgttatgattaataaaaaaaaggactacaactgtggctcggtatcgtcagcacctccctcctcgcccatttcgtcgtctgcacactctaatgtcatatcttccaacatctcctccagtgtgatctggggcacatcacctccagcggcctgtacctcgattggtatcgtcttgttagtgtcccgatagatgttgacctgaccgcggatatcctcgttttcctcgagatcgtcaagaaactcgtggtagtcgtacttgctgcgctcatcggtagcctccgccgccagatgcttaatcttccacacgcgctgactgagtctggtctgtcgatcgtagtgcttgcgcacaagaattacatccggaatttcatccgacgacaatttgtcgaactccagatcgttgatgttggcctctccggtgttgtagcccattacggaatcgcccaccttgagcaggtggcccaagtgggagcgtgtgtgaatggggttatcgttgatgcccagctccgaggcgcgcaccacccaaatgtcgcagagagcgtgcttgaaggaaacctgcccttgaccaggataggtctttcgatccttttccatgatcacatcaatgtccatgacgacgtactcaaccagctgcttgggattgcagacggcctcaaagggagctctgaaaaaagcaatttaattggcttactcgaagata

SEQ ID NO: 6560 - DNA, 1415 bp, DROSOPHILA
attacattactgcgttacaaacaaatgcattatatatgtatttatatacattaaagcattatctttgtaatttatttatttcagtttcgcgctgatcaatcgataaatgtcacatcgaatcgatacgcgcaactgttgaaatatatggaagctatcagccgtttgttttcccagcttttccgagatttccctaacaaatgtgctttctacgatttttggcccaggccaggggcaccttgggacggcatctggcggaggcctcaccagttgcctgggctgctgctcccgacgtttccggccggaaattacatctggtaatgggcaacgaatcgtgtgacttggactccgccgtttcggccgtcactttggcttttgtctacgcgcagcgtcatcgggagcacgactatgtacctatactgaacattcctcgccgggactacccgttgaaaaccgaggtgggccacttgtttgtgaaatgtgggattgccgagcccgtgttgctcttccgagacgatattccccgggaagtggtccaggatgtgaacgttattctcgtggaccaccatgtaagcccgctggcgccaaatgttactgaaattttggatcacaggcccttggaggacagcagtccatccttcaagcagctgccaacactctgccaactggacatagatgcctcggtgggttcctgcgccactctggtggcccagcggtatttggcagaggaccaaccccgatccactagcgtggcccagctgctgcacgccaccatcgtgctggacacaattaattttgcacccgcggccaagcgctacgggccaaaggacgaagccatggtacagaagttggagagcgagcttaaccgtaaggacgctcaaagaagtagcctttttgatgagctagtggctgcaagggcggatattagtaagctaactctcaccgaagttttgcgcaaggatatgaaggtcttgcaaaccgatcgtcaggtggttcccttagctggaatgcccatcctagtcagagattttgtggagaaaagcggcgccgaaaaagccgttcgcgagtttggcgtggagagtaaccttttggttatcctgggaatgtatgtatcacctgccgatggccaggtgcagcgtgacctggccttgatctctctctccggccaaggccaattcgttcaacgcgtccagcaagcactgatggagtctaacgatccaaaattggagttgcgacctcacgaggtggacacccgctttatgggcggctgcttcttgcgccaacacaacgtccaggccaccagaaagcacatcctgcccattgttaagcgagcgctgcttgaatgggaagcggatcacgcctgcgattgtgacgaggtgtacttcttcaaggagaagccgcagctgggactctcttaa

SEQ ID NO: 6561 - protein, 405 aa, DROSOPHILA
MCFLRFLAQARGTLGRHLAEASPVAWAAAPDVSGRKLHLVMGNESCDLDSAVSAVTLAFVYAQRHREHDYVPILNIPRRDYPLKTEVGHLFVKCGIAEPVLLFRDDIPREVVQDVNVILVDHHVSPLAPNVTEILDHRPLEDSSPSFKQLPTLCQLDIDASVGSCATLVAQRYLAEDQPRSTSVAQLLHATIVLDTINFAPAAKRYGPKDEAMVQKLESELNRKDAQRSSLFDELVAARADISKLTLTEVLRKDMKVLQTDRQVVPLAGMPILVRDFVEKSGAEKAVREFGVESNLLVILGMYVSPADGQVQRDLALISLSGQGQFVQRVQQALMESNDPKLELRPHEVDTRFMGGCFLRQHNVQATRKHILPIVKRALLEWEADHACDCDEVYFFKEKPQLGLS

SEQ ID NO: 6562 - DNA, 3298 bp, DROSOPHILA
ggtcgcggacagacaactaatcatcctctcgccgttctgatgcctaagcaaaggctctggtgtccgattagaggcggcataaacctccaccggtaaaacgccagggagaaatccgtggcccacaatggatccctttctaacgttggtgaccaacaagccgtagtccgcccattagatcagatggacagaacaggggaggcagtgcccgatcccaacgacccgttcaggaggagctacagcctatcgagatcccctacaagaggagtccgaactccaattcacggagcgaggggtgagcaagcagccgaaaactagcgactgcagtgcagctgtagatgtggagactttggcccctacagcttctatgactgccacaagccagaagacgatggacttcattagcgtgcctcctcaagggcgggaacaaagtccccatcacgatctccgcatcgctcgtcggatctgaccatgacctgctcaccgataaaatactttgactggcagtgccggtgagcttgacaaggacaggagagagatcagagatttttgtttagtacgtaggcataattctctagctgagagttatgaatcgtgcatgccatctacggacggtggacggtatctttgaatttcattttcctgccgtatataaaaaaaacacacagatgcatggaatgcaccctttttcgcttactgcacttgttgcttcggcattttaaaagcaactaaaaaaaactatgaaacacttgccaaactaaccggaatttttttcctgtttcgcacagaaaagctaatttatttctttacatttggtctgcactttttgaaatattcaaaaacttgctttcttcacttgctcggacgtccgctctctacgactttttcacagcttacgattcgttttacagcagcgcgctggtatttataggtataggtataagttgactggaaattcgccgcctgctctctccctcacggtgggttaatttgttttcgctctctaccacttaaagtgactgtgaagggtcgactccttctggatgttgtagtcggacagagtacgtccgtcctccagctgctttccggcgaaaatcaaacgctgatgatctggggggattccatccttgtcgtggatcctggctttgacgtgtttgatggtatcggatggctcaacctccaaggtgatggtcttgccagtgagggtcttcacaaagatctgcatgccaccacgcagacgcaggaccaagtgaagggtcgattccttctggatgttgtaatcggacagagtgcgtccgtcctccaactgctttccggcgaagatcaaacgctgttgatctggggggattccctccttgtcgtggatcctggccttaacgttttcaatgctatcggatggctcgacctccaaggtgatggtcttgccagtgagggtcttcacaaagatctgcatgccaccacgcagacgcaggaccaagtaaatggtcgactccttctggatgttgtagtcggacagagtgcgtccgttctccaggtgctttccgccgaagatcaaacgctgatgctctggggggttttcctccttgtcctgtatcttggctttgacgttttcgatggtatcggatggctcgacctccaaggtgatggtcttgccagtgagggtcttcacgaagatttgcatgccaccccgcagacgcaggaccaagtaaatggtcgactccttctggatgttgtagtcggacagagtgcgtccgttctccaggtgctttccgccgaagatcaaacgctgatgctctgggggattttcctccttgtcctgtatcttggctttgacgttttcgatggtatcggatggctcgacctccaaggtgatggtcttgccagtgagggtcttaacgaagatctgcatgccaccacgcagacgcaggaccaagtgaaggggatgttgtagtcagacagagtgcttccgccctccagttgctttagttgtggtgactaatctctaacttcgttaaaaaaaaataagatcctctggaactgggcatacacacacacacgcacacacacacacacacacacacacacacagatagaagcatggaaagtaccgtttttcgtttgctgctttgccattttcaatgcaactatgaaaaactatgaagcacttgccaaactaaactcacctttttttattgtttcgcacacaaaagttagtttatttctttacttttggtcggcactttttgaaatattcaaaaactaggttttttcacttgctcggacgtccgctctctacgactttcacacagcttatgattcgtttcgcagccccgctctggtatttataggcaagctgactggaaattcgccgcctgctctctcgatcactcggacggtaggttactttgttttcgctctctgccgcttaaagtgattttggtcaacagcctttagacaatttccaatttccccaccaacacactcgcaaataagccagtctgcgtacacagatatttacatatgtatgcgacttaatgcatcttgaaagttcctagaatggaaagggctgatgaaaactaatagtaaacgttattaactttttgagtacaaactttaaagatataagataatatacacaattatacaaataattgtcatgactttctcatactaacattccagtgtacatgtattcaaatgtaccccgtgcataaatattaaaaaaataaattgtacaaagtcattaaaagcaatcctttaaaataacacaaaaaccctttctcaagaaaatacatgggggtccgcctttgtgacctaaattaagccaatttccgaccagtgaatgtaagggtacagagaaattcaaatgtatttactcaatttttatttatttctgtatagtttacccctacatatgaacattttttttatttatactttaaaaactcttaaaactaaacaaaataaagtttttcctataaaaaattgaagattttttggaattggtagcttcttaccataaaatagttccaagttacacgagatttcattaagttgctttatattaagaaataaattaatgtatttatggatacaaatataagaaatgttttacaattatggaatttaaaaaaatgctaccctaatatttatttatgtccaaagccccttaaagacagaatgaaatggaaattttatttatacaatttcgtttttattaggctttttttttcttgtttagttattgttcttctaaatgcaattcagtgtcctcaaacgaaatacgacgccagttgtccca

SEQ ID NO: 6563 - DNA, 1058 bp, DROSOPHILA
aagtcgtagagagcggacgtccgagcaagtgaaaaaacctagtttttgaatatttcaaaaagtgccgaccaaaagtaaagaaataaactaacttttgtcactctgtctgactacaacatccccttcacttggtcctgcgtctgcgtggtggcatgcagatcttcgttaagaccctcactggcaagaccatcaccttggaggtcgagccatccgataccatcgaaaacgtcaaagccaagatacaggacaaggaggaaaatcccccagagcatcagcgtttgatcttcggcggaaagcacctggagaacggacgcactctgtccgactacaacatccagaaggagtcgaccatttacttggtcctgcgtctgcggggtggcatgcaaatcttcgtgaagaccctcactggcaagaccatcaccttggaggtcgagccatccgataccatcgaaaacgtcaaagccaagatacaggacaaggaggaaaaccccccagagcatcagcgtttgatcttcggcggaaagcacctggagaacggacgcactctgtccgactacaacatccagaaggagtcgaccatttacttggtcctgcgtctgcgtggtggcatgcagatctttgtgaagaccctcactggcaagaccatcaccttggaggtcgagccatccgatagcattgaaaacgttaaggccaggatccacgacaaggagggaatccccccagatcaacagcgtttgatcttcgccggaaagcagttggaggacggacgcactctgtccgattacaacatccagaaggaatcgacccttcacttggtcctgcgtctgcgtggtggcatgcagatctttgtgaagaccctcactggcaagaccatcaccttggaggttgagccatccgataccatcaaacacgtcaaagccaggatccacgacaaggatggaatccccccagatcatcagcgtttgattttcgccggaaagcagctggaggacggacgtactctgtccgactacaacatccagaaggagtcgacccttcacagtcactttaagtggtag

SEQ ID NO: 6564 - protein, 301 aa, DROSOPHILA
MQIFVKTLTGKTITLEVEPSDTIENVKAKIQDKEENPPEHQRLIFGGKHLENGRTLSDYNIQKESTIYLVLRLRGGMQIFVKTLTGKTITLEVEPSDTIENVKAKIQDKEENPPEHQRLIFGGKHLENGRTLSDYNIQKESTIYLVLRLRGGMQIFVKTLTGKTITLEVEPSDSIENVKARIHDKEGIPPDQQRLIFAGKQLEDGRTLSDYNIQKESTLHLVLRLRGGMQIFVKTLTGKTITLEVEPSDTIKHVKARIHDKDGIPPDHQRLIFAGKQLEDGRTLSDYNIQKESTLHSHFKW

SEQ ID NO: 6565 - DNA, 3778 bp, DROSOPHILA
ctatgcagcacaatatgcacagcattaaactgccgttgatcccagctctcttaaatctacaaagttagatggaaaactcagagcatcgctgggaagctgttccatccataacaggtcaaactagaaaaatctatatagtgtacctctcgaaccgacaagcgggtacaaatgtgattgatattaaacttgtacacataatatctgagttattatatcaaatcgatggtttcattgatgacttcaactaactatttattcaaattgttaacagatattttgagttgatatctttatggcttgtccactgcagtatgagatccaatgtttacctccaatctaagggtaagcatgacgagtgaaattgataagggctctcaactgcctggtaatcattactaagcaaattcttaaacttgcactctttttaatagtatataagtgggggcaatgaatctgggaacgtgaatcacaaatttacgatatcttcgataggctagttcaccttcaccttcacctttgacactgttcgcttagtgataagaggatatggatttagctactgttattcagtaaataaacgggcatatgtacaattcatgatgataaattggaaatagcagggtatatcacttaaatacccctttcaaatgttctgatagaacttgtttacaagttcccaatttaccatataatgaaaacgggctagctccaattcgttataccacccacgatggttaggcattagcttaaattacccaactaagcattacctctcaacaaaatgattgtgcgtcatcgtgacaaggctataaactccattcgtaaatggttcgtccgattttcttacctccagctgcccgctgcagaatgcagattacctgaggcggtttagttctcttagacagcagactctcttacagctttcagctttcagctagcgtattagtattcagattacgaagcttatattatttatagtatcgttcagtagaacggcgtttctcgttcgacgcacaatgctgggtgttgttggggtgctcctcctggtggcgttcgccacactgctgctgtgggatttcctctggcgcaggcggggcaatggtatattgccgggtccgcggccacttcccttcctgggcaacctgctcatgtatcgcggtctagatcctgaacgtgagtttgagttccagcccatcgatacagtttgttatctggccaaatctattgcaatccataatcattcccaataataatctgcagaaataatggactttgtcaagaagaaccagcgcaagtacggtcgcctttacagggtgtggattctccaccagttggccgtcttctccacggatccccgagacattgagttcgtcttgagcagccagcagcatataaccaagaataatctgtacaagctacttaactgctggctgggcgatggattgctgatgagcacgggcaggaagtggcatggacgcagaaagatcatcacgcccaccttccacttcaagattttggaacagttcgtcgagatattcgaccaacaaagcgccgtaatggtggagcagcttcagtcgcgcgccgacggcatgactcccattaacatctttccggtgatttgtctcactgccctggatataatcgcaggtgagtttgccattagtcttataaatatttataacagcttaatactcgccgtttagaaactgcaatgggcacaaaaatcaatgcccaaaaaaatcccaatctgccctatgtccaggctgtcaatgagtgagtgtaatgataggtcgaatccccacagttctgatgaattcttccttgtgacagtgtcaccaacatcttgattaaacgttttatccacgcttggcagcgggtggactggattttccggctaacgcagccaacagaagctaaacgccaggacaaagctatcaaggtaatgcacgactttaccgagaacattatccgtgagcggcgtgaaacgctggttaacaactcgaaggaaacaaccccagaagaggaagttaatttcttgggccaaaagcgacggatggctctgctggatgtgctgctgcagtccacaatcgatggcgccccgttgagcgatgaggatatccgcgaagaggttgacacgtttatgttcgagggccatgacacgactacctcggcgatttcattctgtttatatgaaatctcaaggcatccggaggtccaacagcgtctgcagcaggagatccgcgacgtcctcggcgaggatcgaaagagcccagttacccttcgtgatcttggtgagctgaagtttatggagaacgtaattaaggagtcgctgcgcctgcacccgccagtgcccatgatcggtcgctggttcgccgaggatgtggaaatacgtaagaagttccatatgagattcttcaatctcaggtaaacatattgctcttgtcaggtggcaagcatattccagcaggcaccaactttacgatgggcatctttgttcttcttcgtgatcctgagtacttcgagtctcccgatgagttccgacctgaaagattcgatgcggatgtcccgcagattcatccgtatgcgtacattcctttctccgctggaccaagaaactgtatcggccagaagtttgccatgctggaaatgaagagcaccgtcagcaagctgctccggcacttcgagctgctgcccttgggtcctgagccccgccactcgatgaacatcgtcctgcggtcggccaacggcgttcatcttggcctgaaaccgcgcgcctaaggaattcattcttgtgggtctatccagctctatttgcatagaataaacgtgtatacaagtatttaattaactattttgtctgttgggtaattatcttaatactctcaacaatacatacatgtgcatatgaatgaccataggtacatatgttttgtgttttggttgattccatcagctgttcttgctgaaaaacagctggctagttgttttcctcggattttccgtcctgctcaccttagtggtcccgcactgtttctctttcgaagtggtgcactattcgaaaggttttgcttatataaagtttagctacgagcaataaatccgaagtgcctgtatatagataggcgacacatttgtagtgctccagataagattgccagctactcgagagcccaagtgctccttaagatacgcagcaaagcttcaacatgttggtggttttgttggtggccctcctggtgactcgcctagtggcctcgctgttccgtttggcgctaaaggagcttcgacatcctttgcaaggcgttgtgccaagtgtttcgagagttcctctactaggagccgcctggcagatgcggagttttcagccagacagtaagttcccgtttgaactcttcaatatttgatatttactctattaaattccagacttgcatgataagttcgccgagtatgttaagcgttttggtcgcagtttcatgggcactgtcttaggccatgtggttatggttacagcggagccccgacatatcgatgcactgctgcagggtcagcatcagttgaagaagggcacgatgtactttgccttacgcggttggctgggcgatggactgctgctgagtcgtggaaaggagtggcacacgatgcgcaaaatcatcacgcccacgtttcactttagcatcctggagcagtttgtcgaggtcttcgataggcagagcagcatattagtggagcgtttgagaacgctgtcgtacggcaacgaggtcgtgaacatctatcc

SEQ ID NO: 6566 - DNA, 1522 bp, DROSOPHILA
tctcgttcgacgcacaatgctgggtgttgttggggtgctcctcctggtggcgttcgccacactgctgctgtgggatttcctctggcgcaggcggggcaatggtatattgccgggtccgcggccacttcccttcctgggcaacctgctcatgtatcgcggtctagatcctgaacaaataatggactttgtcaagaagaaccagcgcaagtacggtcgcctttacagggtgtggattctccaccagttggccgtcttctccacggatccccgagacattgagttcgtcttgagcagccagcagcatataaccaagaataatctgtacaagctacttaactgctggctgggcgatggattgctgatgagcacgggcaggaagtggcatggacgcagaaagatcatcacgcccaccttccacttcaagattttggaacagttcgtcgagatattcgaccaacaaagcgccgtaatggtggagcagcttcagtcgcgcgccgacggcatgactcccattaacatctttccggtgatttgtctcactgccctggatataatcgcagaaactgcaatgggcacaaaaatcaatgcccaaaaaaatcccaatctgccctatgtccaggctgtcaatgatgtcaccaacatcttgattaaacgttttatccacgcttggcagcgggtggactggattttccggctaacgcagccaacagaagctaaacgccaggacaaagctatcaaggtaatgcacgactttaccgagaacattatccgtgagcggcgtgaaacgctggttaacaactcgaaggaaacaaccccagaagaggaagttaatttcttgggccaaaagcgacggatggctctgctggatgtgctgctgcagtccacaatcgatggcgccccgttgagcgatgaggatatccgcgaagaggttgacacgtttatgttcgagggccatgacacgactacctcggcgatttcattctgtttatatgaaatctcaaggcatccggaggtccaacagcgtctgcagcaggagatccgcgacgtcctcggcgaggatcgaaagagcccagttacccttcgtgatcttggtgagctgaagtttatggagaacgtaattaaggagtcgctgcgcctgcacccgccagtgcccatgatcggtcgctggttcgccgaggatgtggaaatacgtggcaagcatattccagcaggcaccaactttacgatgggcatctttgttcttcttcgtgatcctgagtacttcgagtctcccgatgagttccgacctgaaagattcgatgcggatgtcccgcagattcatccgtatgcgtacattcctttctccgctggaccaagaaactgtatcggccagaagtttgccatgctggaaatgaagagcaccgtcagcaagctgctccggcacttcgagctgctgcccttgggtcctgagccccgccactcgatgaacatcgtcctgcggtcggccaacggcgttcatcttggcctgaaaccgcgcgcctaa

SEQ ID NO: 6567 - protein, 501 aa, DROSOPHILA
MLGVVGVLLLVAFATLLLWDFLWRRRGNGILPGPRPLPFLGNLLMYRGLDPEQIMDFVKKNQRKYGRLYRVWILHQLAVFSTDPRDIEFVLSSQQHITKNNLYKLLNCWLGDGLLMSTGRKWHGRRKIITPTFHFKILEQFVEIFDQQSAVMVEQLQSRADGMTPINIFPVICLTALDIIAETAMGTKINAQKNPNLPYVQAVNDVTNILIKRFIHAWQRVDWIFRLTQPTEAKRQDKAIKVMHDFTENIIRERRETLVNNSKETTPEEEVNFLGQKRRMALLDVLLQSTIDGAPLSDEDIREEVDTFMFEGHDTTTSAISFCLYEISRHPEVQQRLQQEIRDVLGEDRKSPVTLRDLGELKFMENVIKESLRLHPPVPMIGRWFAEDVEIRGKHIPAGTNFTMGIFVLLRDPEYFESPDEFRPERFDADVPQIHPYAYIPFSAGPRNCIGQKFAMLEMKSTVSKLLRHFELLPLGPEPRHSMNIVLRSANGVHLGLKPRA

SEQ ID NO: 6568 - DNA, 4724 bp, DROSOPHILA
cctccgtgaaacgccactcaaagtcggtgccctgaagatccgatgggtcaaccagacgaatgtccttggtgacgtgcaaaggtgcctcggacttgataatgataccgggaaactccttctcaccgccaaccttgcgatagtgccagttcaggccctctacaattacccaattgcgctcgggtataacctgggtgacaattccctgctttcctttgtctttacccacaaggacttcgatacgatcgccgcggaaaaagctccagtcctctgaaaaggatatacaaccatgttttattaggttttagaggtcaaggcttcttattccttaccaattggttccactagcaccttgcgacgcacggttccgggcatattttgctggcggaactgacccgtccatgaacgatttgtggtgtagcggaatctctttcgctccacggtacgcggtaggtaattaatctccttcggagtttgccagtacacctgtgttgagatgaaaaaaaatattttaataaatgtgaaacattttccatgcgatgtgttacgtgagccgctgttcacaagttgttcaatgaaaaagactcttcctgttacctgttttttgctgcgctcgatgtattccttgggcagattggaaaagttcttcaacttgctggccaaatattgcgttaaacgcattttgaaaggttaattcaattattaataataagaactagtaaattaaatgcggcttgcaatcagctgttgagaactgaagaatagccattcacaggaaggcccaacaattttatttatatttaatgtttatgcgactctaaagattatgaacacttgatgtaggcttgtaaaatatttaaattaattattttcgaggtttaagaaaatatcttagcttatatattgttaaacattatgatatagaaatttaagaactagcaattatttccccgtgtaaacgtggttcgctgtgactggcaagaagaggtaagaagaagcagctgctatttgtggactactcttggtgttttatatcgttcgccgtagccctaaattgcaatgcaaaccggctttatataaacaaaaggtaagtgctagaccatataaatgtgggcacgtgcgggcgcaacatcattggaagacggaatcgcaaccggagagcgtctattccggccagctcagtccaaccgtttgggaagggcctttcaacgcttagtcatatccatatctcagcgcacaccgagacaatccagttcctacccacccataagttcctcatttaacaagcaatatgtcccaccacatagatatggaagaccgcactgatacggagcccgtgctgctctccaagcacgccaagaatctgctccgattccttaatctcctgccagctcgcatggcctcgcacgataacaccaggtaagtgcatcctggcctcgtatttaacttttggttaaccatttccttgtccatcaggagcaccattgtgttcttcgccgtctgcggcctggatgtgctaaactcattgcatctggtgccgccacaactgaggcaggacatcattgactggatctacggaggattggtagtgccacgcgacaacgagaaaaactgcggcggtttcatggtgagcataaattcgcgtctgtcaggtgtacaaacagtcgttgacaagccaaacagaaccatcttccgctcccacatccactcccaatcaagttccttatctccatacgtggccaggtagcagacactgcggcagacgttgtcgcatcccttacatattggtgtttattcagtcagttgatatacgagcattcgcatttccttcattgagaagcatccacgaagtaaatattttgaaagattcatttccaacaaaaaaagtatgcaattctttattagcatttatgaagtttgtttttgttaaaaatatctaagaagccacgtcttgtttccccatcatgcatcacatatttcatgattccagaccctttagtttaaattacaaatctaaattttgtttttaaataattggattctaatgaaaacccattaaattgttaattccaaggtcaacgcatctgctttacataaaaagcaaaacggcattacttctgttacgatctatactgtttaaatatgcataattgtagaggagttctccatttgcgcagcagctcgatttaccattacccaccacaccccacccaccgacaccttgaatttatcgcgccacgctttatcagcgacgccagcaacatgcaaaaccactttaaaatagattgattaattaattggtatctttgcagggctgccgcgccatggtgcccaaaaccgaggacgccgagatcttggagtgcatgcggaattaccagtggggccacttggccatgacgtacaccagtctcgcagtgctggtcaccctgggcgatgatttgtcccgactggatcggaaaagcattgtggacggagtggctgctgttcagaagcctgagggcagttttagcgcctgcatcgatggcagcgaggatgatatgcgatttgtttattgtgccgccaccatatgctacatgctggactactggggcgatgtcaacaaggagaccatgtttcagttcatcactcggagcctgcgatacgattacggtttcagccaagagctggagggggaggcccatggcggcaccacattctgtgccttggcggcgttgcatcttagtggacaactgcatcgcctggatgccacgacggtggagcgaatgaagcgttggctcattttccgccagatggatggattccaaggacgccccaataagccagtggatacttgttattccttctggattggtgcatcgctatgtattctggacggcttcgaactaaccgattatgcccggaaccgagaattcattctgagcacacaggataagctcattgggggctttgccaagtggccgcaagccacgcctgatccgtttcacacatacctcggtctctgcggactagctttcacgggtgaacctgggctaagccccgtgaatcccagtctgaacatgtccatggccgcctacgctcacctgcagcatctgcatgagcagtggcggtccgcagatggccgaggcgacgaggatattagtgtaagctctgcattcaagcaacaactccacctgtcaaagggggtcgaggcgacatccacaacaactacctctaactcgccattaatttcagcacaatgatgggaagccgcacaaagcacgaggggaaagttaaagcacactattgtatttatattggccacattttagccacgctttttatgcccttgcagttagtatatttattttatcgaaaagtttgtagcgcagtggatgaggcatttgcgaccatataaactatatatcagtatcaccagcggagtcgatacggccatgtccgtctgtcagtttctatgccaaatagtctcttagtttagcaatctgcatgaacgggtcgttgtttttaatcggtataaatgttataattactgcaagggtatataagtttcggcttgccgattctagcttactttctggtttacatgtattttaatgcaaaaagctcgagcttttggagagagagatgaataagttagtatgtttattgtacagcctaaattaatgttaacaatgtgtaagattaagcttaaaagtaaattaaagcgtcccatgctgaggcatgtatttacagcaaaagtattggatagcctcgaaagcctccttggtacattggtaatattggcccggaatcagaattaatctcaaacctgcaggaacaggcggtgatgttgcacagttggcatgtagcccatgccgggccgatcgatgtggacccgtccacgaagtggggcgagcacacgctcggtgaccaatgggcagcgctgcaccatcagtgactgcagcagcgggcaactggaggtgagggcactgcggaagagggagaacgaagtgtgggctagtaaacaaggaaatcgctgggatagaagtcgttcaagttgtaagcgttgagccccacatccggctgtggcctatcgatgtaaagacgccgctggcggagcggcgccagggagagttctgtgacccgcggacaacgtcgaatgagcaaggtccgtagccgcaaacagtgcactgtcaaagcgctgaaaatacgcagatgcggatgcagatggagattggtttccccagaaacacacagacacaaggcacgcacaggtttactgacaatatgacaacagcttttagggataactacgagtattacttactgcacgccatagtcggagatagccgcacacccgatcacgttgatgtgctccagttcgcggcaatagttcccgatttggatgagcacctgatcggtgacactgggcgtatttgccagcgacaggacggtgagcttgttaagtttcctgaagaagataatcaagcagcgctctccaattgcgccgcaataggagatgtcgaactccaccagcttgctttggtgcagcgtcaaagcgtccactgctcccgtggtcagccactggcacttggacagcttgagtacgcgcagctccttgcactccactatgatcggctgcagcgaaagggccgtgatgttgacgcattcgttcaggttgacggcccacaggcgtttcttgttgttggccagcagtggcagcagcagctcatctgttagccatcggcagc

SEQ ID NO: 6569 - DNA, 1762 bp, DROSOPHILA
gctatttgtggactactcttggtgttttatatcgttcgccgtagccctaaattgcaatgcaaaccggctttatataaacaaaagatatggaagaccgcactgatacggagcccgtgctgctctccaagcacgccaagaatctgctccgattccttaatctcctgccagctcgcatggcctcgcacgataacaccaggagcaccattgtgttcttcgccgtctgcggcctggatgtgctaaactcattgcatctggtgccgccacaactgaggcaggacatcattgactggatctacggaggattggtagtgccacgcgacaacgagaaaaactgcggcggtttcatgggctgccgcgccatggtgcccaaaaccgaggacgccgagatcttggagtgcatgcggaattaccagtggggccacttggccatgacgtacaccagtctcgcagtgctggtcaccctgggcgatgatttgtcccgactggatcggaaaagcattgtggacggagtggctgctgttcagaagcctgagggcagttttagcgcctgcatcgatggcagcgaggatgatatgcgatttgtttattgtgccgccaccatatgctacatgctggactactggggcgatgtcaacaaggagaccatgtttcagttcatcactcggagcctgcgatacgattacggtttcagccaagagctggagggggaggcccatggcggcaccacattctgtgccttggcggcgttgcatcttagtggacaactgcatcgcctggatgccacgacggtggagcgaatgaagcgttggctcattttccgccagatggatggattccaaggacgccccaataagccagtggatacttgttattccttctggattggtgcatcgctatgtattctggacggcttcgaactaaccgattatgcccggaaccgagaattcattctgagcacacaggataagctcattgggggctttgccaagtggccgcaagccacgcctgatccgtttcacacatacctcggtctctgcggactagctttcacgggtgaacctgggctaagccccgtgaatcccagtctgaacatgtccatggccgcctacgctcacctgcagcatctgcatgagcagtggcggtccgcagatggccgaggcgacgaggatattagtgtaagctctgcattcaagcaacaactccacctgtcaaagggggtcgaggcgacatccacaacaactacctctaactcgccattaatttcagcacaatgatgggaagccgcacaaagcacgaggggaaagttaaagcacactattgtatttatattggccacattttagccacgctttttatgcccttgcagttagtatatttattttatcgaaaagtttgtagcgcagtggatgaggcatttgcgaccatataaactatatatcagtatcaccagcggagtcgatacggccatgtccgtctgtcagtttctatgccaaatagtctcttagtttagcaatctgcatgaacgggtcgttgtttttaatcggtataaatgttataattactgcaagggtatataagtttcggcttgccgattctagcttactttctggtttacatgtattttaatgcaaaaagctcgagcttttggagagagagatgaataagttagtatgtttattgtacagcctaaattaatgttaacaatgtgtaagattaagcttaaaagtaaattaaagcgtcccatgctgaggcatgtatttac

SEQ ID NO: 6570 - protein, 395 aa, DROSOPHILA
MEDRTDTEPVLLSKHAKNLLRFLNLLPARMASHDNTRSTIVFFAVCGLDVLNSLHLVPPQLRQDIIDWIYGGLVVPRDNEKNCGGFMGCRAMVPKTEDAEILECMRNYQWGHLAMTYTSLAVLVTLGDDLSRLDRKSIVDGVAAVQKPEGSFSACIDGSEDDMRFVYCAATICYMLDYWGDVNKETMFQFITRSLRYDYGFSQELEGEAHGGTTFCALAALHLSGQLHRLDATTVERMKRWLIFRQMDGFQGRPNKPVDTCYSFWIGASLCILDGFELTDYARNREFILSTQDKLIGGFAKWPQATPDPFHTYLGLCGLAFTGEPGLSPVNPSLNMSMAAYAHLQHLHEQWRSADGRGDEDISVSSAFKQQLHLSKGVEATSTTTTSNSPLISAQ

SEQ ID NO: 6571 - DNA, 2456 bp, DROSOPHILA
acagacaataatccagtgtagaatagtgcgagggcactgaaagggttaggttgcgtttgtgttgccattccggccactcgacactttccatggcaaaagttatgcaaccaatttacatacaaaaacaactcaataaacgtgcgaaatgctaacgatttgtaaaagttggaatccccccaattcgcacacacatgagtgtattacgtcctgttattggtttttgtagccattccacgagggcaggcccaaagttcgatggttggaggagatgtggggcgccactgccactgccctggcaatttagcaaagtatttcctcggcgctctaaaaagttgcccactttttgttacaccaacatgagacgtcgtcctccacgtcgtctcataaactgtgggcttattttcatgcccggagccatgaaaacggaaattgtgcatgaaagctgactgctaaccatgcccccaaaagtatgcggattgcaggggcggcggagcatccacttacacgaacctaactcgattattataatattcaactatataatccaatgggaaagtttgctaataagctgctagttgagtgccagttaacattgccagttcacccgggatttcagaaggaccctcaagcgttgcaggatggaaatgcggttcgcttttattgttgtgggtggtgggagcggtatggaggggcaagtgcctctagtcaatttcaatttcaatgcccactgaaggataattgcaaatgtatgggaattgagcatttgattcggtcttattgagatgacttgggcattcaaatcaactaagttaatttattgacaggttatgcatcagttgtagcaagcagtcttgctagaaaaaccaagtaaccgacagtgtaattcagaaattttattcaaattaaatctacttaaaatctacttaaacacatcaaatttaacagcgtttttttggaggaaacggatcaaaggcaattcacaagaagtggtagacagaggatggccgcactgactccacgaatcatcaaggagacacagcgccttctggaggacccagttcccgggattagtgccacgcctgatgagtgtaatgcgcgttatttccacgtcctcgttactggccccaaagattccccttttgagggtggaaattttaaattggaattatttttacccgaagactatcctatgaaagcaccaaaggttcgatttttgacaaagattttccatccaaacatcgaccgtgtgggtcgaatttgtctggacatcctgaaggataaatggagtcctgctttgcaaattcgtaccgttcttctttcgatccaggccctgttgagtgctccaaacccagatgatccactggccaacgacgttgcggaattgtggaaggtcaacgagcgtagggccattcaacttgctagggaatgcactttgaaacatgcgatgcaaaattaagttcccaaaaatgaattaaatttgatccttagaagggtgcttaaaatgtgaactttattaaatattggaattgttttgtcctatgtgcattttccttaaaccgcatattaagctttagtatccactcctaactgatttgtgtcggcgagtaattaccgcccccgcggcgtgatgtctaattgaaatgtgcagccacaagtgccgaagctacaaatcgcatcgactttcactaaacgcgggcgtagtggcatgaaaaatgagtccggtccagtgtgcggcatacaaaggcgactgctaacggtatttaatgacacataaagtcgtcaatcactcagtagtaaatctcgacatgtcgccgtacccaaagtctctttgccggcttcccccgcaactcgagaacccaaaacaaagtaaaacaaaaccccggccaagtcgagcgagtcaaaagcgaaacgaaaaacgctcccggtagcaacacaatttgacagctgcctgacagtttaaattaattgatttatatggactggctggatgggaaagtggacactgctcggaggttagggagtggcgctttcgcttaatcgcccccgaacaaaggaatcctaaggtctcccctatcgactacccgatactcagtactgaaatggtgttatgaaaaccaaatgtgtaaagttcggtttttttaattactcaattttgatgtactgtttatcgtaaatattttcatgaattacataaaatttgtgaattatttatgttattaactttgttttcactttttgggtaaccttttcaaaccccaaatcttcgtaatacacggtacttaaatatattgctatgggttttcaattaactgaatggcgtcgtattttccgatcagaagcctagttagacccgcatgtttaccgtcgtgtcaaatgttgcccaagtacttcccactttctaaaagagacccgctaagacacctgccacacacttatgggaccaatctatcggcgca

SEQ ID NO: 6572 - DNA, 456 bp, DROSOPHILA
atggccgcactgactccacgaatcatcaaggagacacagcgccttctggaggacccagttcccgggattagtgccacgcctgatgagtgtaatgcgcgttatttccacgtcctcgttactggccccaaagattccccttttgagggtggaaattttaaattggaattatttttacccgaagactatcctatgaaagcaccaaaggttcgatttttgacaaagattttccatccaaacatcgaccgtgtgggtcgaatttgtctggacatcctgaaggataaatggagtcctgctttgcaaattcgtaccgttcttctttcgatccaggccctgttgagtgctccaaacccagatgatccactggccaacgacgttgcggaattgtggaaggtcaacgagcgtagggccattcaacttgctagggaatgcactttgaaacatgcgatgcaaaattaa

SEQ ID NO: 6573 - protein, 151 aa, DROSOPHILA
MAALTPRIIKETQRLLEDPVPGISATPDECNARYFHVLVTGPKDSPFEGGNFKLELFLPEDYPMKAPKVRFLTKIFHPNIDRVGRICLDILKDKWSPALQIRTVLLSIQALLSAPNPDDPLANDVAELWKVNERRAIQLARECTLKHAMQN

SEQ ID NO: 6574 - DNA, 3312 bp, DROSOPHILA
tgggtcgctcgtctgcagctttgtttgcagagtcatagagagctgggcaagaaaaaataaaaaaaaaggggggggggtgttccattggttatcaggtatgatgctcaatcacatcgcgtggcgcactcaccccatcctcgtcgatttcctcccagttgtctaacacatcctcgccatgggacatcgttcgacaaagcacgttgctcgactgctgctagaatatatacttcgggtttcggttgcgttttcgctcactttcttctcttgcgcctgctgctgcagctcgcactcttactgatacatgattccttcgcacttttatcagacataagttatgcgtatgttggcaagcacacttttttcacgaaattcgcacccaagaaccctactgaaaaaacaaaaaacaatacgcaacaatttggcctgctgctaatgtcgttctcgttgttgttgttgttgctttccgtgggctagtcttcttcttgcttatcaggtcacagcaaaagtgacaggttttgttcgtttgcacgggaactggaaaagtggttgcactttactggcccaaccagcactgcgccagaagatacttggcccacccacctttgatagccacacttgttaaccatttatttttaacgctttattaataaaagaagtgtgtggccgccgcccgcgtttccctgcgaatgtcgatggaaatttggaatcgcagaatgtccgatagactgtgtaatcgaacgggaaatttaaaatttgttttgcatgtaattttctaacaatttattttatttataatgacaatgtcgtgcagagcaaactttaagttataaagcttgaaacgctaaaaagaagaatgaacattctgtttaatatttcgattgaccatgtcatactaatgactgcaatcgatagctgaatgttaagccaatgttaggtgtatgttttgttaacatgataagcaaatcagctgttccctctgcaattttggaacagctaatgaaatatttgaaatagataagaggcactattgatcatggaaattataataccgcgctattcggaatcacacagcattatcataggtcagcaaccgcgcagcaagcagatcaccaagcgatagcgttcatcaggaagccagcgatcttcaagcacgtgcatttcgttcagaagctgacggaatttctcggcgtgtttacgtaaatagttaaaattcagcaatggaggaggtcgaaatcagcacagaaaagaaatccaatcccgtaaagtcatttattgcgggcggcgtgggaggcatgtgcaatgtgctcgttggccatccattggacacaataaaggtgagcttcaaaactgtgtttacaaatggaaacgatgtaatgctttaagttccactttaggtccgtctccaaaccatgcccacacctccacctggacagccgccgagatacaagggagtcatagattgtgccgccaggacatttcgttatgagggttttcgcggattctacagaggaatatccgctccacttgtgggagtaacacccatctatgccgtggactttgccgtctatgcggcgggtaaacgattgttccaaacggatgaccacattaggctcacctacccacaaatcttcgccgcgggagccttggccggagtttgttctgccctcgtcacagtgcccaccgatcgtataaaagtccttctgcagacgcaaaccgtgtccaacggacctctgctctacaatggaaccattgacacggccgccaagctatataggcagggtggcattcggagcctcttcaagggaacatgcgcgtgcattctgagaggtcagttgttaattaattgcttaatattatagtatatataatagttatggataattttaaaatttacagactcgcccaccggtttttactttgtgacctacgaattcctacaggaattggctagaaagaagtccgccaatggaaagattagcaccacatcaactattctgtccggcggaacggcgggcattgtgttttggactttggccgtgccgttcgatgtacttaaaagccgtctccagtcgggtgagtcatccaatcgccaatcgctttagttacaatgatttataaatgccatatttttagcacctgagggaacatacaagcacggcattcgcagcgtttttagaaacctcatggccacagaaggcccaaaagctctatttcgcggtatcctgccaattctacttcgtgcctttccctccaccgcagcagttttcttcggcgtggagctaaccaatgatttgctgaaggcttaaatttaagaatttgtatttcagagaggctgtttagaatattaaatattgtttacatatgcggttgagtttgctttatttggatttctgatattctataaacaaaatgtttgaaatattagctatgcgcagtaaccgagggatattaatggatttttaaatataacgccaataattggtatccgattttaaaagttaaatatattttactttacatgctaaagtatctttacggtttagcttggcttacatttaaaatatactttactttacatgcaaaagtatctttacgtttaagcttagtttcgattcattccaattggatgtgcaatcgaaagcttttaagcggaacgaacagatcgacaatattagaattggaagtgcagcgagataagtactactgcttttaatcagaaaactacttgcggagaaagttggacgctggcgggtcgcgcgtttactcctatttcgttcaattcgaatcgatacctttaaaaacacaccggcttctgtgcgaaaaacattttggtgtttccttgaatataatacgtttcctgaaagagacgttgaaaaaaaacacttggaaaaacggcgatagtttttcaaaactattatacgccctgtatttgaatgatctgcccgaggaattggagggcggaatcgacatcgatggccgccgtgtgaatgtcctaatgtacgctgataggatcgcaatactttccgaaagtattgatgatcttcaggatatgatcaaccagctggaaaaatactgcaccaaatgggacatagtggtggacatggacaggtcgtgtataatggtcttcaggagaggtggacggcttgcattgactgagaaatggtttataacgggaaaggagatcaaaaccacaagcactgcagaatttctcgattttttgctcacaactacactcaacactccagagatactccacataatagattggaaaaattggatgattagagaagattgatgaatctatacttgctg

SEQ ID NO: 6575 - DNA, 1123 bp, DROSOPHILA
aatatttgaaatagataagaggcactattgatcatggaaattataataccgcgctattcggaatcacacagcattatcataggtcagcaaccgcgcagcaagcagatcaccaagcgatagcgttcatcaggaagccagcgatcttcaagcacgtgcatttcgttcagaagctgacggaatttctcggcgtgtttacgtaaatagttaaaattcagcaatggaggaggtcgaaatcagcacagaaaagaaatccaatcccgtaaagtcatttattgcgggcggcgtgggaggcatgtgcaatgtgctcgttggccatccattggacacaataaaggtccgtctccaaaccatgcccacacctccacctggacagccgccgagatacaagggagtcatagattgtgccgccaggacatttcgttatgagggttttcgcggattctacagaggaatatccgctccacttgtgggagtaacacccatctatgccgtggactttgccgtctatgcggcgggtaaacgattgttccaaacggatgaccacattaggctcacctacccacaaatcttcgccgcgggagccttggccggagtttgttctgccctcgtcacagtgcccaccgatcgtataaaagtccttctgcagacgcaaaccgtgtccaacggacctctgctctacaatggaaccattgacacggccgccaagctatataggcagggtggcattcggagcctcttcaagggaacatgcgcgtgcattctgagagactcgcccaccggtttttactttgtgacctacgaattcctacaggaattggctagaaagaagtccgccaatggaaagattagcaccacatcaactattctgtccggcggaacggcgggcattgtgttttggactttggccgtgccgttcgatgtacttaaaagccgtctccagtcggcacctgagggaacatacaagcacggcattcgcagcgtttttagaaacctcatggccacagaaggcccaaaagctctatttcgcggtatcctgccaattctacttcgtgcctttccctccaccgcagcagttttcttcggcgtggagctaaccaatgatttgctgaaggcttaaatttaa

SEQ ID NO: 6576 - protein, 299 aa, DROSOPHILA
MEEVEISTEKKSNPVKSFIAGGVGGMCNVLVGHPLDTIKVRLQTMPTPPPGQPPRYKGVIDCAARTFRYEGFRGFYRGISAPLVGVTPIYAVDFAVYAAGKRLFQTDDHIRLTYPQIFAAGALAGVCSALVTVPTDRIKVLLQTQTVSNGPLLYNGTIDTAAKLYRQGGIRSLFKGTCACILRDSPTGFYFVTYEFLQELARKKSANGKISTTSTILSGGTAGIVFWTLAVPFDVLKSRLQSAPEGTYKHGIRSVFRNLMATEGPKALFRGILPILLRAFPSTAAVFFGVELTNDLLKA

SEQ ID NO: 6577 - DNA, 3365 bp, DROSOPHILA
caagacaattgcggtgtaataattttaacttctttaagtcggcagccagcccacaccgcacaccacggagcaccacccggctccacccggcaataccctgcaccaccgactccacttcaagtcgatccgattcggcgggggcccataaaaataacagcttatcggtaagaagaatcgtgtcgtggcacgcctaccaactcaaaaaggcattaaaatatgaaaacaacaattgcacactctctggcatgggaggaggatgctggaggggttggtatccacctccgggggaaatcaacagcagtctgggagtcacagagtggccgacacgcccccttttcttcattgtaggcgtcagccgatggcagcggcacgttttcctccgtgaaattccaaactagccccaaccacccgcagcatcgcaaaggtgagtccagccaagacgctaaaccagagatatataggtgtatcaggagttgcccctccgcacccactgtccttgccacatcgctccattgttcaaccacaggcgaatgaaagttgggggagggatcggtttcgtgaggcagcgggcagttacaacttagttagctcagccagaattgcaggagatatctcaatttggggcccataaaaatagcgagtaataggccatgtccaaagagcgagccaaacttatgaaatacgaccaagcgatactctaaaaataccctaatccactttacatcaaattacgtatatgatagaatagttacatcgctaaaagggtctttgctcttaagaaataattcgaatggttatagcttacttccttgggttccaatgcacagcatacttagttacaaactatggtggcgttgtcataaaaccggtaaccgagtagtcagtctctttgcagtcatagtattaagcactgaaactcttatttagagacaattggtctgacaagcccaacacaagtatccatagcccaaaaaaaaaaaccgaaaacttaagcattttcggatccattcacatgttcgaaagaatctaaaagtgggatagcaaaattgacaatggcaaccaggcagcccacaccccgccagctggcatacctcgacgagctgaagatgcgactgcaggagctacgcgatcgccaggcgtccttcatggagcaaacggccaagatactcagcaggatgagctcctccagtatggatgggtcggaatccgagacattaccaaccgattcgatcgatgaaaatgtgacaaccaatactacagcgggtgtgggtgccgggatcaccaagggttccaagagcagtcttaatatcaagaagctaattcagcgctttgaagatctgcggaagaactcgcaggtgggtttgcattaccatcaataattattgcttaatcttattaccctaaactactacgttcatagcaaaatttaattgacaagtagttcatttaagtgttacttttgtcatttgaaaaattgcaaaccttttatatgaggatatattggatttatactgacgaacatttttggattcagacctggattgtctttcagcgtgaaatacttaatatttaaataaattgtatataacccaaaaatgttttattggaatgctgaaagcgattaagggctttaaaggttgtgttcatatgacagtcgattgatacaattgcaactaaaaagtgcagctcaacaaaattttgaaatattctttgcaactattttatgtatttactttttgtattgatttcaggagtttggcgatcttcccgaggttcccgaggaactgatcaacgtggatgtgcgccgcattctcaatggctacgagaaactcatcgaagaaggtcatgttctccagcaatcctggtttctgctcaagaagtccacggagagttgtgctcggttcgccagcgcaaatggcatgaaatcggaggatcgtcctccattgaagaccaactctggtatcgttgaggtatgcaatgtggtaccagaacatagtcctgaggtagctgaaacaccgcgggttaagaaatctaaatcgctgctctcgaatatggttactagttcggagatagtggataagaaggcagaggttttcagcaccaagatggcaaaggggaaatgcaatttccaggactatggtaagggcatcaaaagaccacgaaaagagcagtcccatgtaggttaatccaaagcctcatctaaaccctaggtcatgcgcgctggggagcatttatgcagttgatcatacgcgttcttcgtcctttccacggcggcagcaggaagacaaagaaaattccagctcacaacgccaacaacatgaggattcccagccacctgccaccgaagaggaagcccatctactaggccttttcaatagccaaccacacacaaaaaaccacaagtgaagatccaaactaagccaaaccaatccccccaaaatcccactaaaaataatccaataaaaccgatcccattgaaaagacgcgttaatcaataggcaacaccacacgtcagcgtgtcaatattttgcctaattaatgtggcccggcttgggcgcagtggcgcatcaatttcgagtgtcaagtgcaatgagggggaacgatcgctctgtgggtccccttggtccggatccggaccaccatcagctaatgtatctatatggcccaagcccaaggcatgaccatagccgggcgacggcgacgtatggcagcaactgctgcgctgacagcgcattttagtcgcccatggaataccgaaaataaatcttgccctgtcgtgacacagagcggatgatgcactgttcaaaaaaataacttaaactgcatattagaacagaacataagctgtcactacagtcactctacacattgtattgctaactttggtaaagtaactttagatgttatacttatggttattaggtatcaataagaaattcgtaaaattaatatataaagctagagtggttagcattataatttaaaacattaatttcacatgctttatatttttgcagtgtactgaaggagtgatacattggttgaggagggtgtagaaacactaaaagcaacgcagacaaaatactcggccccacacaacacgcaacacacacgcatagcgagaagtaaacatttaaatttaaattaagtggcttgttcagcatctccgaatgcagcagctaatgagcggaggcccactccatgtgggcgacggaaaactatatataccatacatatagtatagatggacaggaggatggcggggatctcagcaggaagctttcacgtttggattatcattgaaagtgatatatttacttgagcgcatggctatttatctgatagccctgggatatgcatcatcc

SEQ ID NO: 6578 - DNA, 898 bp, DROSOPHILA
ggatccattcacatgttcgaaagaatctaaaagtgggatagcaaaattgacaatggcaaccaggcagcccacaccccgccagctggcatacctcgacgagctgaagatgcgactgcaggagctacgcgatcgccaggcgtccttcatggagcaaacggccaagatactcagcaggatgagctcctccagtatggatgggtcggaatccgagacattaccaaccgattcgatcgatgaaaatgtgacaaccaatactacagcgggtgtgggtgccgggatcaccaagggttccaagagcagtcttaatatcaagaagctaattcagcgctttgaagatctgcggaagaactcgcaggagtttggcgatcttcccgaggttcccgaggaactgatcaacgtggatgtgcgccgcattctcaatggctacgagaaactcatcgaagaaggtcatgttctccagcaatcctggtttctgctcaagaagtccacggagagttgtgctcggttcgccagcgcaaatggcatgaaatcggaggatcgtcctccattgaagaccaactctggtatcgttgaggtatgcaatgtggtaccagaacatagtcctgaggtagctgaaacaccgcgggttaagaaatctaaatcgctgctctcgaatatggttactagttcggagatagtggataagaaggcagaggttttcagcaccaagatggcaaaggggaaatgcaatttccaggactatggtcatgcgcgctggggagcatttatgcagttgatcatacgcgttcttcgtcctttccacggcggcagcaggaagacaaagaaaattccagctcacaacgccaacaacatgaggattcccagccacctgccaccgaagaggaagcccatctactag

SEQ ID NO: 6579 - protein, 281 aa, DROSOPHILA
MATRQPTPRQLAYLDELKMRLQELRDRQASFMEQTAKILSRMSSSSMDGSESETLPTDSIDENVTTNTTAGVGAGITKGSKSSLNIKKLIQRFEDLRKNSQEFGDLPEVPEELINVDVRRILNGYEKLIEEGHVLQQSWFLLKKSTESCARFASANGMKSEDRPPLKTNSGIVEVCNVVPEHSPEVAETPRVKKSKSLLSNMVTSSEIVDKKAEVFSTKMAKGKCNFQDYGHARWGAFMQLIIRVLRPFHGGSRKTKKIPAHNANNMRIPSHLPPKRKPIY

SEQ ID NO: 6580 - DNA, 2719 bp, DROSOPHILA
ccgcacaaacacatggaacgtataaaaataataaattacacgaagcgagaggcaactggagtcccggtcgagttgggtcgagaagggatttttgtggagcgtttattatgcgcacaataaacgcggcgggcgcagcggcgacataaattaaatttatgatgcttataaatattccacagtcatttgtaatacagcaacaaacgagggcaacaggataacgcaaggatgtgccgagcctgtctgttaaacaaattgtagccaactcgggctgaggggaaagcaacaaacaaacaaaaacacacgcactcgcgaatgctagggagatatatatatttgatttatgggtgtgcgcggatgaataaaggactttcaactccgaaaacccgattgccaccactagaagtgaaaagaaatcgcccataaaaaatcgccatgtgcacgcatatatacaatatgtgtgtatgcttgcataaaaaatacaagtttcagccacctgaaatagccagcgaatagatagatatgcgggctaatttatggataaactgtacaaatatgatttataataatcgaatttgtgatatatctcgcctgtcgtgtcgcacattactgattctgacccaaattacggtctatgcgattctcgtcttggtgttgagtcgcgaatgcctgcctattcaattcataaatcaccatatgctaaatatgctaaaatttcactaataatttgaaatgtttaaatattccaaatgtatcgaaaagagctatctactgtgatttgtttcttttttaagttaatagttcgttggtaagtatagaaactttataattcgattttaataggttttagggaaactttagttacacttcttgtccatttcaaatcaaataattatttcaattttgaaaatatttgcctgatttattttggtataacaacaataggtatttggtaagagttcaataaacgattgataaacaattgtatagcttaggggtcaactcaatggtaaccgtgtccgtgctcgaaaccatgatcctgaccgtggctgtggccgtgcccatgtccgtgttcctgtttcagcgaatagctgtgggagctgcttccgtgaccatgtccatgaccatgaccgtgaccgtgctcctcgtgtccgtggccatagtcgtgtccggattgcgaggagtgctcctcgaactcaacgtgtccgccctcgtagccgctgtgtccatggccatggtgctccgcctggtggtgatcgtggagcttctcgcgatggacatgagcctcgaatcccttgtgcttgtccgccgtgtagtggacagttcgcttgtggccatcggcatcgatcaactcatagtgtccggtaaccgtgtggccatgtcgtgactcactctgtgacttcacatccccagtcttttgatccttgacgccgtactggaagtcatactcagcatgggagtcatggtgatcatcatgcccgtgatggtcgtgatgatgaccgtgatgttcctcgtgatgatcgtcgtgcgatgttagatgcacggaggcatgactggtggctccaccgtgatgaccgtggtgttcgtggccatggaaaggagctgcccgaatagccgcaatggccaagagggcaaaggcgatgaaaaactaaggaaaatcgaggtgaataataatttgctttagttgttatccttttttgctgaactcaccttttgagccatggtaccgcagctagtttatgagttaatcttagctagactactgttgtctgatctccagaccaaagtgaactgtacctaaaacacctttaacccggcctttttatagttggaataaatcgaacccataggttaaactttcaaaaaagaattggtaaatcggtctttagttacgccccaatttgcagttcaagatcaggtcgtactttcgccccagagacgtgcaattatattcgactgccagttcgacccttttatttagctgttgtttcgaaaatccgtaaaaaaaaaaaataaataaacataaaaatgaggaaagaaaagaatggcagtgtagtaattcattgtaaaatttactgtcgcaacaattgccaatttaaagtggcattgtttatgcatcgcatcgctgtcgttgtcggccattataatcccccggcttggagtcggatttggattgggattggtatatgtgggcatagccaagaaacaaacgagccaaaagatttatatgcctgacaaacgtcttcgagtcgttgacgtcaatcaggcctgacaaaaagtcatcagaattgcagtttgcagttctccctcggcagcggcttcttcattttggccagatcggaaaggcttgtctgctctcctcaatcccaattccaatcccatcccatcccaatcccagtcccgtttcccgatcccgatcgggatcccaactttcggtggactgttgtcccgccagtccgcctgtcagcagtcaatcggctaccgtctgtcaatgtcgtgtcgccttcatcaaaggccacattcgagttgacaatggggatattggttctgttttgtaatccgcaaaggatacggatttttgaaagtgctcaagtctggcaagaagagctacgtggctggatggaacatacttgaatgcaatttgcatttgatgcgtgaattagctgggaatgtaataattggatgagaatgttcagaaagaagggatagaagaacatggcta

SEQ ID NO: 6581 - DNA, 657 bp, DROSOPHILA
atggctcaaaagtttttcatcgcctttgccctcttggccattgcggctattcgggcagctcctttccatggccacgaacaccacggtcatcacggtggagccaccagtcatgcctccgtgcatctaacatcgcacgacgatcatcacgaggaacatcacggtcatcatcacgaccatcacgggcatgatgatcaccatgactcccatgctgagtatgacttccagtacggcgtcaaggatcaaaagactggggatgtgaagtcacagagtgagtcacgacatggccacacggttaccggacactatgagttgatcgatgccgatggccacaagcgaactgtccactacacggcggacaagcacaagggattcgaggctcatgtccatcgcgagaagctccacgatcaccaccaggcggagcaccatggccatggacacagcggctacgagggcggacacgttgagttcgaggagcactcctcgcaatccggacacgactatggccacggacacgaggagcacggtcacggtcatggtcatggacatggtcacggaagcagctcccacagctattcgctgaaacaggaacacggacatgggcacggccacagccacggtcaggatcatggtttcgagcacggacacggttaccattga

SEQ ID NO: 6582 - protein, 218 aa, DROSOPHILA
MAQKFFIAFALLAIAAIRAAPFHGHEHHGHHGGATSHASVHLTSHDDHHEEHHGHHHDHHGHDDHHDSHAEYDFQYGVKDQKTGDVKSQSESRHGHTVTGHYELIDADGHKRTVHYTADKHKGFEAHVHREKLHDHHQAEHHGHGHSGYEGGHVEFEEHSSQSGHDYGHGHEEHGHGHGHGHGHGSSSHSYSLKQEHGHGHGHSHGQDHGFEHGHGYH

SEQ ID NO: 6583 - DNA, 3884 bp, DROSOPHILA
tgccatttcgtgtgtatgtgtgtgtgtgtatgtgtgggggagcggtagctgttccagtagctcgactggtataatttagcggcaaacgtaaccgaaatgttatgatttgtgagccaatggatacgtactagctatgttacacacagatatatatatatagacttttttccggttgctcttgtttgcctttggccatgacttaaagcttttccgatatgattttgggcatctggttttggtctgaagccaactgtttgtgtcacttttccctgaaaaatgaacaggaagccagtgaaatgaaatataattgtagaattttcagttccagcaagtacttgctactaaattggcactgaagttatttatacaaacccttttgtgtaggcctaaatcccgattcagttctatcaaagttgccctgcccaattatagaagagagaaaactgatttggtatttaattttctttgatttattgatttctttgtagtgacttaattgaacattaaaatattgttcataattacacatttatgtttaggcatatgtatagaattaattataagcagttactcatatattttacaagaattttacaacttttagtttttggacaatcttttcatttcgttaattccgtaatcgtaatcgcttgaatagaataaattaaattaaaattaccgtttgcgtttagtagcaaccacaaaacacacacagacacacaaggacgagcgatatttgatgtgctgcactaatgtaatatatcatcgatattagatacatatatgtatgtatgtatatctagacgctagactccttaagctaaattgtaaacacatttgtatgtaactacagtacattagatcactagcttttcgtttcacgagtgagtcatacatatacaccaaaaaacacatagagatacgacgacgactcaagagaaatgatgggtttgactgaaggccgaactttcgcattgtgctgcgattcaatcagccgcctactacggatgcgaagatcccatcctgggaccgtataacgagtacggtgcaaaatattgggccagcgccggatgtggcggcagtccgggcattccgggtggcgccaacgagggcggcagcatcgatggcttaccgtacggatgataacgggccgccgacagcggactcagcggcggggtgggataggtgcgctggaaaagcggatgattgggcggtataccgccggcggccgctgcactcagtactgcgtccggaacggaggccgtatgggtgcgcagatgctggaacaggtcgtcggaggtgccgaatcgcttgccacagtacgcggcatcgctgccgatccacgagcagacgtacggcatctgggaggcagcggccagggcggccaactgggcgtggtacgaggaggcagctgccgccgccgccgctgctgccgcactcgatgaaccacccgatccgccttggcttccgctggatttggatgaaccacctccgccgcctccacctccctcgcactgcggacatcccgccggacacggctgacctgccgccttgtttatgtagtgcggactggccggacatccggtgcaatagggatcgcggcacacattcggcgtggccgccatcatcgactgctccgtcagccccttcattcgggcgtagttcagatacggattcatcgccgacgccttgaacatggcgtggtgtggcgacatcaacgagctggcggtcatcaagtccatggaataggggctgccgtaacctgcaacggaattgtggggaaaattcgttttagaaacagttgcagcacgatttaacccaactgataaaaaagatggctcaaaagtcaaacatatagtttgtgaacggattatcttagcaatattttccattaacaaccttttacaatcttttacatattttcaaagaatatttttgaatatatttatcagaattgtgtatgattctaccacatttctaagctccttacaaagtactcgcttgcctgggcccgcctaatctcaaccacccacaacttcagatggcacttaccgggtggataataggatgcagcagctgctgctgctgaggcggatccttgctggctggccgcgtgcagagccttcacatagttggcctccttggcggcggcgagggcggcttcctgcaggcgattcgagctggcgatttgggcagccgccgccgctgccgctgccgctgcactgggactgtgcatggcggccgactctttggagttgctgcgaccgggcgtggtggaggcggttggcggcaggccgggactgccattatgctgcatcacaccaccagccaggcccgaggtgggggtccttctcagtgagccggctgctgtcggcgattcccggtgctgcgagctggcactttggttcgagtcgcaacgctggccaccgccgttcgtcatcgatttgggggtcttaacccgctgctgggcactggtgttgttgctactgagatttgtggcgccgcaatcggcggctgtggttatattgctgatgttgttgttcggctcgtagggcttaaatgtggtcggtgtcggtttgctgctgctgctgctgccatgggcggggggcaattgctgctgctccacggaaccggtgctaacgctggatgaatgactgctaaccggtgaggatttatcgcgtgcactgccatccattgatgcctgctggctgaggccaaaggagccggatccacccgatccactcgagccctttgggtggtgctgcagttgctttgtggacttctcgatgttcgccgccagcagcttggggtttgtggtatccgccccgatggcgctgcatgtttgggccaatagcgccaacggactgcttttgttgtccagctgctgggtgaaagaagagaaaaaaaaaaaacgcaaaaacttggttaaaatttgtgtacgagtacaatatcgtgcgttttgtgccccagcgataagatcgcgtcctcattgtctttgttcggcaaacacttctttgctgactctgccccagatccttatcttttgccacaaaactggtgcgatcttgaaatgctcgtgcaactcgacttcatgctcctttcgggcgacataaataacaggcacatggtcgtaaatatctataatcccacagcaaaataaagggaattatgaggccattaaaatgtttgccaaaaaaaagtcgaacggagtgatatagaaatacataaatattgcaatgtggtgtcggaaaaaatctaactacgcccttgggagtgtttgttatttggcccatgggtacaaataaaaaactaagggcgtttcctgccgttgacatcatttttttttggattgactttttatctgtataaatgaaaacaatccgaaatcaaccaatttctcttatcataaattagagtacttcatatagtgcgctttgacgaccaactcaatccatcttactcgatttctacagttatgtgcacaactaatgttaataacatttaatcagcgctcatcaggttttatggccatttccaaatgagcaattaagctaatgaatttattagccattcgcgatgtattgtgcaatcaacaaatgccaaagttatgtgggtaaagtcaagttttggtaagttaagtgggggtaagttgtgtgaagaaagttctattattaaatgagccacgtttaggggattttaataataaaataagattgaaaatttaaattattgaaaatagtccaatgtttaattgatatgattcgataaaggaaatgatattatcaaaaacaatctactgcagctactttaattgacttagaggtgttgctaaatagttttaaaatttatagtcaacgaatcgctatgatatgatatatccctta

SEQ ID NO: 6584 - DNA, 1654 bp, DROSOPHILA
cagctggacaacaaaagcagtccgttggcgctattggcccaaacatgcagcgccatcggggcggataccacaaaccccaagctgctggcggcgaacatcgagaagtccacaaagcaactgcagcaccacccaaagggctcgagtggatcgggtggatccggctcctttggcctcagccagcaggcatcaatggatggcagtgcacgcgataaatcctcaccggttagcagtcattcatccagcgttagcaccggttccgtggagcagcagcaattgccccccgcccatggcagcagcagcagcagcaaaccgacaccgaccacatttaagccctacgagccgaacaacaacatcagcaatataaccacagccgccgattgcggcgccacaaatctcagtagcaacaacaccagtgcccagcagcgggttaagacccccaaatcgatgacgaacggcggtggccagcgttgcgactcgaaccaaagtgccagctcgcagcaccgggaatcgccgacagcagccggctcactgagaaggacccccacctcgggcctggctggtggtgtgatgcagcataatggcagtcccggcctgccgccaaccgcctccaccacgcccggtcgcagcaactccaaagagtcggccgccatgcacagtcccagtgcagcggcagcggcagcggcggcggctgcccaaatcgccagctcgaatcgcctgcaggaagccgccctcgccgccgccaaggaggccaactatgtgaaggctctgcacgcggccagccagcaaggatccgcctcagcagcagcagctgctgcatcctattatccacccgttgggttaaatcgtgctgcaactgtttctaaaacgaattttccccacaattccgttgcaggttacggcagcccctattccatggacttgatgaccgccagctcgttgatgtcgccacaccacgccatgttcaaggcgtcggcgatgaatccgtatctgaactacgcccgaatgaaggggctgacggagcagtcgatgatggcggccacgccgaatgtgtgccgcgatccctattgcaccggatgtccggccagtccgcactacataaacaaggcggcaggtcagccgtgtccggcgggatgtccgcagtgcgagggaggtggaggcggcggaggtggttcatccaaatccagcggaagccaaggcggatcgggtggttcatcgagtgcggcagcagcggcggcggcggcagctgcctcctcgtaccacgcccagttggccgccctggccgctgcctcccagatgccgtacgtctgctcgtggatcggcagcgatgccgcgtactgtggcaagcgattcggcacctccgacgacctgttccagcatctgcgcacccatacggcctccgttccggacgcagtactgagtgcagcggccgccggcggtataccgcccaatcatccgcttttccagcgcacctatcccaccccgccgctgagtccgctgtcggcggcccgttatcatccgtacggtaagccatcgatgctgccgccctcgttggcgccacccggaatgcccggactgccgccacatccggcgctggcccaatattttgcaccgtactcgttatacggtcccaggatgggatcttcgcatccgtagt

SEQ ID NO: 6585 - protein, 487 aa, DROSOPHILA
MDGSARDKSSPVSSHSSSVSTGSVEQQQLPPAHGSSSSSKPTPTTFKPYEPNNNISNITTAADCGATNLSSNNTSAQQRVKTPKSMTNGGGQRCDSNQSASSQHRESPTAAGSLRRTPTSGLAGGVMQHNGSPGLPPTASTTPGRSNSKESAAMHSPSAAAAAAAAAAQIASSNRLQEAALAAAKEANYVKALHAASQQGSASAAAAAASYYPPVGLNRAATVSKTNFPHNSVAGYGSPYSMDLMTASSLMSPHHAMFKASAMNPYLNYARMKGLTEQSMMAATPNVCRDPYCTGCPASPHYINKAAGQPCPAGCPQCEGGGGGGGGSSKSSGSQGGSGGSSSAAAAAAAAAASSYHAQLAALAAASQMPYVCSWIGSDAAYCGKRFGTSDDLFQHLRTHTASVPDAVLSAAAAGGIPPNHPLFQRTYPTPPLSPLSAARYHPYGKPSMLPPSLAPPGMPGLPPHPALAQYFAPYSLYGPRMGSSHP

SEQ ID NO: 6586 - DNA, 4627 bp, DROSOPHILA
acacagaggatgccatcgggctgggtgccgtaggtgcgggagcattccgagttgctaatgatctgcaggtcgacgcactccatccaatcgggctgggatccggcggtggtcagtccccaaccgcaggcgacggcccaatagttgtcgtacatgttgtagcgatcgttgaagctgggcagctccaccttgttaaccatgtgccagaagtccacgtggggggtgcggatcaaggcgatgtcgttgccgttctggttgggccagttgtggttctggatgaagtcgccgctgccgacggtgtgggtgaactgggcgttggtgcgccaggtggctccgtagtagatggtcacctgggaggcgccgttggtgcagtgagcagcagtcaggacccaatcgtgggcgatgatagaaccaccgcaccaccagccgccgttgccgctgaagcccagacccacggtgtagggagccttgccctcgtaggctggatatccgttcacaatgcggccattgatcttggtgtccttgggcaggtccttgggatgaacctgctggacagtctcggcggagacagcggccaaagccagagccagtacaacgaacactttcatggtgattggatcaatcgtggtctgcgccagacttccatccgtttttattgcgccccttatcgctgtctggagtagcccccactcggcgttatcctatctctaagaaattcgccctctgataccaatggaaattaattgatagcacgtctaagaacatcttgataggcaaaaaaaataataactcgcttttaggaaaaattctaagctgattatcttcgcttacaaccgacgtaggcaatataagaaaacagaaatgattttaatttaatttaaggactaaataatttatacataatatatacataataatgtatacatagagtatgtaaaatgtaaaaataatttaaaataggcgcccaatgtaagatgtaaggattgaaaaatggctcacctggtcacacagagccatgcatttattgtttatatattccgccaaattttatcaattgatgtcgcagcatgtccacttgcagttcatccgagatagcggagaagaagcgcattgcgctggccaaattgcaggccaagaaatcccagctgctggccagcgcacccgcaaccaatggaaaatcaacaacgtctgcaacaggtgcgacgcaacatgcgaataatggaaaatcaaatcccaatcaaccgcaggccaaatccccattgaatttctaccgatcaccgacgggggagcagaagaagatcaacaggagcggtcccacgcccggtgacaacaagagctcatcctttctgaacgctctgaaagcaatcaaacagacatccaaccgggaattgtcccgcggagcagcacatccttaccagcggccaaatggagggaacgaaagaaacaagcccactctttcactgagttcggataaggagaaaccggtggctgtgctactcggaaactccatcacgtgtaatctctacttgatcagcacacatcggtttgctgcccaaacctcaggatatcacgaacagctcgtgaccgtgttcaagaacatgcccaccaagtgctacgatggccaaacccgtatctggagtttcgatctgtcggactaccaatccctgaaaactcatgcagcggatctaaagccatatgttcacatgaatggcattccgaagaaggtgctggatctctgcggccagccgccagtagttccggaaagaagtgttttagcttccatagaaccgaagctggcggaccagctaatgcccttccaacaggatggggtatggtaagcattgcttgtatgctatgtacttccaaaagcgctaaatttatcatatgtttagctttgccatagcccaaaagggacgcattatgatctgtgatgaaatgggcctgggcaaaacctatcaggccttggccgtagccgactatttcaaggatgattggcccttgcttgtctgcaccaccgcttctacgagagacagttgggcgaaacacataatggatctactgccgaaggtgcccatccactatgtccaggtgctgaacaacaatcagctatatgtgggtgaggccaaggtgctaatcaccagctacaatatgatggagcgacacgaagataagctgatgcagcggaagtttggtttcatcatcttcgacgagtcgcacacgctgaagaacagcaaggccaagtgcacgacaacggccaaaagactcacggatcaggcgaagcgggtggttttgctatccggcacaccggctctctcccggccattggaactttttacgcaactgcaaatgattgatggcaaattcatgaatttcatggagttcagtatgtcaagaatgtctgtttaccttagaacgcgcttatatcgattaacacattcacagctactcgttattgtgatggaaagcagtcaacttttggttgggatgccaatggtcaatcgaatttggaggaactgaaggtcatacttcaccttaaatatatgctgaggcgaacgaaagtggaggtgctgcctcaactcgctgagaagaaccggtgggttgttcacattgttgtatatctataatatattttctaacatttcgaacattcttccatccgcagtgagactgtcgtcctggatcccgccctagtgtggaccaatgcggagaccaaggaaaccttggatgcgtttaacaaagagcttaaaaccgctaaaggcagggcaacggaagagatcttactccgtttctatgcacgcactgccgaagtgaaaactcgagcggtctggtaataaaaaaaatcattaaaaccatataaaccatctgaagttaatgtattatcctgcattatagcgcctacctaaaaaccttagttaaggagcagaaaaagttcattatctttgcccaccatcgtgtcatgatggacgccattagcgacttcctcagtggattgaaagtacactacatacgtattgatggacaaacgcgtagcgatcacaggtcggattctgtggacacgttccaaaagaagagcagttgtaaggtggccctgctctccctaaaagcctgcaattcaggaataacgctaactgcagctgagatcatagtgttcgctgaactggactggaatcctagcgtaagcttcgcttatatgttaacttggagaacgcttaaatttagttttattttatgtgcagactcttgcccaggcggagagccgtgcccatcgcattggtcagacaaaaccggtgatttgtcgctatctgattgctcacaatacggcagacgatataatctggaacatgctgaaaaataagcaagaggtgcttagtaaagtgggcatctttgccgaaaatcttcagaaagcaacacacacagcagcacccacttcagtaagatacattttgaatactttgaaaaatgtatttttcgctaactcaactttttttttagtcccacaagatcgaggagtacttctcgccctccacgtccacctcccttgaaccggaaaggaatagcataaaacaatatttttcaactattccagctaaagagccgcctgagcaaaataataatacagaaatgaccaaagtaaacaaggctgagtcggatatcgcggcgttctttaacgatgatgatgatgaggcttttttggaattagatatttagattgtgtaatggaatttaatcctagaatgtttattgagttaatcgtaataaattgtatttgagaatgttatagcattgaatgaaacttgttgaacgcacttctgcgcatgctccacgtttgcagaactcttttcagatagccggtttcatgtgacctggcaacaggcaaacaaacactcaagtaaaccttttcacttgtatcaaataaataaatacacagcaagttaagttttgtacaataatagctaaataatatggatactacgcaggaatctgatctgctgggcgaagaggaggagttggagaatgagaacgacgtatcctttccgcgtgatatcgtcagtgtagagtgagtacggaattggaagttgataactttttcttgattggaaaacttctgctgcagacactcctttggttacgattgtaagaagctgtttaatttggtccttgtggattcagacacgctggtttttgcctctggaaacttcctcaactactttagcatttcgcgccaggagatttcctttcaggaaacggtctacggctgcggagtgggctttataacggtgagctttttagtacctttgagtacctttgtatgatctaatggtactccattgccagaaaaacgagcatcctgactacaccaacctctttacggtgggcgagaacggagctcgtcccactgtctttatctacgagtatccatcgcttaatgtccgtgttaagctactgaatgcagctcagaattgttttacggcgggctcctacaacaagacgggggaattgttcgcctcgcaggctggctatccggatttcatcataactatctggcgttgggagaacgctgaggttgtcctgcgtgccaagtcctttcagagcgacattctgttcgtgcacttttcggagcacaatccca

SEQ ID NO: 6587 - DNA, 2258 bp, DROSOPHILA
tcacacagagccatgcatttattgtttatatattccgccaaattttatcaattgatgtcgcagcatgtccacttgcagttcatccgagatagcggagaagaagcgcattgcgctggccaaattgcaggccaagaaatcccagctgctggccagcgcacccgcaaccaatggaaaatcaacaacgtctgcaacaggtgcgacgcaacatgcgaataatggaaaatcaaatcccaatcaaccgcaggccaaatccccattgaatttctaccgatcaccgacgggggagcagaagaagatcaacaggagcggtcccacgcccggtgacaacaagagctcatcctttctgaacgctctgaaagcaatcaaacagacatccaaccgggaattgtcccgcggagcagcacatccttaccagcggccaaatggagggaacgaaagaaacaagcccactctttcactgagttcggataaggagaaaccggtggctgtgctactcggaaactccatcacgtgtaatctctacttgatcagcacacatcggtttgctgcccaaacctcaggatatcacgaacagctcgtgaccgtgttcaagaacatgcccaccaagtgctacgatggccaaacccgtatctggagtttcgatctgtcggactaccaatccctgaaaactcatgcagcggatctaaagccatatgttcacatgaatggcattccgaagaaggtgctggatctctgcggccagccgccagtagttccggaaagaagtgttttagcttccatagaaccgaagctggcggaccagctaatgcccttccaacaggatggggtatgctttgccatagcccaaaagggacgcattatgatctgtgatgaaatgggcctgggcaaaacctatcaggccttggccgtagccgactatttcaaggatgattggcccttgcttgtctgcaccaccgcttctacgagagacagttgggcgaaacacataatggatctactgccgaaggtgcccatccactatgtccaggtgctgaacaacaatcagctatatgtgggtgaggccaaggtgctaatcaccagctacaatatgatggagcgacacgaagataagctgatgcagcggaagtttggtttcatcatcttcgacgagtcgcacacgctgaagaacagcaaggccaagtgcacgacaacggccaaaagactcacggatcaggcgaagcgggtggttttgctatccggcacaccggctctctcccggccattggaactttttacgcaactgcaaatgattgatggcaaattcatgaatttcatggagttcactactcgttattgtgatggaaagcagtcaacttttggttgggatgccaatggtcaatcgaatttggaggaactgaaggtcatacttcaccttaaatatatgctgaggcgaacgaaagtggaggtgctgcctcaactcgctgagaagaaccgtgagactgtcgtcctggatcccgccctagtgtggaccaatgcggagaccaaggaaaccttggatgcgtttaacaaagagcttaaaaccgctaaaggcagggcaacggaagagatcttactccgtttctatgcacgcactgccgaagtgaaaactcgagcggtctgcgcctacctaaaaaccttagttaaggagcagaaaaagttcattatctttgcccaccatcgtgtcatgatggacgccattagcgacttcctcagtggattgaaagtacactacatacgtattgatggacaaacgcgtagcgatcacaggtcggattctgtggacacgttccaaaagaagagcagttgtaaggtggccctgctctccctaaaagcctgcaattcaggaataacgctaactgcagctgagatcatagtgttcgctgaactggactggaatcctagcactcttgcccaggcggagagccgtgcccatcgcattggtcagacaaaaccggtgatttgtcgctatctgattgctcacaatacggcagacgatataatctggaacatgctgaaaaataagcaagaggtgcttagtaaagtgggcatctttgccgaaaatcttcagaaagcaacacacacagcagcacccacttcagtaatcccacaagatcgaggagtacttctcgccctccacgtccacctcccttgaaccggaaaggaatagcataaaacaatatttttcaactattccagctaaagagccgcctgagcaaaataataatacagaaatgaccaaa

SEQ ID NO: 6588 - protein, 701 aa, DROSOPHILA
MSTCSSSEIAEKKRIALAKLQAKKSQLLASAPATNGKSTTSATGATQHANNGKSNPNQPQAKSPLNFYRSPTGEQKKINRSGPTPGDNKSSSFLNALKAIKQTSNRELSRGAAHPYQRPNGGNERNKPTLSLSSDKEKPVAVLLGNSITCNLYLISTHRFAAQTSGYHEQLVTVFKNMPTKCYDGQTRIWSFDLSDYQSLKTHAADLKPYVHMNGIPKKVLDLCGQPPVVPERSVLASIEPKLADQLMPFQQDGVCFAIAQKGRIMICDEMGLGKTYQALAVADYFKDDWPLLVCTTASTRDSWAKHIMDLLPKVPIHYVQVLNNNQLYVGEAKVLITSYNMMERHEDKLMQRKFGFIIFDESHTLKNSKAKCTTTAKRLTDQAKRVVLLSGTPALSRPLELFTQLQMIDGKFMNFMEFTTRYCDGKQSTFGWDANGQSNLEELKVILHLKYMLRRTKVEVLPQLAEKNRETVVLDPALVWTNAETKETLDAFNKELKTAKGRATEEILLRFYARTAEVKTRAVCAYLKTLVKEQKKFIIFAHHRVMMDAISDFLSGLKVHYIRIDGQTRSDHRSDSVDTFQKKSSCKVALLSLKACNSGITLTAAEIIVFAELDWNPSTLAQAESRAHRIGQTKPVICRYLIAHNTADDIIWNMLKNKQEVLSKVGIFAENLQKATHTAAPTSVIPQDRGVLLALHVHLP

SEQ ID NO: 6589 - DNA, 4341 bp, DROSOPHILA
ctcgcgacttccaatatgaatttattttcgtcacaagccataaacaacttaagtttgagggtcattaactaaaatccatccacttattttaaacacgaacagctgtgccaacaatttgtcaaccaagcagaccgaaatacacatcataaaattaatatacggaatgtttttacaattatcataaaatatacgaatatgaaattttcataattctcaaaagtaaacaaattgtgacagaaatacgaatttagagacttaacctatacgcataatgcagattcttgagtgacttttctcgaaggcaaaatatttgtctgcgataaatctccatcgtttccccttcattttttttctttcgacggccacacgacccagcgaaaagatcaaagccaaatagcgaacacattttttattgtcgtgccttattaataatgttgaaaatgctgaagtttttaatactcttgcatgatttgtggccagtgacaaaatccattagatctgacatttggtgcgaacagattatgtttaaatatataccttttcggggtctcgaaatctatgacatctatggctaaaaggggtagaataaaaaaccacacatgaattccattgggagcacattaaatgttttatgtgtttatggttacgcctttaaataggatatttaattagtttcagtgttttgccagagcgttgcaatcaattaattagagcaaatcaattgctttgaccgtgtgctaatcacatgcatttttaatttgtaatcgattaaattacctggcaaactggaaactcagtactacagactttcggaatgtttcattgtgagtgcgaaatatcgttatgtaggacaactttatttacccgtttaagtgctatgaactaaacactgactgtgttttttttatggcaactgatttaattcaattgagtttgctttacatacataatggttaatgtttttttgacgaagtatctttcggcctttaagaccatcgactagttctcagatttttcctctggtaaatccactgagttctgctgttgtatcttgtgcttcctgcgatcgcggcagctgccacagattctcatgcagaagaagtagattagctccaggaaactcagacatgagattcccataaacaatccgcagataccgccgcagttggaaatcaatgtggataccccgaaaagaatagtgcgtttaatggccgtaaactgatgctccttaaagtagacggagagtcgggatccaattgcgctgaaagatggttttgagttataaagtattatgtataaacaaacagtaatgttagttatttgtcatactcactccgtatgctcgtattcttcgcggaaggctcgaatggttttagccacatcgtatttggccctagatatctcgaaattatattccagcgaagtgcaggctggcatgcagttgcaggtgatgtccacactttcatcaatactcttggccatcgtttggttttgcatcagcgtgtagagttcatcctgggccgatgtgtagcaattgatgtccttgaggccacaaacgggagtgccaagaggttctatacagaaaattcgattaaatcgagttaatattttatcaattccaaagttcactcactgggcatccagaatttggcacaaccgcatttggaaaccgtatagttggccagacattcggtttggcagttgctctgggaataggaacggaagaatcgtagcgatcgctcatcatcgaacagacattggcgtctaaatatggatataaatatgttttgtatcgcatagtgtcatcccttttaacacgaatccactcacttttcgggtgtaatttcgtgcaaattgtcagtggacacgacatatgctggcagcacactgaccaggacctcatcgccatgagggactaggatataattgcccgtcgtcagcggcacactctccggggagttgagaaagacctgtcaaattacacattagctgcgcaccggtccacacccagttctaaccacacaccttatagccctgtttgaaactgcgacaatcgtagtcgaaattatgctgcaaaccctgcagaaaggcgaagaacccatttttcaccgatgagaacaccgtccgttggggatacgcattctgaccctggtccacgaatccagtgtccagtgaccaattgccagttatgttgttccacggaggcaaatccacatcgaagtacttgttgaagtccaccacatccggatccacatagctgatgaacttctcgtcacgataaatgtccttgggtcgcagtccattgaattgatagcagataccctcgtcggtggccacaaagtcgaagatcttgtcacagaagtaaaagcgaccattccacttgcaaaacggacccgtctcattcttcgatatactcaagtcaatcagagtttgggttacgtccacgttcggcggatttagctgcgatagcaatggagtaaaccgctgcaccacttccgaatcacagatgtgcattgcaaccgccattcgagccaggctaaagatatggaaaatgattggtgttaagactggtgattttacaaatcaaagctttaaagacaaataaggcttgaaaagaataatcgagatcagcagatcatctgtatataaaatttgttaaattactaagtgatctaagggcctacccttaactataaaaagtatatgctgaaatactcaactcctcatcatccaaatcgctgatattgccattctgtttgtactcctcccaaagttgtcgcgatacgttagtatagtcaaagacattgcgttccattttgatttccggacaaatggtaattgtgggaaacggtatcttatgcactggcaccaaagtctcgtcgaaacctagaataaccggcgattcctgccactttagataggtgtcccagataagtgaaacggcaaagtaaacggaaatgcacgtgaagaaaagccaataaagtctggaagaaaatcaaagttattctataggttcctaaagggctctattctctacagacttttcatagatcggtctgtgaacctcgaagatgtagcgtatgccgtgaatggtcgtgctcttcgcatactccaaaagtaatcctttgcaggctgacagaggactgccgtatcgaatgcgagacttaatgatcacatcacttggaacatcacttaatgcagccgatgcaatactggcccgggtatcgaagccgggaagcgccaatagttccggaccgggcagaatgctgatgcccgacttcttttcctcctcatcctccctgatctcggccattgtccaaagagcaggactcgtggaattcgactaagctgcgccacacatgcggagtgtccttttatagccgtttccccgcgatggaacaccacaaaactgggtgcgctcttcagttccgatgggtccttgcctggggacttcaattcgcacgcactcatttacttaagcttaattacagacccacaacgctggcactactttcatttgcaccatgtactaactatttatttacactatgcaataatgtggttcttttaatacaatggtccgacatctctagatataagaactatatctaacagatatttaacagatacccgttacttagctaccacctacatttacagctcataactcttcgacgtcattgagtttgttaacaatccctaagtttatattttaatatgcttctaggaaacaaccgaatgttttatcacaaatgtttacctttctttctctagcgagtaacgaagcaacaaagtttctatttacttaaaatttgatattggagtaatatcgaacttagttatgatatacaaacatggttttgctcacacttgaacttcaaaggtttccccccttcgaaaattccttccattcacctgggaataggttggaatccttgcaattgtaaaaaaggaccacttatcaaatcatctcgtcgccgacttaccgattttggaagtatcatcgagtagttaccgtgattttatgctaaaaagattgtcacccatggtcgaaatgccggcgaacattactctttttccgaatgctcgacatcgtttaaacatgttcctggaatccagtgggatactctccttttatgccggcctggtattgccattggtattggtattgccaatggtattggtattggtggcggtatcgtctggtggcattcgtgcgtggcttgattttgtctgcgtggcagggcgatgcacacaccccaactcctgttgccaactcttgaatgtggctcagttgttggcacttatttggggacattgtcatcgatataaaacggaaag

SEQ ID NO: 6590 - DNA, 1848 bp, DROSOPHILA
gaattccacgagtcctgctctttggacaatggccgagatcagggaggatgaggaggaaaagaagtcgggcatcagcattctgcccggtccggaactattggcgcttcccggcttcgatacccgggccagtattgcatcggctgcattaagtgatgttccaagtgatgtgatcattaagtctcgcattcgatacggcagtcctctgtcagcctgcaaaggattacttttggagtatgcgaagagcacgaccattcacggcatacgctacatcttcgaggttcacagaccgatctatgaaaaactttattggcttttcttcacgtgcatttccgtttactttgccgtttcacttatctgggacacctatctaaagtggcaggaatcgccggttattctaggtttcgacgagactttggtgccagtgcataagataccgtttcccacaattaccatttgtccggaaatcaaaatggaacgcaatgtctttgactatactaacgtatcgcgacaactttgggaggagtacaaacagaatggcaatatcagcgatttggatgatgaggacctggctcgaatggcggttgcaatgcacatctgtgattcggaagtggtgcagcggtttactccattgctatcgcagctaaatccgccgaacgtggacgtaacccaaactctgattgacttgagtatatcgaagaatgagacgggtccgttttgcaagtggaatggtcgcttttacttctgtgacaagatcttcgactttgtggccaccgacgagggtatctgctatcaattcaatggactgcgacccaaggacatttatcgtgacgagaagttcatcagctatgtggatccggatgtggtggacttcaacaagtacttcgatgtggatttgcctccgtggaacaacataactggcaattggtcactggacactggattcgtggaccagggtcagaatgcgtatccccaacggacggtgttctcatcggtgaaaaatgggttcttcgcctttctgcagggtttgcagcataatttcgactacgattgtcgcagtttcaaacagggctataaggtctttctcaactccccggagagtgtgccgctgacgacgggcaattatatcctagtccctcatggcgatgaggtcctggtcagtgtgctgccagcatatgtcgtgtccactgacaatttgcacgaaattacacccgaaaaacgccaatgtctgttcgatgatgagcgatcgctacgattcttccgttcctattcccagagcaactgccaaaccgaatgtctggccaactatacggtttccaaatgcggttgtgccaaattctggatgcccaaacctcttggcactcccgtttgtggcctcaaggacatcaattgctacacatcggcccaggatgaactctacacgctgatgcaaaaccaaacgatggccaagagtattgatgaaagtgtggacatcacctgcaactgcatgccagcctgcacttcgctggaatataatttcgagatatctagggccaaatacgatgtggctaaaaccattcgagccttccgcgaagaatacgagcatacggacgcaattggatcccgactctccgtctactttaaggagcatcagtttacggccattaaacgcactattcttttcggggtatccacattgatttccaactgcggcggtatctgcggattgtttatgggaatctcatgtctgagtttcctggagctaatctacttcttctgcatgagaatctgtggcagctgccgcgatcgcaggaagcacaagatacaacagcagaactcagtggatttaccagaggaaaaatctgagaacta

SEQ ID NO: 6591 - protein, 606 aa, DROSOPHILA
MAEIREDEEEKKSGISILPGPELLALPGFDTRASIASAALSDVPSDVIIKSRIRYGSPLSACKGLLLEYAKSTTIHGIRYIFEVHRPIYEKLYWLFFTCISVYFAVSLIWDTYLKWQESPVILGFDETLVPVHKIPFPTITICPEIKMERNVFDYTNVSRQLWEEYKQNGNISDLDDEDLARMAVAMHICDSEVVQRFTPLLSQLNPPNVDVTQTLIDLSISKNETGPFCKWNGRFYFCDKIFDFVATDEGICYQFNGLRPKDIYRDEKFISYVDPDVVDFNKYFDVDLPPWNNITGNWSLDTGFVDQGQNAYPQRTVFSSVKNGFFAFLQGLQHNFDYDCRSFKQGYKVFLNSPESVPLTTGNYILVPHGDEVLVSVLPAYVVSTDNLHEITPEKRQCLFDDERSLRFFRSYSQSNCQTECLANYTVSKCGCAKFWMPKPLGTPVCGLKDINCYTSAQDELYTLMQNQTMAKSIDESVDITCNCMPACTSLEYNFEISRAKYDVAKTIRAFREEYEHTDAIGSRLSVYFKEHQFTAIKRTILFGVSTLISNCGGICGLFMGISCLSFLELIYFFCMRICGSCRDRRKHKIQQQNSVDLPEEKSEN

SEQ ID NO: 6592 - DNA, 13486 bp, DROSOPHILA
ttagacagcgccaaagctctcttcgcacttgcgtatgaagtgcccgccatagcaaagcggatttttagcgcttgtttaccaactggctcgttggtctaggggtatgatttccgcttagggtgcgggaggtcccgggttcaaatcccggacgagcccaagatggagtagtttttttgtgtttattttttatttcctttaacttcccagaaattgagacataacaattgctagtacaattatagaggatgtaagaaaaacagcaagactaaaattcatcttcggcaatctcaacccctttatttaattaaatcaacatcattttgcatatataaaaagctaagccaacttgaaaagaaagactcaacgtccaacgggttcatatacacacaaataaaaaaaaaacaatgtttgaagtttgattacgaaatatttattatcggagcacttaagcgaacaattctaattacatttgtatatatatcatattatctgcaagtgcacaaagttaagcttttagaattaaagactaacgaagggctttaaatgttattgctctacccatcctttttgtcatttactatcttttaagaccaccattggaaaaaaatagataatcatcttgggctcgtccgggatttgaacccgggacctcccgcaccctaagcggaaatcatacccctagaccaacgagccaagtgatcgtcgcgactcacataatcagaccaattttgcgcagtaatagttggtcttgctcacaatttccatcaaaatatttttaaaatgtataagaactggtttcatagatactttcaaggctggagctttctgttgaccatgaaagaaacctgctcttttcgtgctgtgatatgagtaagctttttgaccaacgtaagacaactggctcgttggtctaggggtatgatttccgcttagggtgcgggaggtcccgggttcaaatcccggacgagcccaagagaaaagaactttttgtttcaaattataaactttgcttatactttttatttttgttgcacaaataacgacttatgggtaaataatattaacatttgttgttttgccccgcttatttaataagattaaaattgctttaattaaggtagaatatattgattaataccaatggttaacaaaacaaaaataaaattagacgatatattgtttgtattttctttatgtataatgcatttacatgtatgtaagctgaaaacaatttcgatttatttaatacaaacgaaaaaagaagcaactaagcttgaatacttgttgctcgcttgaaagttgacctatgaactacataaacataaataaatgacacattttgtggacatagagaattggataaacgtacagtagaataacatacagatacaaagatagaatagatgataaatacataaatttggcccaaaattgttgtggtttttcttgctgttgatgacgcagtggatgctgctgttgttacatttgttggggttagttttccattgctcgacgtcccttccactttttgcattggaagggggtgaacagtcgttgttagctaaactccattggaaatctgaagctcctcatatatgtatgtatatatttcatttgactgctacatcaccaacatcatcatcatcatcttagttatgatcttcaaccagttttgcgctctgttagagtaatgttattcgttttatgtacatacatcatggatgctgtgccgttcgattttgttttgcatttggttgcttggtttaattaatatattttaaataattataattatttagttattattagcactaattattctttggttgttccactggttctgtttgttgttttcttgctcttggttattgcatttcattttcgttattatttgttcgatttgttcattgtgctttttcttcctgggctacctgttgctgaatgttaatgacggcagccgttttaaacatttgcttgtgactgggcttttttggatcggttgttggtgctgttgttgttgttgttatttctgatgatgctggtgatgtctgtgcagcggatttccttaaactcttgccaaacgtggaactgcccttcagacctgcaaagagtcccaaaaaagaaggaaatgtatctaaaattagttatattttaatttttacagaaagacaaatatacaaatgtgtgattataacgacaggagcactgggaaaggatctggagagattgacggaaagactgaagacaaaagcagagacagccgtgatgataacgattacgtgtatagagtgtagagagaagagtacgctgccccaggagggaatagagtggatcgagaatggcgtttttgcgtttaccttggtagctcaaacgattctgatagatggcaaatatatcgaagggcctgtagcatggctcgtaaccatcctcgggcccatcgagatctcgatagagttgcgatctctgactctgatcagaagcgtttgcggctggcacgagggaactgtttagcatatgggagggtatcacgaagagactttgctccattttctcgggtggcgcccgcgatgaatcggcggtttctctatcggaatcgggattggactcagtttcgctcggggccgctgatgtggttgttgctgtggctgtagttgtggttgtggcagtggttcttgttgctgtggcacccaatatttgtggtgcaggcttgggaagttggttgtagttgtgttgtgttgtttgtgttgtgtttttatattttttgtatttttttttttgggatagtggaagatggtaacaaagtggattagttgttgtctgcagttgtagtgattagtgttagtcacaatttatactaattgatctagagttaattaaggggttctaagtgatataatactgcagtttcttacctcgctatcttcacaatcagcatcttctcgagcgtcggaggtcaggccctgcacgaagtgaacatcatttgatggatcatcggaggccaagtgagcacgaaattgtttgtttctgcaagatgtcattaaagtaagggtgtccaattgaatataaattaccgtacctcagctccagttgctgcatctgctgaaaatgtcttagcttgctattggccatatgcagtttttcctccaaggccgcgttctccacacacttgatggaatacttttcggaaaatgcgagaatttccattcgcagctctccgagatcctccctaaatagaagataaggttcgttttagttttaatcgaattgtgctcaaggatttgatatttgtatgcatgtgttttaggccatcttccacaaaatattcattctatacttactctttcagtttggcgccatcccctcgcatttgttcgcctctttgaacctgtcgcagaaactcctgcttgaatcgagccacctcccgctgaacttcactctggtgtgcttttctcatcgcatccagagcagccaaagtggcctgtaaatgtagtaaataaatccaaagaagttaagaatccaaacaaaggtggattggcgggctatgagctgtacctgagtttcctcggccagggcagtttccttctcggccagcaggcgctctatctccatcttgtgtttctgctcaagatccatagtaagccgcttatgcgaagtttccatggcactcaatcccttctcgcagagtgtctgaaatgtacagtatgaaagttcgttattaaaacggatttaacttttatttatttatttatatactataatatatgccatataaatgattttttttagcgtacagtgggttgcagtgtttaaactcaccctcagctgttcgatctcagtttggtaccgctttcggaaactctgctcatcggctgcgttggcatgttcggtgtggtagacctccctcaggcactccagttgcttgccatgttcccgctcgaggagctccagtcgcttttccagtcgccgacaacgctcctgctgccttcctaattcctcgctcagctcctgacgctgctgcaggagcagttcctgctcctgctcctggctggcgcacttttccagtgcttgggccaggtcagtctcccgctgctccagcagctgctcactccgttgcaaatccgtttcggtttgctgctgcaaggcggatagcttttctacacgctgacgcagatcgcaacacttgtgacacgaatcctgcaagcaagtcagctccatctgctcactgaccatcacacatgtttcggccagagctcgttccagctggcgtaggccatctttgcgatcgttcatgggcgaaacggagcgacgagtcctttggccggcgcgaatttgctgcaattgggtgagactctgctccagacgctccttactgccgaggagcacgtgctccaggctgtgcaatcgctgcaacaggtgggcatttagtggtgactggctactggattcgctgctggaagactcgggtggcgtaccctcctttctctccaccgtttccctttgcaactcgcttagtttcagttccagttgctctttacccttcaaggacaacgaacgtctcctctcggatttggccaatttctgcttaagagcccgcacctgacgctccgaactgctgtacttcagggtcagatcctgaatacgggctgccatcagctgcagttgggctccatcctcgtgctgccgcctctccagcttctgctgcagcgcagcttgtgccagctccaaggcatcgtattgattttgcgactgcttcagttcccgcttcatggctcgaatttcgttaacggccttctcgaagcgggatctcagctcattgtactcctcggccagcgaatcgcgttgcaggcagtagggatcaatgtcgctgatggtggttagatcgctcagtgagtccatgcgtttaattttgtgacgctgcaggttgctgagagcggcaccaccactgtgatcctgagcctgtaactctctcaaacgcttgtagagtccttcgttctcctcgattccctgcgccagacggtcctccaactgcttgatttggcactgactctcggtgagctgcattcccaaattgtgcatcagatcggaggcactctgtttggcctgggtaagttcgctattcaactgctgttgttgctcctgcagccgggcagtcaactgttgttccgttctttggagggtggccagtagctccgacatgcgggcctcccgcagtgaagcctctgcccgcaaggtctcgcattgttgcttgagttccctgctctcggttggctgcatttcctcgggaactactaagagaggcaattcatcactggccacactgtctacagtactgcgccgtgaacttggtggcgaactgcgactccttttgtgcaagctggccaagcttcgattgcgcagacaacttctcaaaacaggtggtgatggtgacaacggtgatccccagtccagactatcccgcctgccgccctccgatgccgtcctgtactcctcatccgaggagaaatgtggacctgctggagtgcctggagtgacgggactcgacgatggctgttgcagttgagccttgataaagtcctgctctatatctgtctgtttgggtggtgtgtctagttggggcaatccggcagcacttctcaggaccgccagccagctatttcgcgaactgggcgacaagctggccaaaaccaagcgctgtttgtcccaagtggtcagctgaaaagcgtgctgtttgcttgccgcaggttcgggtattacgctggttagactattaacatccaggacgccgtcgagaacacctcgttcctcgcacaggggatctctatagtagaaaagcgctgcaccgctcaaggtgaaccagtgcttggaccactcacaagtccgattgtcctgcttcatgagccaacccttcttggcattcagcgattcctccttaaccggaggcttaccttgaccagaggatgacttactgttggccttgcccaccgatcgcagctcatccgttttggccatgtagttaacacacagctcgtccagattgcatccgccatcgggatcgcccctctcgtgttggtaatgtttcggtgactttaggtgtaattgcagcctggcagtgggttttgtcttgtcaccctgctccataaccgtgggtatctttttgactatggccgaaacaatcgcaggcgtggagttagatgccaggggcagggatttaggtcgctcgctggctgggttttgggatttggtgctgctgctgttggaggacatctggaagtccgtctcatccctggatgtcacttggtactggctgtgatggccgaaatgatgctggttgttcagggcattgttgaccgccgtggaccagcgtttgttctgctgttgactcagattcgttatggtgttggcaatgtccttgatcgtcttttcatcacgtcgaatatcctcgattagcaagcatgtcgtgggctgggaaactgaagaaatgaaaaaattaaattaaggaacaagtcaaattgtatttagcttagcttttttttaccaaagatcaaagcaaagactatttagtataattaattcaatgaacccaaatcaccattaaccaccatcaaagaataaagaaaagatcgttaaaacagataaccaggcaattataagtatacaagcttgtcggtgatcaaggatcataaattgtccatcggccttagccaaaaacaaagctcaaccagcaatctacgcattcttttctcataattggctcagcatcttcattaaatactttgaaatatgagcatgttggtaatttcatttggctggctggctggccggtatctctcttggctaagcaaaccatatcaatgccattgactgaaattaacttagacacaggatcgtgtggacggtggattgaggactgaggattgaggactgaggattgaggactgaggattgaggaccgagaattcggagccacactccacccctaacaatatttatgtccagcatagggccgtaaaacgcgcagagagagccaagttatgtgcgggcaaatataataaaattattaaaacgggcacacggtgtattgtaaggggatccgagggatcgcgataagccaggccagaaagccctgaaagagatcccgagagcgctgcagagtgccataattttattaacacccaaacaagtcgaggaggacaagccatcaagtacgaaccagacgaacgagaggcaagcaccgagttgtcccataaaatatgtgattacaaaatatatatttagacctgttccagccagccgccacatttaggtttattatgattatgatacaaatttccgactggccataaagtcgagcgtctgagatgactggactgaccgaatccgaacctcgaacacacagcgctctggatgcgcatcaattcggtcagtcgaacaggttggtcgcttttcggctgctccagcggcgtttatcttgattattgagctgttgcgaaaagcgaaaggaggtggaccagcagcctctgaactccagcttaagatacggatgccaaagccaaggctccagcaccgagttcgggatgggtatggttacgggggatccagctcaaagctctgacagaaacagagctggccactgactgactgactcaccgagcaggttcaaggttactgtgctaacagcgccaaggggaggttacgggttacggtgcaatggcgatggtgatgacgatgggcatggggtatgcctttaattggtcgacttgtcggcccatcgcgttcaagcaaaagcctgaccaaagtggccctggcgactctacgtcgattagggtttggggccgggactatgtcagcaatggaatttataatgcttatgatattacacatatccgaagggaaggacaatagtactttaccctttaaaatgcggttatgcttactactctgctatcagggattctggggcatataagaacgaatttacgtatatataataatataataatacgtatatttacgtctgataataagatgactcacgtttcaagcattcgatgctgttctattaaatctaaagccatattaaagaacagatttgaacaattgaacaattagtttgcaataaatcaaatttacaatctcaagaacgcactcgaaactataaagtttattgagggtcccctggggagtaacaaaagctaaaatatttttcttagccttaagaagtaacaatgaggacctctctgctggcttacaggtcatccttcattcgtttcttgattccccgccgaactggccataaaaccatccccacttgctgctttattatctgtggctctttgtttcgctttcgtggcctgcccttgatgtgttttgcaccatttaatatttattgtggcttttactacgcgctttcaagttcaagatcaaatcagagaacacagacttcagtggggcgaacgaaatgaaggcgcgtaaggtgctaagtgtaattaagttgataaaaacagtgttcgcagatacatgggctggctagtggcttgatgccgctgttgatgcacaaagccctataattatggttcctggcagttgaggaactcgggcgatgcgaccatataaacggggtggatcgggtgaggattttcggaattgtctctggtggcgactctttattcatttctttaattaacagcatttgattaattatggccacaattaagcgcactcagaacaacccactcaatcatggacgggcttcctgcaaaaaaactccagaactccccgatttccgagattcccgacattgccctcactttgccaacgaagctcccgcctcagacgtaataaataatcaaattgcaagttgatttacctgcccggctctgccttttgggcgaacgaaagcgaaaattgcctttggattggaatcgctcccgcccgtcggaacccagcccttccgcccgagggacccctcacacgatgactttgaaaaatttctaactgaccgtacagcccgctgctccctgtggaaaaaaaaaaacaacaaaaaaccatataccatatacaaaatcctgccagaccggaccccagcttgttgcataaattttgctttcgagtcgttacacttatgaatattgattggttataggtgatggtggcttctactgccggactgccggtggttctcctttcgagtttcaaagtctcccagttctggtgctcagcagtctcgtaaatcgcacaacctgcatcgttagctgccgagacgcctcctggcccatccagtgctgtcattttgcatttgcacagaagttgtccggcctcaatggagctgggtctgtcccgcctaaccacgtttgttaacatgctttttctgtgtggctcataatggggctgctcaatagaaagataatgaattcgcggtagaactaatggaactctttttctctctctcccggcatccacgaatctttttacaaagttgcaaagggctgtaattagcgattgatatagtatgaaggttagccaccgataacatagctcggcagatagttcaaatgcaagttctatgtcagaggcacactgggaaaatcggagagaaaagtttcagaaacaaactttaaagtaatgtaaagaccaaattatacaagacataaatctttgtttacattaataagcattctttcagtgcatcagattaatggaatgcgcagctactttgttgcaatcataagtagttacttctgtacatcctccggtctcttacaatttgtcattgtaatacaatcttgcacttaattcttgtgaaatgcaaacttcttcggaaactcgtttgattgtaatgggccctaggttgatgatttgattgctggcctgtgttttgtattttttggggcgtttaatcgccggttagctgtgtagctgcatttcgtcacctctaccgagagtctgctgaaatttctaaactaatccacagagcgaggcttttccacaccagagcccgagatttatttgcactgtaattattcactttgccgtgaaactttgcccattacaagtccctacagagagacatacatacgtacatagctagggacatggctagagaagccacatggtggtgcactcatgtccagaggggctatcatgtagcgctgacttggaaaatatttcaactggccccgtcctgacattggcctgccgacggctattaggtgtagacagtttataatctttgtcgttgtgcattttaagagcttttttcttcctccatcctgcatcctaacacccattcagaaagtgctcgcccagccaaccgtccaatgaattgcctcatttgccgcacaattttgcttattgatggaatgtaattagtctatgtcagcacccaagctccacgaagcgcgagtgagcgaaatgccctagagtcctacctggtaactgatctcggcctcgccaaatctccagacccattactagccaacggtgcatcgctaatcgaaaaaggtggcaaatgtgagtgtgaaaactgaccattagaatggccccagaagcggtactttccgcaggtaagtgcaataatgaaatgcattctttagatctattattattacggattgtgtggataaatgaaatgaatagtcggaagcctagagaattgttcagctgcaatcgtttcatattcctaagcttcgacaatatttcgtttcttcgatattttgtttaaattacaaaaagttataaagcaatgaacacttgaatcagtcatgatgctgggtaaattttcgctttccatttcgtgggctttgcaattcgaactggttcacgtctttaactggcgatttatcaactgaataatgccatttgatgtggatgctgagccatgaatttgcaaccaaggaggggagttggtccagtccacaacgaacaccactaccaccctctttggattcatccgtgatggcacaacaacggatctgagggcagacacactataatttaagcgtgaatatcatttttccatgaacaagtatcctgcagcaatgtatgtgagaacattcacagtaactgcaattaccgacccaccaaccaaccgatcctcacaacggaccaactccactcgagagtctggctgggatctaaagaaaatttatgaagcctaccattatacgatcttaagtagtggcgaggattcctctccagccagccagccctgcttcacgattgtccctgtctttgtgtgtgaattcaaggttaatttcgtggctgcggctttaactagctgcacgcactgccccccatcgccatcttcttcattcgcttccttgccccgaatatagaatattcctgcaatccctcagtggagtctctcggactcgctgtccgtctgttcccaagttgataattttgattgctgcaagccataaatgatcataaaaattatagcagccgatacgagctcaaccgaacccagtgcttccacatccacgaaaagtcaagcggaacaaaaatcgcgaaaagggttcaaaatacagagcaaaagataactaagcttgccagccattttcattaaaaagtaaaagtcagattcatcaactgtattgcgtaaagataaatgccattttggccctacaaccacttattattcagttgactgttaaattgcttgagttatttccacaacttgatgaagtttgttattgatagagccaattttataatactaatctaacacgagattcagttaatgtttcattaaaataaaagtttagttagaagaatatacttctagattttaaaatttatactttctaagagctttttgcaattatatggtttgtgtttccgctaagttataaattagctgatcagctttttagatttctctaaagaaaagttagttttattttacttaccccgatttgtgatctcgttgccggcattacgattgttctcgtcctggccccccatgctgaccgtctttgactttctgggcaccgacgtctcatcctcctcgtcctcgtcgacatcctcgcccgtttccacgccgtcgtcctcctcatcatcggcgagagctgattgcgtggtggtcagaggcgaaccagcggtcttcgtggagctgggacccagatcaaggctgctcaacagattgcctgccgactgggaagacgttagggtgtccttgtgataggagctgtgccgattgcccagcttagtggatagtgttaggtcgccgttgctcgttgggcgtagactgcccaccacctgaccaccgggcagggtggcgcttctcttgtggcgacccttcgacttgggaaaggcagccaggatgttgagccaccactgggattcctctgaactggtgcccttcacaaaggtcacgcgctcgggagcggttatggcgatggagttggggtgacctgtcacctccacggcgctggtaacctccagcactttggtcatatcaacgcacgcctgcggtatggtttcgggctatagaaaatatatgtaaattaaagagtaaacaagttgtattttaagattttaattaggagaattaattaatcggtaatcaaatgaactcggcctatcgcgtaataatatacattttttaatttaatgactaataaataatataaaatctaattaatagttcagtaagttagtaaaagtaaatcaatctggtggcaatttaagaagccactttaattctttcacttcataaataatcggctggttaaggaaaggtacatttattgttgtttttaccgccagcacacttattggttctaccgataacgtccagcaatgctataataccataattagaagctcttttgggattgtataatattttatgagctttgttatcttataaattcagaccaccccataacagaaagttttattatctttttatttttttgttatcactggagaaccaacgagacggtatttaaaacagaaaaacacaattatgcctatggattgattagctattacaaactcaaaaattcgttttaattttattattagctataaaaatggaaatggtttaaaatatgttcaaatgaattacttacataatcatcaaccgagtacgtcagctcgccatcatcatagagaacaaaccatcttctttgccagcgctacaattgaaaaagaagacaaattttattaaaaatattaaactattctcaagtttctattatttgatctttactaagtctaagtctgtggctatcagtcgatgagagtgatcaactctaaaacaaatttacattgtcgcttgcaatttgcaacatgaaaggtgggacgagaaatggtgaggaaagacaagatcggatgtaaataatgttcaacgcccccgacagaaatcataattcctttataattcgttctttcataaattttcaggcgttgtcattcccatgaaaggcaaccaagccccaaacgccttcgcctttgcattggcactgattcgctgtggatc

SEQ ID NO: 6593 - DNA, 4869 bp, DROSOPHILA
cccgaaaccataccgcaggcgtgcgttgatatgaccaaagtgctggaggttaccagcgccgtggaggtgacaggtcaccccaactccatcgccataaccgctcccgagcgcgtgacctttgtgaagggcaccagttcagaggaatcccagtggtggctcaacatcctggctgcctttcccaagtcgaagggtcgccacaagagaagcgccaccctgcccggtggtcaggtggtgggcagtctacgcccaacgagcaacggcgacctaacactatccactaagctgggcaatcggcacagctcctatcacaaggacaccctaacgtcttcccagtcggcaggcaatctgttgagcagccttgatctgggtcccagctccacgaagaccgctggttcgcctctgaccaccacgcaatcagctctcgccgatgatgaggaggacgacggcgtggaaacgggcgaggatgtcgacgaggacgaggaggatgagacgtcggtgcccagaaagtcaaagacggtcagcatggggggccaggacgagaacaatcgtaatgccggcaacgagatcacaaatcgggtttcccagcccacgacatgcttgctaatcgaggatattcgacgtgatgaaaagacgatcaaggacattgccaacaccataacgaatctgagtcaacagcagaacaaacgctggtccacggcggtcaacaatgccctgaacaaccagcatcatttcggccatcacagccagtaccaagtgacatccagggatgagacggacttccagatgtcctccaacagcagcagcaccaaatcccaaaacccagccagcgagcgacctaaatccctgcccctggcatctaactccacgcctgcgattgtttcggccatagtcaaaaagatacccacggttatggagcagggtgacaagacaaaacccactgccaggctgcaattacacctaaagtcaccgaaacattaccaacacgagaggggcgatcccgatggcggatgcaatctggacgagctgtgtgttaactacatggccaaaacggatgagctgcgatcggtgggcaaggccaacagtaagtcatcctctggtcaaggtaagcctccggttaaggaggaatcgctgaatgccaagaagggttggctcatgaagcaggacaatcggacttgtgagtggtccaagcactggttcaccttgagcggtgcagcgcttttctactatagagatcccctgtgcgaggaacgaggtgttctcgacggcgtcctggatgttaatagtctaaccagcgtaatacccgaacctgcggcaagcaaacagcacgcttttcagctgaccacttgggacaaacagcgcttggttttggccagcttgtcgcccagttcgcgaaatagctggctggcggtcctgagaagtgctgccggattgccccaactagacacaccacccaaacagacagatatagagcaggactttatcaaggctcaactgcaacagccatcgtcgagtcccgtcactccaggcactccagcaggtccacatttctcctcggatgaggagtacaggacggcatcggagggcggcaggcgggatagtctggactggggatcaccgttgtcaccatcaccacctgttttgagaagttgtctgcgcaatcgaagcttggccagcttgcacaaaaggagtcgcagttcgccaccaagttcacggcgcagtactgtagacagtgtggccagtgatgaattgcctctcttagtagttcccgaggaaatgcagccaaccgagagcagggaactcaagcaacaatgcgagaccttgcgggcagaggcttcactgcgggaggcccgcatgtcggagctactggccaccctccaaagaacggaacaacagttgactgcccggctgcaggagcaacaacagcagttgaatagcgaacttacccaggccaaacagagtgcctccgatctgatgcacaatttgggaatgcagctcaccgagagtcagtgccaaatcaagcagttggaggaccgtctggcgcagggaatcgaggagaacgaaggactctacaagcgtttgagagagttacaggctcaggatcacagtggtggtgccgctctcagcaacctgcagcgtcacaaaattaaacgcatggactcactgagcgatctaaccaccatcagcgacattgatccctactgcctgcaacgcgattcgctggccgaggagtacaatgagctgagatcccgcttcgagaaggccgttaacgaaattcgagccatgaagcgggaactgaagcagtcgcaaaatcaatacgatgccttggagctggcacaagctgcgctgcagcagaagctggagaggcggcagcacgaggatggagcccaactgcagctgatggcagcccgtattcaggatctgaccctgaagtacagcagttcggagcgtcaggtgcgggctcttaagcagaaattggccaaatccgagaggagacgttcgttgtccttgaagggtaaagagcaactggaactgaaactaagcgagttgcaaagggaaacggtggagagaaaggagggtacgccacccgagtcttccagcagcgaatccagtagccagtcaccactaaatgcccacctgttgcagcgattgcacagcctggagcacgtgctcctcggcagtaaggagcgtctggagcagagtctcacccaattgcagcaaattcgcgccggccaaaggactcgtcgctccgtttcgcccatgaacgatcgcaaagatggcctacgccagctggaacgagctctggccgaaacatgtgtgatggtcagtgagcagatggagctgacttgcttgcaggattcgtgtcacaagtgttgcgatctgcgtcagcgtgtagaaaagctatccgccttgcagcagcaaaccgaaacggatttgcaacggagtgagcagctgctggagcagcgggagactgacctggcccaagcactggaaaagtgcgccagccaggagcaggagcaggaactgctcctgcagcagcgtcaggagctgagcgaggaattaggaaggcagcaggagcgttgtcggcgactggaaaagcgactggagctcctcgagcgggaacatggcaagcaactggagtgcctgagggaggtctaccacaccgaacatgccaacgcagccgatgagcagagtttccgaaagcggtaccaaactgagatcgaacagctgaggacactctgcgagaagggattgagtgccatggaaacttcgcataagcggcttactatggatcttgagcagaaacacaagatggagatagagcgcctgctggccgagaaggaaactgccctggccgaggaaactcaggccactttggctgctctggatgcgatgagaaaagcacaccagagtgaagttcagcgggaggtggctcgattcaagcaggagtttctgcgacaggttcaaagaggcgaacaaatgcgaggggatggcgccaaactgaaagaggaggatctcggagagctgcgaatggaaattctcgcattttccgaaaagtattccatcaagtgtgtggagaacgcggccttggaggaaaaactgcatatggccaatagcaagctaagacattttcagcagatgcagcaactggagctgagaaacaaacaatttcgtgctcacttggcctccgatgatccatcaaatgatgttcacttcgtgcagggcctgacctccgacgctcgagaagatgctgattgtgaagatagcgaggtctgaagggcagttccacgtttggcaagagtttaaggaaatccgctgcacagacatcaccagcatcatcagaaataacaacaacaacaacagcaccaacaaccgatccaaaaaagcccagtcacaagcaaatgtttaaaacggctgccgtcattaacattcagcaacaggtagcccaggaagaaaaagcacaatgaacaaatcgaacaaataataacgaaaatgaaatgcaataaccaagagcaagaaaacaacaaacagaaccagtggaacaaccaaagaataattagtgctaataataactaaataattataattatttaaaatatattaattaaaccaagcaaccaaatgcaaaacaaaatcgaacggcacagcatccatgatgtatgtacataaaacgaataacattactctaacagagcgcaaaactggttgaagatcataactaagatgatgatgatgatgttggtgatgtagcagtcaaatgaaatatatacatacatatatgaggagcttcagatttccaatggagtttagctaacaacgactgttcacccccttccaatgcaaaaagtggaagggacgtcgagcaatggaaaactaaccccaacaaatgtaacaacagcagcatccactgcgtcatcaacagcaagaaaaaccacaacaattttgggccaaatttatgtatttatcatctattctatctttgtatctgtatgttattctactgtacgtttatccaattctctatgtccacaaaatgtgtcatttatttatgtttatgtagttcataggtcaactttcaagcgagcaacaagtattcaagcttagttgcttcttttttcgtttgtattaaataaatcgaaattgttttcagcttacatacatgtaaatgcattatacataaagaaaatacaaacaatatatcgtctaattttatttttgttttgttaaccattggtattaatcaatatattctaccttaattaaagcaattttaatcttattaaataagcggggcaaaacaacaaatgttaatattatttacccataagtcgttatttgtgcaacaaaaataaaaagtataagcaaagttta

SEQ ID NO: 6594 - protein, 1247 aa, DROSOPHILA
MTKVLEVTSAVEVTGHPNSIAITAPERVTFVKGTSSEESQWWLNILAAFPKSKGRHKRSATLPGGQVVGSLRPTSNGDLTLSTKLGNRHSSYHKDTLTSSQSAGNLLSSLDLGPSSTKTAGSPLTTTQSALADDEEDDGVETGEDVDEDEEDETSVPRKSKTVSMGGQDENNRNAGNEITNRVSQPTTCLLIEDIRRDEKTIKDIANTITNLSQQQNKRWSTAVNNALNNQHHFGHHSQYQVTSRDETDFQMSSNSSSTKSQNPASERPKSLPLASNSTPAIVSAIVKKIPTVMEQGDKTKPTARLQLHLKSPKHYQHERGDPDGGCNLDELCVNYMAKTDELRSVGKANSKSSSGQGKPPVKEESLNAKKGWLMKQDNRTCEWSKHWFTLSGAALFYYRDPLCEERGVLDGVLDVNSLTSVIPEPAASKQHAFQLTTWDKQRLVLASLSPSSRNSWLAVLRSAAGLPQLDTPPKQTDIEQDFIKAQLQQPSSSPVTPGTPAGPHFSSDEEYRTASEGGRRDSLDWGSPLSPSPPVLRSCLRNRSLASLHKRSRSSPPSSRRSTVDSVASDELPLLVVPEEMQPTESRELKQQCETLRAEASLREARMSELLATLQRTEQQLTARLQEQQQQLNSELTQAKQSASDLMHNLGMQLTESQCQIKQLEDRLAQGIEENEGLYKRLRELQAQDHSGGAALSNLQRHKIKRMDSLSDLTTISDIDPYCLQRDSLAEEYNELRSRFEKAVNEIRAMKRELKQSQNQYDALELAQAALQQKLERRQHEDGAQLQLMAARIQDLTLKYSSSERQVRALKQKLAKSERRRSLSLKGKEQLELKLSELQRETVERKEGTPPESSSSESSSQSPLNAHLLQRLHSLEHVLLGSKERLEQSLTQLQQIRAGQRTRRSVSPMNDRKDGLRQLERALAETCVMVSEQMELTCLQDSCHKCCDLRQRVEKLSALQQQTETDLQRSEQLLEQRETDLAQALEKCASQEQEQELLLQQRQELSEELGRQQERCRRLEKRLELLEREHGKQLECLREVYHTEHANAADEQSFRKRYQTEIEQLRTLCEKGLSAMETSHKRLTMDLEQKHKMEIERLLAEKETALAEETQATLAALDAMRKAHQSEVQREVARFKQEFLRQVQRGEQMRGDGAKLKEEDLGELRMEILAFSEKYSIKCVENAALEEKLHMANSKLRHFQQMQQLELRNKQFRAHLASDDPSNDVHFVQGLTSDAREDADCEDSEV

SEQ ID NO: 6595 - DNA, 13668 bp, DROSOPHILA
gtgaagttgcccatggtggccagcgtgtccagagcgtcgatcagtgtcaaggagtagctgccccaggtgtcgtggccatcgcaggtcagcggacgcagttcatcgtagttggaggcgtggcgcaggtaaccatcgtaggcgtgctggaacatgcgccgcacatcctccctgcagattcattgccggttaggattagtatgtccgagtttagccctagcaatgacccacctcagttccaactttcttgccttggaatactgcttctggccgctgacaccggtggacagcaggacgaggaggaccgcgcagatgagggtgcccggatagccgttgtttcggggtttttgctgcatcgtgggacagtcaatcaatcagggccgctaattcaattatgggcatggtcagtgttccatagccagcgtggatgtgggatgtgtggaagtcaaatgcggctacgttgacgcaaaatcacaacaagggctgattcggcggtggcatcgaccgccgaatgccctactaattccgttcggtgagtgtttttttatagagcgcttagagtagcaaacgggggaaagaacacaagccaaagagcttttttaaggtaacaaccaaacactataggctagcaaacactgtattctccgccaattctgaagtacgttaattttacccaacaaaatccctagcaataggatatgtcattccgtagggtgcaatcagctgttgctgatcgaataactatcgaaagggtggtcagatcgaatttgcatggtggtcattgcttgttaaaggaatacaacagctcagaatagccgtaaaatcagcgcggcaatattaaagtcgggttggaaaaattaaatggcaatttctttaagaattcaaaaagtttgtgatgacaaatataccgattgtttgtcactgctttgcgcggcacacgttcctttatacttttattcgcgtcgagttggcagcacataccagttttttttgtggccattcaaaagtgtgtgttcgtacgggtaaaaagtgatttaaattcaaaatattcagcgaaacgaccgcctccaatagaagcaactgtaccctatggtaagtaactgccctctgcacccgtttcacacccggacatcctccggatgagctgaccaagaaatccgcagcctttgttacgcttccgactgcgaattgcagttctggcgatgggcagcgatgtgtttcggttttgaatcattctccgcgtaaaaaaaactcagaaagagggtcgactataacctcgcggagtaactgcatcacggcccgtgtgccttttgtactccgcgtaaggcgatcgtttaaatgcaatcgcgtatgcttaattgtccgttgggcgaaaagtaacaacattgtgggtctatacatgcgggattgcctctggctgaccagaaaccacattgaaaccatcccgttgaccgtagatataagcgtgtgccatttgggatctggaaatcgtgtttccacccagttgtttgcatatttataaacaattaaagaaaaatattaaattttttggtcagggctgtcgcccctcgcatggcatcgatagaagagcgtccggagctgcggttgcaaccctatccgctcacgcaaatctatcgaaaaattttactccacggtcgattttcgttgcttttttttcacactcgtgtaaaaaaaaaggaaatagctaagtaaatcgaaagtacagtgcagtgttttgatcccgtggagtgcatgttccagcggaaagtgtgtgcaacaaatatgagcagttcgcaaaagtggcgagcaaaagcaataacaaagtagcaacagcaacgcaacgtgtgtgtgttgtaagcaatctgtacagcggaaaggtgttggtgtgttggtgtgctcggggggtggtgtgcgtttcgcccgtcccgtgtccataaattagaatcaaatcgaatcgaaatcgacattgaagtccgctgctccgccaccgcgatgtccgtcgaccaggatcaataagcagcgtcaccaccagtagcggaccatcattaagttctccatatcgagagcaggctgactcggaatcgaactcggattcggaattggaattggaattggcatcggaatcggaatccatagcggaggaatcacgcgcggcagccagcccaatacggaaaactgctgaaaaatgttagataaatgcccagttatctacaattattatggcttgtccctgtgtgcgtgtccaggtgtgagggtgtgtgtgtttgtgtgcgatagcagaagcaaaatccgctcaaattgcgatgccaaatagtcggccaattaattgatctttcaattggcgacatcaggcgccctcccatatacccagctccgcacgaaacccgatatatatccgcggattgagtctctgcttttgccgcacatatgtattgtataacccttgtttatctttggacaatccgaggtggagtggagtacagtggaggctggccaagttggacacatgtgccgataaggtggcgtgtgctggaacgagtgtcccctgtaatgcggtcttatctgaagagctttgcaggtcactccgactgacaaattcacctgcaagctaggaggggaaagccctgtgaagaactctctaacacgataaagtcatattcctgattgatacaactataacacacagaaatcactatcagaccagagaaccagctcgcaagacccaagactgtagctataccaaataatctatccataaaaataggaagttcttatcttatcacatactctaggtaaagatttaagatggatctctataaatacttttgaatttacaacccaatttgttatgcttctcctgtaagtggcccaaaaatcgtcagttaagcatatgaaaagtctcgacaatgtggctgcactttgttcctttaattgttcttatattgtttacaaattgcataagctgtaaatgtaaactttgcttagttcgatttcgcttattcccgaagtctgtttaaacattcaacaggaaatgagaaactgagcttgtttataaaacgttaggcaacattaccccttttgccattcatcttttccattaagaacgccatataaattcagttttcaatttacatcgtacagctgtgggttgtagagcactattagctgctaggaaagcaggttgaataaaatgatgatgagaaatcacagaattcgaaggaccttgggtgagtcactgactagcagctttcactgcaccatccacgcactcaaagccgaccacaactggagttcatacacacacaggggccaccataaataattcgcatccactaggtggaagtgagcaaatgtttactcaataactattcttgcagagcccgcagtcgcagcaaagcaacgattaccagcgacacgagcagggagcagaaggaagccggcggaggaggagaagaaggagagccaccgcacagattgggtaaagcgcaccaccatggtgagtaccaatctggtggtacccgtggtgctgtggggtcccaccgcgcccacgcactgcatctctagcgtgttcctctcggacgatcagtttaccctggtcaccggctgctacgatggacagatctgcctttggcaagtggagcccaccaccctgaagatgtcgccgcggtgcctcttggtgggccattcggcgcccgttttgtgcttagtgcgtgcctcgcttctgccggagaacaacttcctggtcagctcgtctgagaacggagagatgtgcacctgggatcttacggacggcaagtgcatggaggcggtcaagcttccacaggtgcacacccaaattcagagctaccacaccgccaacagcgaggatgtgcgcctcttttgcattggctactatgctgaaatcatggtcatggatccgttcagcctagaggtgatctacgtgctcagctcaaaggtcaaaccggattggatatccgctattcacgtactgcgccccatgcgtcgcaaggatgacgtagtgttggccatcaccaccaccggaaccgtgaaggtctggactctgacgggtaacgagaacaaacacgcggagcccatttacgagaacgaatccaaggagatccgctgcctgaatgccatcaccatgaattgctgcgcccagaaccagcgcacagtgctcttagtttgtaccaaatactggcagatctacgatgccggcgacttcactgtactctgctccgtaattgctcccgcaagggaacgttggcagggcggcgacttcatcacctccgaccgggtaatgctatggacagatgagggaaagggctacttgtacaagctgcccgcaaactgcattcccgacaacaaggagttccactcgaagagtgtggtcagggatgcaccttacctctactacgtgttgcaacacgccggtgataaggtgctgtcgtgccccccagccatgaagttgcttcagggcgccggtggccagcacaatctactgcgcggagactccgagggatacatctctgtctggaatgtgccggaggtgccgttagacaatattagcatactgcaggccaaacagatgccgccgcgacccctcaagccgcacgtgtgcacttcgttggtcgaggcgtggtccataatggatccaccaccagtgggcatcctggatcagctctcccgcatcacagaatcgccggtgaagctcacctcgagcatctatctgccacagcagagtcgcctggtgatcggacgcgaggatggcagcatagtcatagtgccagccacccagacagtgatgatgcagctgctggtgggcatcaagcaaaacttcagcgattggccctcgcatcagatcctctacggtcatcgtggaagggtcaattgcctgctctgcccctcgatgattcactcgagatatgagaagtcgcatctactttccggcggcatcgatttcgccgtgtgtctgtgggatctgtacagcggaagcttactgcataggttttgcgttcatgcgggtgagatcacacaactgctggtgccgccagagagctgtagtccaagaatcctgaaatgcatatgttcggtggcctcggaccattccgttacgctagtgtcccttcaggagcgcaagtgtgtgaccctggcaagcagacatctattccctgtggttaccattaaatggcgtcccctggacgactttctaatcgtaggctgttccgatggcagcgtgtatgtgtggcaaatggaaacgggtcacctcgatcgagtgcttcacgggatgctggcagaggaagtcctttccgcttgcgatgaacaggcggaggatggcggctcgggcggcggcggtggttccaatggtgcatctgccagcgagatgggtatggccaatccggcagtgcacttcttccgtggcctgaagtcgcgcaacatgaatgcaatccgtcatgctacccagcgcgggattacgcaactccagcaacttcagggtcataaccaaggaaacttcgactttctgatgaaacaccgcagcaatcctttagtgatccagggtcttcgtactaatcctaaggacgcggagagccacatacttttctttgacatcgagggactgatcttcgaattgcatagcgaggaatacgcacagatgacaccagctaccttggaatcacttggtgtccacctgcagaatcccaaagatggcaaatcgatgcatttggatgctagcaagaagatcggtgacttcttcaacaaggtgaagaacaaggccgtagatgtggagaagatcctgaaggacaaagacaaacacgggctggtgcagaagttcaaggagaaaactgagattgtcgagaagaaagtacaggccaaggtggagagcctgcaaaaggcagtagagccgcacgaggagcagcaggacctgaagagcaaaatcgcttccaagatggaggttacgcatgttatggaggtagcccagctacttctttcgctgctccattcttggggcctagatccacatctagacaagatgtgcgagacgcgcttgggcctgcttagacccattgtgcccatctcatacggagtgctttccaaggccggctatatgtcgctgctgctgcccacatggcagaacaactatgccataccacccggtatccagcttccctccagttccaagaagcgcccgctgccagaggagctgcagcgcttggagcatctcacggctgttttcacatcccgtctgcattgggagctcagcactacgttgaccaccaaccatattcttgcgctggtggccatgtccaatacgctgctgtcgatgagtgcggcctcctttctgccggacagcgagaagcacaagaagctgcagcgcttggcccagcgcacggactccacattgagcaacgaggaggagcgcgaggagctgatggcccaccacatctctcaaatcaagcacgcctggagcctgcttgctacccaccattgcttcctgttgcccgacaaaattgaggccctggagccgaagaaattcaagcgtccgcaggtggaaatgatggtcaagcgctggcagcatcactgcatagagatcagggaggcggctcagcagatccttttgggcgagcttacccggatgggcaagaagggtcgcaagcagctagtcgagagctgggcacaatatctgccactctacacgcacaccgagcccatagtgggagcccaacagcagttggccttgataagtcagccggcaagcggaggagctggctcgggatcgggcggcaatggaggggtgggcgtcggagtatccggaggcggtggtgctggtagtggtagcgggccaggtggcagcgttcctgggggagatgcccaccaagatgaagactacgaagaggaagaggaggagattatacgcaaaccatccagcttgtcggagctgaagcgcaaacaaactacggcagttatcctactgggtgtaataggagcagaatttggccaggatatatcccaggagtcaccgaatcaccgtggaagtattagcatggccacgggagcaaatctaaccagtggagttgctggcggggaacgtcgaaaatctagtgtcgtggagggcttcggcatagccaacaatctagcccgtcttacttcaatggccctggctcacttgctgtacgcgccaccatctcccaagctgccgcaatacacgccactgcgccgggcagccatcgatctgttgggtcgtggattcaccgtttgggagccgtacctggatgtgtccaaggtgcttcttggtttgctggagatatcgtgcgagggcaaagcagtgccaaatctgaactacaaacttccactaaccccgcaagcggatgcctgccgaaccgccaggcatgctctgcgcttgatagccaccgctcggccggcggcgttcatcactacgatggcgcgcgaggtagccaggtacaatacgatgcagcagaacgcgcagtccatcaacacgccgctcacccagtccgttctgcacaaggccaagggcgagattctgcagtgcgttgagatgctaatcgacaaaatgcagtcggagatcgccggcctcctggtggaagttatggacattgccctgcactgcgtggacggcaacgagctgaagaaccgcggcctggcggagctgtgtcctgccatctgcaagtttaaccagatctcgcactgcgcccaaacacgccgcatcgccgtgggcgccaacagtggcaacctggccatttacgagctgcgccagaacaagtgccagatgatcccggcccacacgcatccgatcacctcgctggccttctcgccggatggcaagtacctggtctcgtactcttgcgcagagaaccgcctctccttctggcagacctcaacggggatgttcggactgggccagtcgcagacgcgctgtacgaagggctactctacggcacccattccggatgtgtcgcgcctgaatccgatgcgcctggccaagcttgtgtggatcaacaatcgcacggtgaccctcatgctggccgacggctccgagacgcgattcaatgtctaaggtgaaggagcaatgataatggactagtgaatcttgcgggatgtatagcatgttattaggcaatcagtgcggacttcagagcagcgcttcggaggagcagaacaaggaggacgactcggcggtggagtaggaggagctggaagagctgcggggagctggaggagcagaagcgacaaaacaataattattcgaaaataaaagtgcggtaatgtatggcgtttcgtgagtagttaaggtaatggaaacgaaaaaaagcttagcaaaattaagacaaaacgaaaatgaaagcatagctagggcaaacgggaagctaagcgaagttagttcaagcgaaaattcacaacacattttgttatttatttatatacttaccctatatatctgtatctgtatctgtatctaatccgtatctgtatgtattttaatgtattacacgattttaatatgtctcttattcgcccctctgcgttctttttaatttttagtgcctaacttttacccatactcttagaacacgtatttctgtttctgtttctgtttctgtttgtcgttaatttccaatgcggaaaaactaataactaaatccaaatccaaatattaacaaattaaacaacaattaaccagatatgcaagcaaacacaactacacgagaaaagcaaaggaaatgaaaaacgaaaaaaaaaaacaaagaatgaaaagctgttattattattactcaactattattattactattgtatgctactattattattattattattattgatatttgttatgcctaatgtattgttatatatatatacctaaaataaacctaaacaaatgtattgagcaagtaatgaagcgaaggccaagcaaccagagtttcctcgaacgaggattaaacaactagtgagcgaaggggttttttttttaactacattataaccattgtaactcccatatatctgattctttcgatgttatatttatgcttaagcctgtgtaaaaagtcatattgtcctgtgaagttgtttgggcatcctgttcacaaaatgcatgccacaaaacacacacacacagttcatttgcggcgttaatgttaattgtgcatcgaacagatggcggtatttggagcctgggaagccggccagccagccagccagcgtcctggtcaactggtaaccgggcgacagaagtgcctgcagctgtacgggagaactacttatcctaactatagatataataatgcatacatatatacccaactgaatttgcaatatgtgttcgtttacgtatccaatacaacacagcaaacacacgggtgagagagttaattgaattgtgcttaatttcaattgcaaatgatatatattcatatatatatggggacacgagcatacttatatacgagatccttcaatcaaagtattacacaaacaaaaggaacgaagcaactataacaattatgtacggagtatacaacaaataaagtcaagaaacatctgcaaattttgcctccctgtgctttcgattggtgggggcaacgcttccgttggagcgcatctggcattgtggggaagccctgttgtcgagcctagataacacggttatagtcgcccagattctcacctgataaactgtgctccttgaatttcagcttaccggccgtccagtgagaatgtccgttgcagtaaaccaaaaaggctggggtaagaaggcaggagcttccgtatccgactccgcaattcgtacacagtccgccctcagcgaggggggtggggccattgacgtccggccgatggagcacgacgaggaaatcaatcgcgaagatctcaacctcgacgaggacgatgagatggaggaggaggaggaggaggagcacgccgacgaagaggacgatgacgaggagccggatagcaacgagaacagcgcaccggaggagcaagtagagccgccggccttcagcctagcgacgctgggactccaacgcgtgggcagcgcaccgccgcccaagcccaaagtccagaaggccccaatcccgaccctaaatgcccgtggaatgcctgctcggatacgaaagagaaatcgtctcttttatgacgagaacatcatcaacgatgacaagccgctgcgcatgagcttggcacccaagaagacgcctggcagaccaccgcagtctgccggcggtggctctagccagaagatcccgcttaccccgtctaaggtgctgaagaagcgcaagggagtggtctcccgctacatgcgttccagtgagcagggaaccaactccgtttcggccagcaatcagccccagctgttgggcaagcacaagaaggcgacgccatcgaagagccagtcggtgggcagcaagctgggctccggtggaccgaaaacagggcggggtgcccatttcattggaaagggtaccgctgcagcggtggctgcagtagcagccgccgaggaggaagctaaccaggctgaggctgcagcgctggcgaacaagcggttgggccagtccattggtcttcggctgcgcaatctgctcaagttgcccaaagcgcacaagtgggccatagccgagtggttctactcgtacgttgacaagccgctattcgaatgccgtgatgagtttatgaaccatgtgaatgaactggcacccaggctgggcacacggagcctcattcgccacgagtgggtgaatattaggcggaggatgggcaggccgcggcgatgctccgccaaatttttcagcgaggagcgcaaggagttggaccgaaagcgtcaggtgatccggaccctgcaatcgcggaagccaggcgagttcaaggactccgtttccatgctatcggacatgcctgagaaaataccgatgacactgccgctgggcaccaaggtcactgccagattaagatctccccaggacgggatctttgcgggcactgtggccgcctacgactcactaaacgccatgtaccgagtgaccttcgaacgaatcggcttgggcacacacgccatccccgactacgagattgtgtcggagaactttcacgagatgctgcctctgcacagcttcacgaaggatttccggccgaacttgatgagcatctatcaaacgaataacctcggcttcaccaccaatctgggcttcacggcaaatcttaccaacaactatctgcagaagaaggaaaaaatagacggcggtgcaggagcggcagctggagcgggatcactctacttcaagccacagaagcacctggccaccaataatgcggctgcacgaaatgcgctcagcatgaagctgaacaagagtgatccgctgctgggacaggattcggtgggcgtgagtcccattcggcagcagttgacgagaaatcgcggctactccacctcgctgttggagcacctggtgcgcctggagaagtacattgcagttaaggcggatcgaatccagcggctcaacaagatgaacggcaccgccgagctggccatgggcgatatgataagccatgacgagaatggggatcgccatcgccgacagattgcagtcaacttccagcgccagtatgccttcaacatcgtgaccatcgagcgcatcaacgccgagctcatgttcgagctcaccaaggtgcaggagctgtcctccagcctgacacgcaatcccaatgtccaggccatgatttcgccgacatatttgcgcgaagagtgccgcgccaaggcgtcacagacggtcgacgacatcaacaagggcatggtgaagaatacgcggatgataaagctgctgaaggacctgaccacgctgttgatcgtgacccagaatctcggcggcgactgcgaagtgagcgaggttaacgaggtgctcgaaggctgcctcgaggaagtgcgcagcaatctaatctgcagcgaaaaccgcgaggtgttccagatgagtgtccaggggcggctggagtacatagccatggacatcagcagacgcttggaggagaagagcttgagtcgcgtggcggatggcgacgacgatattaaatcgctgaaatccgaggacgagaccgatgaggaccatgtgcaggatcacaagcatggggcagatgaggagcccgccgcagatacctccaagacaaaagcgaaaggcagtccaaagcaggttgaagggaaggagaacagcgaagttgacaagatggaccacagtagccatcccatggacacagacacagagaaggaagagaaactggaatctggcgggtcggaaaacgcagggtatgcgagccagcagcgacaagacgaggatcaggacaccgaggagcagcacctcgatctggaggagcagcacctggacccggaggagcatcacctggacctggaggagcagcacctggacccggaggagcagcacctggacctggaggagcaccacctggaactggaggagcagcacctggacccggaggagcagtcactcaatccggctgtgaccgaggacacgcagatcaccattgagtcgatgaaggaatccgatgaggagtttcaatcggccgccgagaccgaggaggacgacatggtcggcctgatcatggaagaagaggaggaagaggagtttgtgtacgataaggatctgtagaggactaatcgatgtccaatacccgcatctttagtctcttttctacgccggcctcctggactttagcttaggtaaaagttttcgtgaaaagttttcaataatacgctgcaataggaaatttaacaaaataatccgcatagctttctgactgactatcgtttttttttttaaataccaggaaagggtttttaaaaattcaaaaagcattggtactattacacttttttaaatattgcattgactttgtaagaaagtttaataacaaatttatagcaagtcttcaataaacaagaaaatatttttttttacaaattttgaatttttctaagtggaacattttttgcgagaaatgtgaaaaaataaaaatgttcaggcttgaatgtcagtcgatttggattttaattacaagctcaacgatgcatcacacttcatctttcgccaattatttccgacgttgtggccaaaaaactagcagatttcggacgcaaagtcgaaatttggccaaaatatgtcgatgtgaattttcgagcgaccttacattaattttccatttccttagaatgagcaaggaaatgacttaaacaaatgggaataaagaataagggctacgactttgcttagtcatcgtcctcctcgtcatcatcttcttcgctggattgatccaaccaagccacgagcttggcgaggctttggcgcaggtgtgcatgctcctcctcgtccaactgcgcgtaccacgcctgaatggcactctcggacacaaagtccttgtcgtacagatagtgcacgatctgcgagatcttcccccgcactagatgattctcctcgtacacatcctgcgggaaaagggattggtaaagtgggtgtgggtttgtgtgaaaattatggggacttcacctccagcgccttgagacaatccatcatggaatcctcgctcttaatgtagttggataccacagggcccagttgtttaaaggctgcgtttatggccactagtacgttg

SEQ ID NO: 6596 - DNA, 3047 bp, DROSOPHILA
aaagtgtgtgttcgtacgggtaaaaagtgatttaaattcaaaatattcagcgaaacgaccgcctccaatagaagcaactgtaccctatgcttaccggccgtccagtgagaatgtccgttgcagtaaaccaaaaaggctggggtaagaaggcaggagcttccgtatccgactccgcaattcgtacacagtccgccctcagcgaggggggtggggccattgacgtccggccgatggagcacgacgaggaaatcaatcgcgaagatctcaacctcgacgaggacgatgagatggaggaggaggaggaggaggagcacgccgacgaagaggacgatgacgaggagccggatagcaacgagaacagcgcaccggaggagcaagtagagccgccggccttcagcctagcgacgctgggactccaacgcgtgggcagcgcaccgccgcccaagcccaaagtccagaaggccccaatcccgaccctaaatgcccgtggaatgcctgctcggatacgaaagagaaatcgtctcttttatgacgagaacatcatcaacgatgacaagccgctgcgcatgagcttggcacccaagaagacgcctggcagaccaccgcagtctgccggcggtggctctagccagaagatcccgcttaccccgtctaaggtgctgaagaagcgcaagggagtggtctcccgctacatgcgttccagtgagcagggaaccaactccgtttcggccagcaatcagccccagctgttgggcaagcacaagaaggcgacgccatcgaagagccagtcggtgggcagcaagctgggctccggtggaccgaaaacagggcggggtgcccatttcattggaaagggtaccgctgcagcggtggctgcagtagcagccgccgaggaggaagctaaccaggctgaggctgcagcgctggcgaacaagcggttgggccagtccattggtcttcggctgcgcaatctgctcaagttgcccaaagcgcacaagtgggccatagccgagtggttctactcgtacgttgacaagccgctattcgaatgccgtgatgagtttatgaaccatgtgaatgaactggcacccaggctgggcacacggagcctcattcgccacgagtgggtgaatattaggcggaggatgggcaggccgcggcgatgctccgccaaatttttcagcgaggagcgcaaggagttggaccgaaagcgtcaggtgatccggaccctgcaatcgcggaagccaggcgagttcaaggactccgtttccatgctatcggacatgcctgagaaaataccgatgacactgccgctgggcaccaaggtcactgccagattaagatctccccaggacgggatctttgcgggcactgtggccgcctacgactcactaaacgccatgtaccgagtgaccttcgaacgaatcggcttgggcacacacgccatccccgactacgagattgtgtcggagaactttcacgagatgctgcctctgcacagcttcacgaaggatttccggccgaacttgatgagcatctatcaaacgaataacctcggcttcaccaccaatctgggcttcacggcaaatcttaccaacaactatctgcagaagaaggaaaaaatagacggcggtgcaggagcggcagctggagcgggatcactctacttcaagccacagaagcacctggccaccaataatgcggctgcacgaaatgcgctcagcatgaagctgaacaagagtgatccgctgctgggacaggattcggtgggcgtgagtcccattcggcagcagttgacgagaaatcgcggctactccacctcgctgttggagcacctggtgcgcctggagaagtacattgcagttaaggcggatcgaatccagcggctcaacaagatgaacggcaccgccgagctggccatgggcgatatgataagccatgacgagaatggggatcgccatcgccgacagattgcagtcaacttccagcgccagtatgccttcaacatcgtgaccatcgagcgcatcaacgccgagctcatgttcgagctcaccaaggtgcaggagctgtcctccagcctgacacgcaatcccaatgtccaggccatgatttcgccgacatatttgcgcgaagagtgccgcgccaaggcgtcacagacggtcgacgacatcaacaagggcatggtgaagaatacgcggatgataaagctgctgaaggacctgaccacgctgttgatcgtgacccagaatctcggcggcgactgcgaagtgagcgaggttaacgaggtgctcgaaggctgcctcgaggaagtgcgcagcaatctaatctgcagcgaaaaccgcgaggtgttccagatgagtgtccaggggcggctggagtacatagccatggacatcagcagacgcttggaggagaagagcttgagtcgcgtggcggatggcgacgacgatattaaatcgctgaaatccgaggacgagaccgatgaggaccatgtgcaggatcacaagcatggggcagatgaggagcccgccgcagatacctccaagacaaaagcgaaaggcagtccaaagcaggttgaagggaaggagaacagcgaagttgacaagatggaccacagtagccatcccatggacacagacacagagaaggaagagaaactggaatctggcgggtcggaaaacgcagggtatgcgagccagcagcgacaagacgaggatcaggacaccgaggagcagcacctcgatctggaggagcagcacctggacccggaggagcatcacctggacctggaggagcagcacctggacccggaggagcagcacctggacctggaggagcaccacctggaactggaggagcagcacctggacccggaggagcagtcactcaatccggctgtgaccgaggacacgcagatcaccattgagtcgatgaaggaatccgatgaggagtttcaatcggccgccgagaccgaggaggacgacatggtcggcctgatcatggaagaagaggaggaagaggagtttgtgtacgataaggatctgtag

SEQ ID NO: 6597 - protein, 978 aa, DROSOPHILA
MSVAVNQKGWGKKAGASVSDSAIRTQSALSEGGGAIDVRPMEHDEEINREDLNLDEDDEMEEEEEEEHADEEDDDEEPDSNENSAPEEQVEPPAFSLATLGLQRVGSAPPPKPKVQKAPIPTLNARGMPARIRKRNRLFYDENIINDDKPLRMSLAPKKTPGRPPQSAGGGSSQKIPLTPSKVLKKRKGVVSRYMRSSEQGTNSVSASNQPQLLGKHKKATPSKSQSVGSKLGSGGPKTGRGAHFIGKGTAAAVAAVAAAEEEANQAEAAALANKRLGQSIGLRLRNLLKLPKAHKWAIAEWFYSYVDKPLFECRDEFMNHVNELAPRLGTRSLIRHEWVNIRRRMGRPRRCSAKFFSEERKELDRKRQVIRTLQSRKPGEFKDSVSMLSDMPEKIPMTLPLGTKVTARLRSPQDGIFAGTVAAYDSLNAMYRVTFERIGLGTHAIPDYEIVSENFHEMLPLHSFTKDFRPNLMSIYQTNNLGFTTNLGFTANLTNNYLQKKEKIDGGAGAAAGAGSLYFKPQKHLATNNAAARNALSMKLNKSDPLLGQDSVGVSPIRQQLTRNRGYSTSLLEHLVRLEKYIAVKADRIQRLNKMNGTAELAMGDMISHDENGDRHRRQIAVNFQRQYAFNIVTIERINAELMFELTKVQELSSSLTRNPNVQAMISPTYLREECRAKASQTVDDINKGMVKNTRMIKLLKDLTTLLIVTQNLGGDCEVSEVNEVLEGCLEEVRSNLICSENREVFQMSVQGRLEYIAMDISRRLEEKSLSRVADGDDDIKSLKSEDETDEDHVQDHKHGADEEPAADTSKTKAKGSPKQVEGKENSEVDKMDHSSHPMDTDTEKEEKLESGGSENAGYASQQRQDEDQDTEEQHLDLEEQHLDPEEHHLDLEEQHLDPEEQHLDLEEHHLELEEQHLDPEEQSLNPAVTEDTQITIESMKESDEEFQSAAETEEDDMVGLIMEEEEEEEFVYDKDL

SEQ ID NO: 6598 - DNA, 2842 bp, DROSOPHILA
gcgtgttgccgtgcattcagcagcaaatgaagctagttttcattaaaaaactttttaattagttaatggattccgcatttcagccctcctttgttgccaccacaatttaacactaggcttggccttcttttcacccactcataatgaaaaaatcaagttaaaagtaacttaatgttactttttggtgatttaaatgccttcggcttctgctttatacattatgaatgactcttcttttccccactgctatgttgtgtgtgttctttgctctcagtacaaatgtgcaggtatttagaaggcaaacagcactgaaatattccagtcagaaagaaaacttatattttaaaccaaattaacttgtccagaagccgtctgttagttagtttaatgagcgtatatattcagtgcacttattgagatataattacttttcataatacatacatactccaaacactttgtgcaccttttctctgcaatatttaattcctagcgctgctgcactttttcctctataaattctgtggacaatgggtgctgaaaagtatgcagcgagaaatgaaaaaaggaatcctcttgccaaataataaatgaaagggaattgcataaatttacagaactatgcaaaattcgagcagcaaaaagtgggcgtgcattgtattttcgagagatatatgtatacaaatatatttctatagctgctgttgaaatgtttatgtgttcgcattggatgatggtaataaatgtggtcggaaaactgaaaactttaaattattcgccatggtgagaggtgtaaaaaatgttattataaatgggtttcttaacgagcagccaactttcggattccgtttttacaacaaaacgaatgttttctaatgtaaaagcacaataaattcgctgagatccagattaagatgccgtcccttttttccagtttaatgcgtgtgaaatcccgaaaaagcatttccctgatgcctcgggaaatcctaattaatatgttatcacgcgaaggccaaatgtagcccataaaattcgatctaaagctttgcggggaaaattacaagcataaaactcgcacagaccgacagaacaaaaaaaaccataaacttttacagccccaaaaaagcgaaacaaaaaccaaaaaaaaaaaaaaaaaacagcaatcttctccacccaagtgggcggaaatcgggcgagcgtatcaagattgccactacaaacgatgctcatttatggatttcgatttgattacagtggagcaaattgcaagtgacgtgtcaacaattggactgcatgcagcgccacgccgagggccatggacatttatggcagaagcaggccatctccctaaatgagcagcaggagggtctcaagactgataagcaggcgcccaaggagccggcggcccaaggagcagctccaacgcaaggagccgtcgccatcgccatcacaacatcttccgactcggatgagaagccatcgacaagtggccgagtggctggcatagcaggcatttccggtacgaatgcaatgcggtacactgggagaaatacttaagatcagctatagaattatattttatttatactgcttatgacattccttatcatgatatcatatcacaatatagtatagttaaaggataatcataagttgacttttagtaattgacactgatttatataccttttttctcactgtccacccaccagctgcaacaatggaatccgctccagttcctgtggcaagcggcagcaacgtggatgctgcaactgcggcagccgcaagaacttcgacgacggctgcaaccacaccattagcaagttcgggcaagccaaatgattgggttgttattccagtgtttgcggatattgttaaactggcgttgggcgagcgtgagaactgtttgcagcggtaagttcaatttgcctgccctgattgatggccaaatccagggcaaatatatgttatgtgaccgcggccaaggggtcgtatgattaatatacatatatggcccatccgccatggccaactatcgcatttccagcggactttcgtttcacttagcgcccaatcgtatttacattcacgtttgtatttatttacgctttaaattaattaaccacagagtggtaaaataaatgattatgtgccaaacgacagggcggaaaatcaatttaatggatgttcataaaaaataacataaatataaagctctttagccgttgaatttatttgtttttatgccgagcgttgaagagtaaaatcgctggaaatgcgtattttttcgcatttctaaagcatttatattgaattgacttcaacaagtgaccgaacaatcagaaaataattaaaagagattttgtttttaaagcctttgttcatgagtagtgtttaatgttcttaacaataaaacgggattgaagtttttgaccattaattgctgttcttatcccataattgggatgtggttaaaatcaaaaaaaaaaaaaggtcaataacataaatcctttggcagcacaaaaaaagtcaaatcatttgaattactacccgaaaataatacatgtaattgaaatgaatatatttcaataattaatacttttcccattgcccaatggcagatgccttctgattatttgcggctgccactattttcccatccaatggcaaatctgaaccatatccttcccttaatgggccccaatcctcccatatgcattgctcccctttggaccaagcgatacggagctcaaataaacaataaagtatgcaccaccgaccactggtggtcacaattgacctcattaggctggccactgcgaatatactcgacattccggcg

SEQ ID NO: 6599 - DNA, 665 bp, DROSOPHILA
atcacgcgaaggccaaatgtagcccataaaattcgatctaaagctttgcggggaaaattacaagcataaaactcgcacagaccgacagaacaaaaaaaaccataaacttttacagccccaaaaaagcgaaacaaaaaccaaaaaaaaaaaaaaaaaacagcaatcttctccacccaagtgggcggaaatcgggcgagcgtatcaagattgccactacaaacgatgctcatttatggatttcgatttgattacagtggagcaaattgcaagtgacgtgtcaacaattggactgcatgcagcgccacgccgagggccatggacatttatggcagaagcaggccatctccctaaatgagcagcaggagggtctcaagactgataagcaggcgcccaaggagccggcggcccaaggagcagctccaacgcaaggagccgtcgccatcgccatcacaacatcttccgactcggatgagaagccatcgacaagtggccgagtggctggcatagcaggcatttccggtacgaatgcaatgcgctgcaacaatggaatccgctccagttcctgtggcaagcggcagcaacgtggatgctgcaactgcggcagccgcaagaacttcgacgacggctgcaaccacaccattagcaagttcgggcaagccaaatga

SEQ ID NO: 6600 - protein, 123 aa, DROSOPHILA
MQRHAEGHGHLWQKQAISLNEQQEGLKTDKQAPKEPAAQGAAPTQGAVAIAITTSSDSDEKPSTSGRVAGIAGISGTNAMRCNNGIRSSSCGKRQQRGCCNCGSRKNFDDGCNHTISKFGQAK

SEQ ID NO: 6601 - DNA, 3889 bp, DROSOPHILA
gccttctcggagcgactggagggtgtgccgctagtgattacagatccccccggcgcctgccaggagatccggaacgccagagatctgaatgggggcgtcgcactcattgatcgagggtgagagccttaagaacccctacaaagcttatcttagctattgaaagatggtcatagccacggccactttttatcagtggtcttagacgaaccatagacgaactgtagccatagttccatgcttcttatcacaaatgtcagaacctggttacgtgcgtccggagtgtccgtttaaagtcttattaacaaaatctatcaattttccgaatgaaacctttctttacaataggaatacaaaagatcgatacgggaaagcgatatagatatttcatatcagatatagatagatattgattcttgtcttcgtaaactaacaatgtcatttttcagggagtgttccttcctcacgaagacacttcgagcggaggcagctggcgcattggctgcaatcatcactgagtacaatcccagctctccagagtttgagcactacatcgagatgatacatgacaactcccaacaggacgccaacataccggccggctttcttctcgggaagaatggcgtcatcatccggtcgacgctgcagcggctgaagagggtgcacgccctgatcaacataccggtcaacctcacctttaccccgccatctaagattaatcatccgccgtggctgggctggtgacgtgatcggattacatgcagctcaaaggactcgtgtgaaagagacacacacgatctgaaaccaaagtgcatactcgtaggctgagacgtcgagaccgcaactgagactatactttagagtaccaataagtagctaattcgtagacggcagccataaactgtaaataaatagcttagcagccaaagagtcaggtcgccaagttgtaatctagacaatactataattcttaatttttatagacaaatgacaacgagttatattatattttccccagtgctgtgagatttaggcacatgcccagcgtgagaatcacaatgaccaccacaaggatggcgaagcacaagtagtttggctggatgggcattcgaaagagtttggcggacatgtccagcgaggcggcgaacagcaacgtcgagttgagatcttccgctgaggtattgtggtaaacaaatggacgaacccgtatctggtgtccattagcttgagcattctggcacactcgagtcaccgatgatgccacgaaaaagggcagcaatcccaaaaatagccacagcatcacgttcgcaatatttagcaggacgagcttcagggcgcagtagtggaaatcaaagtccttaaataggtacaccaatcccgcgaaggcgtacgccagattcattacaatcaggaagcacactggaatagacacgtgctgattcaagcgctccagcagcttgcggaattcgaggacttccctcatccaatcgagcgagtcgatggagtgcataagcagcttgtgcgacagcgtttccagatgcatccttagcaaataacactcgatgtagtagttgctcagtatgataatctccaccagatcctgcagcagtatggtgaacaagagacccactcgcagccacatctcccagtcgcttaggatttccgctagccaggacaccttgacgatctggctgggctgcatcatcaccacacaacaggcgtagccgaatagcaaaatcagcagggccagtgcaatggccagaaaaagccacagcattcggcagagcctcttcggcttggcagacatcaggaaaaccctctcgatgaggttttgcagctgctcgtggtcgatcaccttgcataccaacactgccgacacgaaggccaagaggttaaagccactgggcactatgaacccaaacagaagttctcctatggtgttcggggtcgtagctccgccatctgtaccattggttatgggtctaatatcccgatagctggtgaagccgcgatcgcccctgaaagtataggttgtggtctataacgaaaaatcttacaaaataaaccaaaaaaaaaccttactgctaaaaaataaatatttcttaattgttatgactagtagaaaggctttgcctcaacatagccaataataaacattcattgtttaacgctgggaatggatttcccgtaaataaaccaattgataagaaaacatacatttgtacatatgtacatatgtgtatatgaatgcaattaagtttacatgatgcgataaattactattcgaaagttttcgtttttagtgaatcactgttattaatttaagcgcacctgtatccgcaaatataccgcaagaggtatcctacaagcaggacgaagagcaccatcagcgcctggacgtagctgcagcaggcacggatgctggtcatgtccgtggagatgggattgaggcccaccagggtcaggatggccacatatggacggaggaactgtatggcgagacattgtttggttggtcagttcccacgacatgagtgttaggtaattggtgatcaatgatgacaccacacccaccttccgtttacagtagtccagcagagcggaagtgggctcatgttctcccggctgctgcagttcatcattggtattcccgttgatgcgattgatgaaacaaaaagaactctccgcattatgtcgatgcatgacagacaaagaacgatgggcgttagtgggtgatagagggtggaaagtaacagttataacaacagtgaacgggggatttcattcacaacaaaaacacatggcgtgggtggggagagttcccgctgatcgaagcagcgagagaaagcacgactaacgggagcgggagagagatcgatcgcgaccggcggtccagccacaactgaggccccccaacttacaagctcgtcgtgcagccaggatgatccaatggaggtcgctcggctgcggctcccgcttcggctgctccatggctcgcgacaccgatcgtagtcgcgatccccttcagctgttcgttcggcggtgctcatcgagtgcaagtgtaacggtaacggtaaattgactaaattgaaactcgagccgcgaagagagcaagaaccacagaactgactgtgtgacgaagctttcctgcaccgtatgaagctctctttttgagctttgtgtttttcccgaaccccaccaccgacccattccccccaccccctcctccctcatcacacacacccaaaaccccccttatcaatcaattttatctcgggaccgagcggggatcgcgtttctcgagtctgctgggcacctgttacagtttagataggaatcagccctgttatcgccgaacactatctgtgccggttgtccaatttgcatacatatgtacatatgtatatacatagatatatgtatgtatactcggatccatatcggaactgtgtaaactcccacagcatgtacgaatacatatgttattatcgcgtgtctggaggggcttttctttgtcacgctttcgctgatcgggcgcttcgccccaatcactctctcttttgttccaaaccgaacctaatggtgatgctgattccgtctacagactctcactctttacttcatccaaaaatacacacagaaaaatacaaattacttttccattttagacaaaccaaaaattgacatcttcatctatctttatataatacaatgtataatattattattgatcttaaagttgaagtatctcttcgcttctttctgtgtacttaaaaggcatgataagaaagcttttgagcttgactttagctacatataacagagaatttttcactttcaagacagtaataaattgtttatttcctcgttaaatattcatatttacgcgaaa

SEQ ID NO: 6602 - DNA, 1428 bp, DROSOPHILA
accgccggtcgcgatcgatctctctcccgctcccgttagtcgtgctttctctcgctgcttcgatcagcgggaactctccccacccacgccatgtgtttttgttgtgaatgaaatcccccgttcactgttgttataactgttactttccaccctctatcacccactaacgcccatcgttctttgtctgtcatgcatcgacataatgcggagagttctttttgtttcatcaatcgcatcaacgggaataccaatgatgaactgcagcagccgggagaacatgagcccacttccgctctgctggactactgtaaacggaagttcctccgtccatatgtggccatcctgaccctggtgggcctcaatcccatctccacggacatgaccagcatccgtgcctgctgcagctacgtccaggcgctgatggtgctcttcgtcctgcttgtaggatacctcttgcggtatatttgcggatacaggggcgatcgcggcttcaccagctatcgggatattagacccataaccaatggtacagatggcggagctacgaccccgaacaccataggagaacttctgtttgggttcatagtgcccagtggctttaacctcttggccttcgtgtcggcagtgttggtatgcaaggtgatcgaccacgagcagctgcaaaacctcatcgagagggttttcctgatgtctgccaagccgaagaggctctgccgaatgctgtggctttttctggccattgcactggccctgctgattttgctattcggctacgcctgttgtgtggtgatgatgcagcccagccagatcgtcaaggtgtcctggctagcggaaatcctaagcgactgggagatgtggctgcgagtgggtctcttgttcaccatactgctgcaggatctggtggagattatcatactgagcaactactacatcgagtgttatttgctaaggatgcatctggaaacgctgtcgcacaagctgcttatgcactccatcgactcgctcgattggatgagggaagtcctcgaattccgcaagctgctggagcgcttgaatcagcacgtgtctattccagactttgatttccactactgcgccctgaagctcgtcctgctaaatattgcgaacgtgatgctgtggctatttttgggattgctgccctttttcgtggcatcatcggtgactcgagtgtgccagaatgctcaagctaatggacaccagatacgggttcgtccatttgtttaccacaatacctcagcggaagatctcaactcgacgttgctgttcgccgcctcgctggacatgtccgccaaactctttcgaatgcccatccagccaaactacttgtgcttcgccatccttgtggtggtcattgtgattctcacgctgggcatgtgcctaaatctcacagcactggggaaaatataa

SEQ ID NO: 6603 - protein, 412 aa, DROSOPHILA
MHRHNAESSFCFINRINGNTNDELQQPGEHEPTSALLDYCKRKFLRPYVAILTLVGLNPISTDMTSIRACCSYVQALMVLFVLLVGYLLRYICGYRGDRGFTSYRDIRPITNGTDGGATTPNTIGELLFGFIVPSGFNLLAFVSAVLVCKVIDHEQLQNLIERVFLMSAKPKRLCRMLWLFLAIALALLILLFGYACCVVMMQPSQIVKVSWLAEILSDWEMWLRVGLLFTILLQDLVEIIILSNYYIECYLLRMHLETLSHKLLMHSIDSLDWMREVLEFRKLLERLNQHVSIPDFDFHYCALKLVLLNIANVMLWLFLGLLPFFVASSVTRVCQNAQANGHQIRVRPFVYHNTSAEDLNSTLLFAASLDMSAKLFRMPIQPNYLCFAILVVVIVILTLGMCLNLTALGKI

SEQ ID NO: 6604 - DNA, 3863 bp, DROSOPHILA
caattagtttttaagtaattaagtggagtaaacatatacaattttattcttaccaaacacatatactcatatattttgaataaataaataaacaaatatatataaaatctacgaaattggcaaacaaattttaaagcattatagtattgccgatttaattaatataattaaataatatgtacatgtattaatcttgtgtgcgagcatgggttaaatctagctgcattcgaaaccgctactctggctcggccacaaagtgggcttggtcgctgttgcggacaagtgagattgctaatgagctgcttttagggggcgtgttgtgcttgctttccaacttttctagattgattctacgctgcctccagcagccacccctcccatcaccattcccatcaccatccagtcccgttggctcccagtcacagtattacacgtatgcaaattaagccgaagttcaattgcgaccgcagcaacaacacgatctttctacacttctccttgctatgcttgacattcacaaggtcaaagctcttaatattctggctcgtggccctacactgtaagaaattactatagaaataacggtacacggaataagatattttttttagtccatatgcttttaacaaatgtgttttaagtttatgttatattattgttagaaaaccggtgtttttttaaaatcggttaaaaaattactacgagagaaaaatacaaattttgtaaataagattgactctttttcgattttggaatattttcattcattttatgtttttacgttttcacttatttgtttctcagtgcactttctggtgttccattttctattgggcactttaccccgcatttgtttgcagatcacttgcttgcgcatttttattgcattttacatattacacattatttgaacgccgctgctgctgcatccgtcgacgtcgactgcactcgcccccacgagagaacagtatttaaggagctgcgaaggtccaagtcatgcattattgtctcagtgcagttgtcagttgcagttcagcagacgggctaacgagtacttgcatctcttcaaatttacttaattgatcaagtaagtagcaaaagggcacacaattgaaggaaattcttgtttaattgaatttattatgcaagtgcggaaataaaatgacagtattaaatagtaaatattttgtaaaatcatatataatcaaatttattcaatcagaactaattcaagctgtcacaagtagtgcgaactcaattaattggcatcgaattaaaatttggaggcctgttccgcatattcctcttggaaaatcacctgttagttaacttctaaaaataggaattttaacataactcgtccctgttaatcggcgccgtgccttcgttagctatctcaaaagcgagcgcgtgcagacgagcagtaattttccaagcatcaggcatataatatactaatactaatactaatactaatataagaatactaatatagaaaaagctttgccggtacaaaatcccaaacaaaaacaaaccgtgtgtgccgaaaaataaaaataaaccataaactaggcagcgctgccgtcgccggctgagcagcctgcgtacatagccgagatcgcgtaacggtagataatgaaaagctctacgtaaccgaagcttctgctgtacggatcttcctataaatacggggccgacacgaactggaaaccaacaactaacggagccctcttccaattgaaacagatcgaaagagcctgctaaagcaaaaaagaagtcaccatgtcgtttactttgaccaacaagaacgtgattttcgttgccggtctgggaggcattggtctggacaccagcaaggagctgctcaagcgcgatctgaaggtaactatgcgatgcccacaggctccatgcagcgatggaggttaatctcgtgtattcaatcctagaacctggtgatcctcgaccgcattgagaacccggctgccattgccgagctgaaggcaatcaatccaaaggtgaccgtcaccttctacccctatgatgtgaccgtgcccattgccgagaccaccaagctgctgaagaccatcttcgcccagctgaagaccgtcgatgtcctgatcaacggagctggtatcctggacgatcaccagatcgagcgcaccattgccgtcaactacactggcctggtcaacaccacgacggccattctggacttctgggacaagcgcaagggcggtcccggtggtatcatctgcaacattggatccgtcactggattcaatgccatctaccaggtgcccgtctactccggcaccaaggccgccgtggtcaacttcaccagctccctggcggtaagttgatcaaaggaaacgcaaagttttcaagaaaaaacaaaactaatttgatttataacacctttagaaactggcccccattaccggcgtgacggcttacactgtgaaccccggcatcacccgcaccaccctggtgcacacgttcaactcctggttggatgttgagcctcaggttgccgagaagctcctggctcatcccacccagccctcgttggcctgcgccgagaacttcgtcaaggctatcgagctgaaccagaacggagccatctggaaactggacttgggcaccctggaggccatccagtggaccaagcactgggactccggcatctaagaagtgatactcccaaaaaaaaaaaaaaacataacattagttcatagggttctgcgaaccagaagatattcacgcaaggcaataaggctgattcgatgcacactcacattcttctcctaatacgataataaaactttccatgaaaaatatggaaaaatatatgaaaattgagaaatccaaaaaactgataaacgctctacttaattaaaatagataaatgggagcggcaggaatggcggagcatggccaagttcctccgccaatcagtcgtaaaacagaagtcgtggaaagcggatagaaagaatgttcgatttgacgggcaagcatgtctgctatgtggcggattgcggaggaattgcactggagaccagcaaggttctcatgaccaagaatatagcggtcagtgagcgggaagctcggtttctgtccagatcgaactcaaaactagtccagccagtcgctgtcgaaactaattaagttaatgagtttttcatgttagtttcgcgctgagcaacaattaagtttatgtttcagttcggcttagatttcgctgaaggacttgccactttcaatcaatactttagaacaaaatcaaaactcattctaatagcttggtgttcatctttttttttaatgataagcattttgtcgtttatactttttatatttcgatattaaaccacctatgaagtctattttaatcgccagataagcaatatattgtgtaaatatttgtattctttatcaggaaattcagggagacggggaagttactatctactaaaagccaaacaatttcttacagttttactctctctactctagaaactggccattttacagagtacggaaaatccccaggccatcgctcagttgcagtcgataaagccgagtacccaaatatttttctggacctacgacgtgaccatggcaagggaagatatgaagaagtacttcgatgaggtgatggtccaaatggactacatcgatgtcctgatcaatggtgctacgctgtgcgatgaaaataacattgatgccaccatcaatacaaatctaacgggaatgatgaacactgtggccacagtgttaccctatatggacagaaaaatgggaggaactggtgggctaattgtgaacgtcacttcggtcattggattggacccttcgccggtttt

SEQ ID NO: 6605 - DNA, 1650 bp, DROSOPHILA
attattgtctcagtgcagttgtcagttgcagttcagcagacgggctaacgagtacttgcatctcttcaaatttacttaattgatcaagtaagtagcaaaagggcacacaattgaaggaaattcttgtttaattgaatttattatgcaagtgcggaaataaaatgacagtattaaatagtaaatattttgtaaaatcatatataatcaaatttattcaatcagaactaattcaagctgtcacaagtagtgcgaactcaattaattggcatcgaattaaaatttggaggcctgttccgcatattcctcttggaaaatcacctgttagttaacttctaaaaataggaattttaacataactcgtccctgttaatcggcgccgtgccttcgttagctatctcaaaagcgagcgcgtgcagacgagcagtaattttccaagcatcaggcatataatatactaatactaatactaatactaatataagaatactaatatagaaaaagctttgccggtacaaaatcccaaacaaaaacaaaccgtgtgtgccgaaaaataaaaataaaccataaactaggcagcgctgccgtcgccggctgagcagcctgcgtacatagccgagatcgcgtaacggtagataatgaaaagctctacgtaaccgaagcttctgctgatcgaaagagcctgctaaagcaaaaaagaagtcaccatgtcgtttactttgaccaacaagaacgtgattttcgttgccggtctgggaggcattggtctggacaccagcaaggagctgctcaagcgcgatctgaagaacctggtgatcctcgaccgcattgagaacccggctgccattgccgagctgaaggcaatcaatccaaaggtgaccgtcaccttctacccctatgatgtgaccgtgcccattgccgagaccaccaagctgctgaagaccatcttcgcccagctgaagaccgtcgatgtcctgatcaacggagctggtatcctggacgatcaccagatcgagcgcaccattgccgtcaactacactggcctggtcaacaccacgacggccattctggacttctgggacaagcgcaagggcggtcccggtggtatcatctgcaacattggatccgtcactggattcaatgccatctaccaggtgcccgtctactccggcaccaaggccgccgtggtcaacttcaccagctccctggcgaaactggcccccattaccggcgtgacggcttacactgtgaaccccggcatcacccgcaccaccctggtgcacacgttcaactcctggttggatgttgagcctcaggttgccgagaagctcctggctcatcccacccagccctcgttggcctgcgccgagaacttcgtcaaggctatcgagctgaaccagaacggagccatctggaaactggacttgggcaccctggaggccatccagtggaccaagcactgggactccggcatctaagaagtgatactcccaaaaaaaaaaaaaaacataacattagttcatagggttctgcgaaccagaagatattcacgcaaggcaataaggctgattcgatgcacactcacattcttctcctaatacgataataaaactttccatgaaaaatatggaaaaatatatgaaaattgagaaa

SEQ ID NO: 6606 - protein, 256 aa, DROSOPHILA
MSFTLTNKNVIFVAGLGGIGLDTSKELLKRDLKNLVILDRIENPAAIAELKAINPKVTVTFYPYDVTVPIAETTKLLKTIFAQLKTVDVLINGAGILDDHQIERTIAVNYTGLVNTTTAILDFWDKRKGGPGGIICNIGSVTGFNAIYQVPVYSGTKAAVVNFTSSLAKLAPITGVTAYTVNPGITRTTLVHTFNSWLDVEPQVAEKLLAHPTQPSLACAENFVKAIELNQNGAIWKLDLGTLEAIQWTKHWDSGI

SEQ ID NO: 6607 - DNA, 3312 bp, DROSOPHILA
gagctgaaggcaatcaatccaaaggtgaccgtcaccttctacccctatgatgtgaccgtgcccattgccgagaccaccaagctgctgaagaccatcttcgcccagctgaagaccgtcgatgtcctgatcaacggagctggtatcctggacgatcaccagatcgagcgcaccattgccgtcaactacactggcctggtcaacaccacgacggccattctggacttctgggacaagcgcaagggcggtcccggtggtatcatctgcaacattggatccgtcactggattcaatgccatctaccaggtgcccgtctactccggcaccaaggccgccgtggtcaacttcaccagctccctggcggtaagttgatcaaaggaaacgcaaagttttcaagaaaaaacaaaactaatttgatttataacacctttagaaactggcccccattaccggcgtgacggcttacactgtgaaccccggcatcacccgcaccaccctggtgcacacgttcaactcctggttggatgttgagcctcaggttgccgagaagctcctggctcatcccacccagccctcgttggcctgcgccgagaacttcgtcaaggctatcgagctgaaccagaacggagccatctggaaactggacttgggcaccctggaggccatccagtggaccaagcactgggactccggcatctaagaagtgatactcccaaaaaaaaaaaaaaacataacattagttcatagggttctgcgaaccagaagatattcacgcaaggcaataaggctgattcgatgcacactcacattcttctcctaatacgataataaaactttccatgaaaaatatggaaaaatatatgaaaattgagaaatccaaaaaactgataaacgctctacttaattaaaatagataaatgggagcggcaggaatggcggagcatggccaagttcctccgccaatcagtcgtaaaacagaagtcgtggaaagcggatagaaagaatgttcgatttgacgggcaagcatgtctgctatgtggcggattgcggaggaattgcactggagaccagcaaggttctcatgaccaagaatatagcggtcagtgagcgggaagctcggtttctgtccagatcgaactcaaaactagtccagccagtcgctgtcgaaactaattaagttaatgagtttttcatgttagtttcgcgctgagcaacaattaagtttatgtttcagttcggcttagatttcgctgaaggacttgccactttcaatcaatactttagaacaaaatcaaaactcattctaatagcttggtgttcatctttttttttaatgataagcattttgtcgtttatactttttatatttcgatattaaaccacctatgaagtctattttaatcgccagataagcaatatattgtgtaaatatttgtattctttatcaggaaattcagggagacggggaagttactatctactaaaagccaaacaatttcttacagttttactctctctactctagaaactggccattttacagagtacggaaaatccccaggccatcgctcagttgcagtcgataaagccgagtacccaaatatttttctggacctacgacgtgaccatggcaagggaagatatgaagaagtacttcgatgaggtgatggtccaaatggactacatcgatgtcctgatcaatggtgctacgctgtgcgatgaaaataacattgatgccaccatcaatacaaatctaacgggaatgatgaacactgtggccacagtgttaccctatatggacagaaaaatgggaggaactggtgggctaattgtgaacgtcacttcggtcattggattggacccttcgccggttttctgcgcatatagtgcatccaaattcggtgtaattggatttaccagaagtctagcggtgagttgaatacgatcttatgcggataaattcataattttttggtttcaggaccctctttactattcccaaaacggggtagctgtgatggcggtttgttgtggtcctacaagggtctttgtggaccgggaactgaaagcgtttttggaatacggacaatcctttgccgatcgcctgcggcgagcgccctgccaatcgacatcggtttgtggtcagaatattgtcaatgccatcgagagatcggagaatggtcagatatggattgcggataagggtggactcgagttggtcaaattgcattggtactggcacatggccgaccagttcgtgcactatatgcagagcaatgatgaagaggatcaagattgaattcgaatcaaataaaataatgctttacgcaaaaagtaggcaattcattttcctatgataatagatattcttttttttttttttttttttttttttttttttttttgatgatgtttttattatttgatcaacgcactgttacccatgcggcaacttaatttgatctgcttaaattattttattttactatgtgtcttggttacttaagactaacagatttttaatcctaaaaatgatagggagaattataatagttgatataacatagtattctaatgaattttaaaactaagactttctaggtcaaaaccaggttagggaggtcatgagggtggtgtcgcttgagtcttcttttgactctagtccgagggtcagcattgaccacagctgcagttcctagcttccttgctaggctgttggggtgtacattaagcctttccatatatttttgggcgagcgaatgttgatgggagctataattagatgtgcttaattatgatggggttacgttatgcatgttgtgggaatgtgaactatactgttttttttttgacatcagtcgactatatgttctcctaacaacctttgatctaaattgtaagtgcaaagtcaagtccaactactcaaggctttttcaacaacaatatacgtagactttacgtgcaacatttctagaacgtctctagtgcatctcaactatgcgaatgcatgtcgaaattttgctagagcaatgccgtgcattgaactttggcacatttccaaacgcacaggcagacccagtcagccataggaaacccaatcggacgaccgagaatcgaatgcgaaaacaaacaaatctgccgacacattgcccaggaatattggcactgagagcctacagatacaccaggaaaaaaaaaaaataaatgctgggatagttttggtattttcggtactaatctaacgcaatagcccttctacggtcgagtaaactgaaaaactcttaatatttttatgttgcattcattaagtagtat

SEQ ID NO: 6608 - DNA, 835 bp, DROSOPHILA
atgttcgatttgacgggcaagcatgtctgctatgtggcggattgcggaggaattgcactggagaccagcaaggttctcatgaccaagaatatagcgaaactggccattttacagagtacggaaaatccccaggccatcgctcagttgcagtcgataaagccgagtacccaaatatttttctggacctacgacgtgaccatggcaagggaagatatgaagaagtacttcgatgaggtgatggtccaaatggactacatcgatgtcctgatcaatggtgctacgctgtgcgatgaaaataacattgatgccaccatcaatacaaatctaacgggaatgatgaacactgtggccacagtgttaccctatatggacagaaaaatgggaggaactggtgggctaattgtgaacgtcacttcggtcattggattggacccttcgccggttttctgcgcatatagtgcatccaaattcggtgtaattggatttaccagaagtctagcggaccctctttactattcccaaaacggggtagctgtgatggcggtttgttgtggtcctacaagggtctttgtggaccgggaactgaaagcgtttttggaatacggacaatcctttgccgatcgcctgcggcgagcgccctgccaatcgacatcggtttgtggtcagaatattgtcaatgccatcgagagatcggagaatggtcagatatggattgcggataagggtggactcgagttggtcaaattgcattggtactggcacatggccgaccagttcgtgcactatatgcagagcaatgatgaagaggatcaagattgaattcgaatcaaataaa

SEQ ID NO: 6609 - protein, 272 aa, DROSOPHILA
MFDLTGKHVCYVADCGGIALETSKVLMTKNIAKLAILQSTENPQAIAQLQSIKPSTQIFFWTYDVTMAREDMKKYFDEVMVQMDYIDVLINGATLCDENNIDATINTNLTGMMNTVATVLPYMDRKMGGTGGLIVNVTSVIGLDPSPVFCAYSASKFGVIGFTRSLADPLYYSQNGVAVMAVCCGPTRVFVDRELKAFLEYGQSFADRLRRAPCQSTSVCGQNIVNAIERSENGQIWIADKGGLELVKLHWYWHMADQFVHYMQSNDEEDQD

SEQ ID NO: 6610 - DNA, 2555 bp, DROSOPHILA
ttggattctcccatgcaatcaacattagttgccaatttgccgagtcataccaacagcagtcgtggccgagcggttaaggcgtctgactagaaatcagattccctctgggagcgtaggttcgaatcctaccgactgcgagaaggtttacggattttctttatttttcaacattctctattctattctctattttttcctctcagaaactggttaaattattataataataatagatacatgtgtgctgtttgtttacaactcgattagtttttcactctctacgtacacagaacaccctattccccttacatttcactgttgcgcgtgcagtcgtatgtcatcgataaccgattataaaacatctgatgtatttttatcgaaggaaaaaaggacctatatcttattttgaaaataaaaatttgtaggagaaatgagagcgtaagtatctgcttttgtaaatgtgcgtgtcctaaagtcccatctcgtcattttagcgcactcaaagacagatgccgagtctgccttggggtcagtgaaaacgtggtaaacattttcgaggcaaaacaagacctgctggtttcaatagcacaagtgatctctgaatgcacggactgtgacattaaagaaggggacgatctgtcggagttaatttgtgcatcctgtttggaggatgcccagagtgcattcgatatcatcagaaaatacgagcgcagctacatcaccttttgtgaggcatacgaagcggtacttgaagaggattccctagaaggagaggtgtacacaatatcggacagcgacagtgggacgtcgtcgcacgataccaatggaaaccaaaagtacataaatgccgatgaaatctatgagatatcagaagatgaatgtgatcaaaccgtagatgcaaagggagaagacttcaataatagcgtcgacgatagtgttcattcgaagaatcagcaacatgatgaaaaggaacccaaagaaagtggtacattggacaaggatgtccaggacgccccccgaaatgaaagtgttgcacctgatcatcagcaaggtgagactgacaccgaaattggctttggacggcagtgaatgtgttcggagcggtgctcggatggcctacaagtgctcccactgcagtaagtcctttccacatcgatccaggttcgaggagcacaaccgcgtccacacgggagaacgaccattcaaatgccccagctgcccgatgaccttccgactgaaatcctttcttaaaaggcacagcgccctgcatttggaagaacgaccttacccgtgcgacatctgtgccaagacttttgctgacaaaagtaacctgcgccagcgcaagaagacacactccgacattcgacccttcgactgcccttcctgtctgagttccttccgattgaaaagccacctggaccgccacaccatgagtcacacgggcgagcggccatttaagtgtgatcactgcggtaaagacttcacgctacgctgtaacctcgtcaagcatttaaggacccacaccagggaacgtcccttcaaatgctcaatatgaaaatcggcctttacgaacttatcgagccccattgcatgaaccatcgaatgaactacctttccagtgtgatcggtgcgacaagcggtttgtggatagggttcgtcctgactgccagtcccgtttctcgacgtcatccgacctccaccagcccggactggtacacaaggcaaaagcaaagatactagaataattctagtgtctttggcaaaaggaccttttacgtgaagtgtgagggttgcggtttagtccttaagaatatgattcttcttcgaaggcatgctaagaattacggcaaggcgttaaaaatgtaatcttatcttagccaaatacgtaccaaatacgtatttattataattttgttatttttcattcaagaaacgttttcaagctcgataacagttcggtaacgtaacatacatattcttttgcgcctaacagcccactgttgtgggaacagggtgatcattccactagcaaactgaatgctatgccaaaatggtaaacaaactattccctataataaataaaccgtctcatttaatttgaaaatatttaaaataccactacatatttatttgtaattacctttgatcgatttgtataggcggccaaggtttattaaaatacagggtaatggagaacaagtgtcgagtttgcctggcaagctcaaaaaacatggtgaacattttcgaggaaaggcaggatcttccagtttcaatagcccatatgataattgaatgcaccggcttcaaagttgaaaaaggggactcattaccgcactcaatatgcccaccatgtgtgaaggatgcccacaatgcgtttacgatcataaaaacctacgaacgcagctaccaggtcttctatgaagtgcaggacacggttctcgaggaagaactctcggaggatgtaatcatcgagctatcagactccgacgaggtaatactcatcgatgaacaagaggagaaagttcatttgagtgaaaacaaggcacctacgaatg

SEQ ID NO: 6611 - DNA, 555 bp, DROSOPHILA
atgtccaggacgccccccgaaatgaaagtgttgcacctgatcatcagcaaggtgagactgacaccgaaattggctttggacggcagtgaatgtgttcggagcggtgctcggatggcctacaagtgctcccactgcagtaagtcctttccacatcgatccaggttcgaggagcacaaccgcgtccacacgggagaacgaccattcaaatgccccagctgcccgatgaccttccgactgaaatcctttcttaaaaggcacagcgccctgcatttggaagaacgaccttacccgtgcgacatctgtgccaagacttttgctgacaaaagtaacctgcgccagcgcaagaagacacactccgacattcgacccttcgactgcccttcctgtctgagttccttccgattgaaaagccacctggaccgccacaccatgagtcacacgggcgagcggccatttaagtgtgatcactgcggtaaagacttcacgctacgctgtaacctcgtcaagcatttaaggacccacaccagggaacgtcccttcaaatgctcaatatga

SEQ ID NO: 6612 - protein, 184 aa, DROSOPHILA
MSRTPPEMKVLHLIISKVRLTPKLALDGSECVRSGARMAYKCSHCSKSFPHRSRFEEHNRVHTGERPFKCPSCPMTFRLKSFLKRHSALHLEERPYPCDICAKTFADKSNLRQRKKTHSDIRPFDCPSCLSSFRLKSHLDRHTMSHTGERPFKCDHCGKDFTLRCNLVKHLRTHTRERPFKCSI

SEQ ID NO: 6613 - DNA, 3189 bp, DROSOPHILA
atcagacgggagtcacctttcaaggccttcctcgaggaaccattgacatcacccggctcaactttcaatttgctgaacaggaaacaccgagcagtgaacaatagactagggttaataatagttcggctcacacattgtaagtttgcttttggccaatgtttacagaaactttccaagttctggccattcatcgcaccgactttgttggcgaagtgcactcagttggcttttatggccaggaagttgtcaatggagaggccatacgcgataaaatatgatagtaaagctcggcatgacaaacacatccaagggagctccaactttttgttcgatatctgttcaaggattactgtcctgtctcgtaaatgagaattgaaggtgtcgtaaatccgtgacgcgttcttttcgctgattgcgccagtctgctgaaatcgcgctgcaaacaggtcgtttgtaattcttaaattgtaatcaagcgcgggcgaaataattactgaatatttataactcggttccccgtggtctgctcttaatggtcgtcgattttaatggtatgcttttccacgccccattgaaaaatcactgccactcgtctcataattgccacgcccctttgggcggaacggggcgtaacggggcgtggcggggcaaggggcggacatttgtctgtcgccagcagtcgccatttggttttgggcccacagccgttgacaagccatttgtcacatttacacagccgcaggcggccccctccttggatttcacctggacttcaggtgtccccgggactcacattaaagcgagtcatccggcttggaagcccgcgatgacccagttggaagcactgccaagacatatttcgcggaatttatgagcagccagttgaaatcctgccaaatcaatttgcggccaagtccgttcagggttgggcaaacacgtaggcccagcaaacaagtcagctccactcacaactcacatttcgggcctcaaattctccaaaatgaacaccctgcggaaactgaatagcctgccgcccttcagatcggtgggcggtgcttatcgtctgtttgctggcaaggatcagaagaaggattccgcggggcagaagaccagacagccggaaaagccaccacaagataagcagaagagtaagggtgctagtggcaaagcaaagagtgctgggtcaactgactccgccaagaagaccaccaaggttaccctgatcaacggcgagggcgtgggacgcgagctgatggacgcggtgcaagaggtaatctgtgctgtgaaggccccaatagagtgggatgtccacgatgagttcaaggccaaggacagcgatgatgtgtccccggaggtccttaagtccttgcgagccaataaggttggcatcaagggacccgtggatagtcgtcactggcagcgccagatccgcaagcagttcgcccagttcgcctacgtgtcattgtgctcccacatcgagggactggactcgccctacggcgacttcgacgttgtgatcatccgggaccagatggagggcgactactctggcatcgagcatctggtggtcccgggtgtcatgcagaccattaaggtaagcaccacggccggagcggccaggatcgctgagttcgtcttcaactacgccgtgaagaacaagcgcaaaaggatcacggtggcccacaaggccaacatcatgcggatgacggacggcaacttcctggaggccatgcgggcggaggccgacaagcacgtggacgacgttttgttcgaggagcgctacctggacacctgcattctgaagatcctgctgaagccccacaagtgcgacgtgatggtctcgtccagcatgtacggcgacgtgctgcgggtgatagccggcggcatgatgggcgtgccgggcatctgtcccggctactccgtcagctccctgggcaccgtgttcgactgccggatgaaggcgtgccacgccctcgcgggcaaggacctggccaatcccacgggacccctgctcagcgccgccctaatgctgcgccacgtgaagatggacaagcaggcggaccaagtcgactgcgccattcgcaaggtctacaaggacaccgatatccgcaccccggatgtgggcggcaaggccaagtgctcagagttcgttaaggccgtgtgtgattgcctctaagttctgctcttaaagcaacaaaattagtaagcatataaaatcatgtatggtttatcatttatcataacgattacgaaccacttcgaaaaatgaaatatgtgtagattatccacatacttggatatttatttggtttaaagagaatgcagccataaatggtaacatatagttcgccattttagagaccaataactttttcgccatacacaactaagtgaaattggtagaacattgttgtccgttctgacaatgcgactttatgtgcctagtgagttcagtgtgatagctgactttctttggccaaactaaactatcgccaaactaaacacatttataatatgtaattaccttgcatttaattcactcgcttcgctggaggtcataaaagtcgtaattcgcttggctatcgcttgccagtcgtggtcgtatatttatatagccccgtgctctctggtcgcagtttggagctcccagctcagagttccaagctcccagctcccagttcccagatctctggtgcttgcagtgcatttcggcagatttatggccgtccggcattaaccgccgcagatgccagctgcagtttcctttgccgctttttcggctcttaattaagttgcatttcgagtcctgccacatggccgctgccatcgctgggagcaggatggtagggtggcgggtagtggcggtgcactctgcgataataaaagcacatgttgacatctgcccacagtctcaggcggccattatgcacctattcgccattttgggaggtcgccggggtggggaattcttttagtgccgcttaagctttttacacattttcgtttatggctgctgccatttcggtccgcatgcaggacgtgctgtcaaggctgtgcctattagtccttggccgaaaggacgcacccttgttgttgtttctggagctgtggacctctctgtttcgctcaaattggaatgccataaaaatacggaggtacctactccgcatgcttgcttatttaaaaatc

SEQ ID NO: 6614 - DNA, 1189 bp, DROSOPHILA
atgaacaccctgcggaaactgaatagcctgccgcccttcagatcggtgggcggtgcttatcgtctgtttgctggcaaggatcagaagaaggattccgcggggcagaagaccagacagccggaaaagccaccacaagataagcagaagagtaagggtgctagtggcaaagcaaagagtgctgggtcaactgactccgccaagaagaccaccaaggttaccctgatcaacggcgagggcgtgggacgcgagctgatggacgcggtgcaagaggtaatctgtgctgtgaaggccccaatagagtgggatgtccacgatgagttcaaggccaaggacagcgatgatgtgtccccggaggtccttaagtccttgcgagccaataaggttggcatcaagggacccgtggatagtcgtcactggcagcgccagatccgcaagcagttcgcccagttcgcctacgtgtcattgtgctcccacatcgagggactggactcgccctacggcgacttcgacgttgtgatcatccgggaccagatggagggcgactactctggcatcgagcatctggtggtcccgggtgtcatgcagaccattaaggtaagcaccacggccggagcggccaggatcgctgagttcgtcttcaactacgccgtgaagaacaagcgcaaaaggatcacggtggcccacaaggccaacatcatgcggatgacggacggcaacttcctggaggccatgcgggcggaggccgacaagcacgtggacgacgttttgttcgaggagcgctacctggacacctgcattctgaagatcctgctgaagccccacaagtgcgacgtgatggtctcgtccagcatgtacggcgacgtgctgcgggtgatagccggcggcatgatgggcgtgccgggcatctgtcccggctactccgtcagctccctgggcaccgtgttcgactgccggatgaaggcgtgccacgccctcgcgggcaaggacctggccaatcccacgggacccctgctcagcgccgccctaatgctgcgccacgtgaagatggacaagcaggcggaccaagtcgactgcgccattcgcaaggtctacaaggacaccgatatccgcaccccggatgtgggcggcaaggccaagtgctcagagttcgttaaggccgtgtgtgattgcctctaagttctgctcttaa

SEQ ID NO: 6615 - protein, 391 aa, DROSOPHILA
MNTLRKLNSLPPFRSVGGAYRLFAGKDQKKDSAGQKTRQPEKPPQDKQKSKGASGKAKSAGSTDSAKKTTKVTLINGEGVGRELMDAVQEVICAVKAPIEWDVHDEFKAKDSDDVSPEVLKSLRANKVGIKGPVDSRHWQRQIRKQFAQFAYVSLCSHIEGLDSPYGDFDVVIIRDQMEGDYSGIEHLVVPGVMQTIKVSTTAGAARIAEFVFNYAVKNKRKRITVAHKANIMRMTDGNFLEAMRAEADKHVDDVLFEERYLDTCILKILLKPHKCDVMVSSSMYGDVLRVIAGGMMGVPGICPGYSVSSLGTVFDCRMKACHALAGKDLANPTGPLLSAALMLRHVKMDKQADQVDCAIRKVYKDTDIRTPDVGGKAKCSEFVKAVCDCL

SEQ ID NO: 6616 - DNA, 3344 bp, DROSOPHILA
atcatttaattgtgaccgcaaaagccctaccatattaacaatcaattaattctatgcgaatagattttttaatgtgcattgtttttatctgcactcgaatatgggcaccatatgttattgatattgtttaatccgatttaaaaagggactgaatcgaccagcgccctgcctttgatttaatacacggcctcggatgagtaaaaaatacacaaatattataaattaaaaggccgtgcaaatcagtggtttctattgttattactttgcattgctgctccatttatccacactttgtcgcacagtcattcaagtgccacggccactaattgtccatcctgccaacggttgaacggacttaaaaacaccgattgcattgacaaaaagtgtcaaaaccatttcatggcccatttaaccagcgattacaacaagccaaaagcgcggaaaataaagccaaatccggatgcagcaaatgagcaacaaataatgaagctcttaaatatgtggacatggggacacaatagtattcaatagtattcagttaaagtagctaactggccaaaaaacaatgggaattagaagtgcagtgaagttacaatggctgatgtgaagttcgcttttaatgacgtgcatatttgctgattttaatttaatcactaattacacgaatgcaagtttgcatttatgaggccaccgcagtgttaattccgttcaaaatagttgaaaataattaaattgagcttcatagtttagtactttacatatgtacgcatacgtatgtgcgcctcattatacatcgaattaataattgatgccgaaatgtgcaatttcacgttgttttccacatcaaagcatattcagacgcgccgcggcacgcactttatgttccagttagttatagtttataaaaacgcatatggcagataattaagtgggctcacgctctaatccagatggcttctcgcagttatagttttcaatccaggtgacctatgccagttagttcgacccatcccctccaaatccaatcagtcaaacatttcttaccacacacgtacaacccgaaccccgcttagtcatttcaaattcaagtatatagactacattgattttggaagagttagccacaatgttcatccgcggagatgcgccacaagcttcccggggcaaaattccccagatccccagctccatgacgccctatgtggcggcagtgaagcgcggaccctacacaatgaccaatccggtgtacaacacccacaatcccaacctggtgggcttggatggccaggtggaggattcccggcccaagcacacctttaatgtgaagaggcaagagctggagaataactaccggcaccaccagcggctgatccccgtgcccacttcccggaggacgatgcccaagatccgatcccacatagtgatgaacgagcagcgggagctgtatcgccagcaccgcgatcgaatgtccaacatcaagggcaaggtcaacacctatctgccgcccccgaaggtgcagatcgagggaaatggcatggagctctcctacatggagatgctgaccgcactctacaagaagagcaacaacacgctgcggaccttcaccaagtcgccggagcgcctggcagccggcaggtggcgcaatgccaacttggcccgggagaaggagcgccgccaactggagaagaacaaggagttccacaagggaggcgagctgtttgacccagaggcgggcaagtcaaagcggtacaagcccaagtcctcgggctccttcagctgcgagattcccatgcacgtgctccatcgctacgagaacttgatggaccaatgcgacgtgggcgttctgtgcaagctgctgcgtccgcagatctacctggacatcgaggtgcgggaagcccgcatccagggcaggctgatcatccagctcttcaccgaggcctgtccgcaggtggtgctggagttcatgaggatctgcacccagaacaacagtagcgccatcgtattcaaccgcgccctggcgcccatttggatggagggacgactggccatggatccgcagagaagcaccgagctgaccaacatcgagcacgacttcgaggtgctgaaccacggagtggacgccggaatcctctcctttcccagtcgctatgtcaggggaaacgcccggactgccgtcaacttcaccatcagctttaagcccctgtccattctcaacggcaggagaatcgccttcgggaaggttcgcaagggcatgcagctcctggagaggattcaggtggccgtcggacacctgcccatgagccacaacttgatctcgctgacggactgtggagtgatctgagaggtgtaaaatttccagtagatagttgggatctactcataacttttcgaagaaaattaattaggatcaattgctaggcggaaatctatattcttattcttaagccatgtcaccccacttaaagctgctgtaaaccacaagtaaatgattaatgtgcatagatacatagatacgagatacacttgtgcattcattccaagtatcttgaatatgggtttgatggatcacaatccctttggatatgctgtttcctccttcatatatatatacttcgatatttcagttttccgtttgaatcaggcgaagcaagtcacaaagcattatacactttttctagaattcagtaagtttgctcacttcaacttctttacggaatcgattcattctgtactaggtaatcctcgacatgtatatggtttgtgacggattgaacagccccaggctgcagggaggaaaggaagcggaagcggatgggagtcagtggccgtttccggacaagtaccacatgaggaacacccggatccttcaggtgtcaaaggctcaaatcagcgaggtgcccatggaggtattcgaggcagctcagcaggagctagtgaatatcgtgagcttggatggcaacaggttgctcgagatgcccaaagatctgcccttgctctccgagcacctcacccagttggtcctgaacaaaaaccagatctccttcgttcccaccaacatctcgcagtactcgaagttgactaacctgagcctctccaacaatcttctgtgcgacttgcccatggagttgggcggactgcggctgctccgcaatctggacatctcccacaatcgcttccgccagttgccacgctgcatctacgagctagagagactggaaaccttgtcggcccacgacaaccagatccgtgccatcgatgctagtgaatcgggcctgggcggaatgcgggaactgaagagattgaacttgggaaacaatgacatccaaatagtgccgccgatcttg

SEQ ID NO: 6617 - DNA, 1344 bp, DROSOPHILA
ttcgacccatcccctccaaatccaatcagtcaaacatttcttaccacacacgtacaacccgaaccccgcttagtcatttcaaattcaagtatatagactacattgattttggaagagttagccacaatgttcatccgcggagatgcgccacaagcttcccggggcaaaattccccagatccccagctccatgacgccctatgtggcggcagtgaagcgcggaccctacacaatgaccaatccggtgtacaacacccacaatcccaacctggtgggcttggatggccaggtggaggattcccggcccaagcacacctttaatgtgaagaggcaagagctggagaataactaccggcaccaccagcggctgatccccgtgcccacttcccggaggacgatgcccaagatccgatcccacatagtgatgaacgagcagcgggagctgtatcgccagcaccgcgatcgaatgtccaacatcaagggcaaggtcaacacctatctgccgcccccgaaggtgcagatcgagggaaatggcatggagctctcctacatggagatgctgaccgcactctacaagaagagcaacaacacgctgcggaccttcaccaagtcgccggagcgcctggcagccggcaggtggcgcaatgccaacttggcccgggagaaggagcgccgccaactggagaagaacaaggagttccacaagggaggcgagctgtttgacccagaggcgggcaagtcaaagcggtacaagcccaagtcctcgggctccttcagctgcgagattcccatgcacgtgctccatcgctacgagaacttgatggaccaatgcgacgtgggcgttctgtgcaagctgctgcgtccgcagatctacctggacatcgaggtgcgggaagcccgcatccagggcaggctgatcatccagctcttcaccgaggcctgtccgcaggtggtgctggagttcatgaggatctgcacccagaacaacagtagcgccatcgtattcaaccgcgccctggcgcccatttggatggagggacgactggccatggatccgcagagaagcaccgagctgaccaacatcgagcacgacttcgaggtgctgaaccacggagtggacgccggaatcctctcctttcccagtcgctatgtcaggggaaacgcccggactgccgtcaacttcaccatcagctttaagcccctgtccattctcaacggcaggagaatcgccttcgggaaggttcgcaagggcatgcagctcctggagaggattcaggtggccgtcggacacctgcccatgagccacaacttgatctcgctgacggactgtggagtgatctgagag

SEQ ID NO: 6618 - protein, 404 aa, DROSOPHILA
MFIRGDAPQASRGKIPQIPSSMTPYVAAVKRGPYTMTNPVYNTHNPNLVGLDGQVEDSRPKHTFNVKRQELENNYRHHQRLIPVPTSRRTMPKIRSHIVMNEQRELYRQHRDRMSNIKGKVNTYLPPPKVQIEGNGMELSYMEMLTALYKKSNNTLRTFTKSPERLAAGRWRNANLAREKERRQLEKNKEFHKGGELFDPEAGKSKRYKPKSSGSFSCEIPMHVLHRYENLMDQCDVGVLCKLLRPQIYLDIEVREARIQGRLIIQLFTEACPQVVLEFMRICTQNNSSAIVFNRALAPIWMEGRLAMDPQRSTELTNIEHDFEVLNHGVDAGILSFPSRYVRGNARTAVNFTISFKPLSILNGRRIAFGKVRKGMQLLERIQVAVGHLPMSHNLISLTDCGVI

SEQ ID NO: 6619 - DNA, 2903 bp, DROSOPHILA
ggagcgcctggcagccggcaggtggcgcaatgccaacttggcccgggagaaggagcgccgccaactggagaagaacaaggagttccacaagggaggcgagctgtttgacccagaggcgggcaagtcaaagcggtacaagcccaagtcctcgggctccttcagctgcgagattcccatgcacgtgctccatcgctacgagaacttgatggaccaatgcgacgtgggcgttctgtgcaagctgctgcgtccgcagatctacctggacatcgaggtgcgggaagcccgcatccagggcaggctgatcatccagctcttcaccgaggcctgtccgcaggtggtgctggagttcatgaggatctgcacccagaacaacagtagcgccatcgtattcaaccgcgccctggcgcccatttggatggagggacgactggccatggatccgcagagaagcaccgagctgaccaacatcgagcacgacttcgaggtgctgaaccacggagtggacgccggaatcctctcctttcccagtcgctatgtcaggggaaacgcccggactgccgtcaacttcaccatcagctttaagcccctgtccattctcaacggcaggagaatcgccttcgggaaggttcgcaagggcatgcagctcctggagaggattcaggtggccgtcggacacctgcccatgagccacaacttgatctcgctgacggactgtggagtgatctgagaggtgtaaaatttccagtagatagttgggatctactcataacttttcgaagaaaattaattaggatcaattgctaggcggaaatctatattcttattcttaagccatgtcaccccacttaaagctgctgtaaaccacaagtaaatgattaatgtgcatagatacatagatacgagatacacttgtgcattcattccaagtatcttgaatatgggtttgatggatcacaatccctttggatatgctgtttcctccttcatatatatatacttcgatatttcagttttccgtttgaatcaggcgaagcaagtcacaaagcattatacactttttctagaattcagtaagtttgctcacttcaacttctttacggaatcgattcattctgtactaggtaatcctcgacatgtatatggtttgtgacggattgaacagccccaggctgcagggaggaaaggaagcggaagcggatgggagtcagtggccgtttccggacaagtaccacatgaggaacacccggatccttcaggtgtcaaaggctcaaatcagcgaggtgcccatggaggtattcgaggcagctcagcaggagctagtgaatatcgtgagcttggatggcaacaggttgctcgagatgcccaaagatctgcccttgctctccgagcacctcacccagttggtcctgaacaaaaaccagatctccttcgttcccaccaacatctcgcagtactcgaagttgactaacctgagcctctccaacaatcttctgtgcgacttgcccatggagttgggcggactgcggctgctccgcaatctggacatctcccacaatcgcttccgccagttgccacgctgcatctacgagctagagagactggaaaccttgtcggcccacgacaaccagatccgtgccatcgatgctagtgaatcgggcctgggcggaatgcgggaactgaagagattgaacttgggaaacaatgacatccaaatagtgccgccgatcttgggcaaaatgcagaatctcgtggaattggagctgtggggaaatcccttccgccagccccgccaccagattctatcgatggggactccggcgctgctcagctacttgcgcacccgcattcctatataaatcatatattatttattattaattcaaatcaaatttcaaagtattgccaaataaattgacagcagtgcagtttagcccctaattccgtagttttgcttaaatcgtgctcatggaagattcctcaccaaagattcctccttgggtaagtttctggcagcctgagtttgctgaactcgtaatgatagtaagctctgattcctgcgtcatcaaatcaaataggtcaaaacctagttggctgggaagaggacactactatactcactactagttacatttgcgaagcccgaaaatgtccagaagttcgaggttatcagtaactgaaactcagcgcaaaagcactccagtggtaaagaaggcggttatgtaagttggaacacgaaatcgtcaacagcaacagaccccttgacctgctccgcatttgtccatctccctagtcgcagtcgatcctacgatggggatgcgttcgtcaatctcttcgcccatcgcggcgcccgagacatcatgatcttggatagccatggagtgcccctccgatccacctgcagtcagagacgcaccttcgtgttcgtctctaacctgaagccgctgctcttcatggcccgcaacgtggtcagggatctggacccctcgaacgacataaccttcatgcggattcgctccaatatgggcgaaatccacatgaccctgggcacggacttcattttgatcgttgtgcagaagctgaggaggctcaggagcagctcaacatcataaaacatttccggtcgctgtgcgtgtgtgtgtgcggatgttaattgtactgtatccatattccacccaaattaaattgcatgcaattgcggcaaatgagcaaaggtcacagtggattgggcggaaaattgtaaaatttaggaaaagcccagcgagaccagagcaaactaatccgtttatgcagcgcttgcaatccggaaaacgcatcaaagcggcaattagtgcagcctcggatgcgtcagttgtatcgtggtttggaatccaacgacctctcaattgggtccgccacattcatta

SEQ ID NO: 6620 - DNA, 852 bp, DROSOPHILA
gatatttcagttttccgtttgaatcaggcgaagcaagtcacaaagcattatacactttttctagaattcagtaatcctcgacatgtatatggtttgtgacggattgaacagccccaggctgcagggaggaaaggaagcggaagcggatgggagtcagtggccgtttccggacaagtaccacatgaggaacacccggatccttcaggtgtcaaaggctcaaatcagcgaggtgcccatggaggtattcgaggcagctcagcaggagctagtgaatatcgtgagcttggatggcaacaggttgctcgagatgcccaaagatctgcccttgctctccgagcacctcacccagttggtcctgaacaaaaaccagatctccttcgttcccaccaacatctcgcagtactcgaagttgactaacctgagcctctccaacaatcttctgtgcgacttgcccatggagttgggcggactgcggctgctccgcaatctggacatctcccacaatcgcttccgccagttgccacgctgcatctacgagctagagagactggaaaccttgtcggcccacgacaaccagatccgtgccatcgatgctagtgaatcgggcctgggcggaatgcgggaactgaagagattgaacttgggaaacaatgacatccaaatagtgccgccgatcttgggcaaaatgcagaatctcgtggaattggagctgtggggaaatcccttccgccagccccgccaccagattctatcgatggggactccggcgctgctcagctacttgcgcacccgcattcctatataaatcatatattatttattattaattcaaatcaaatttcaaagtattgc

SEQ ID NO: 6621 - protein, 238 aa, DROSOPHILA
MVCDGLNSPRLQGGKEAEADGSQWPFPDKYHMRNTRILQVSKAQISEVPMEVFEAAQQELVNIVSLDGNRLLEMPKDLPLLSEHLTQLVLNKNQISFVPTNISQYSKLTNLSLSNNLLCDLPMELGGLRLLRNLDISHNRFRQLPRCIYELERLETLSAHDNQIRAIDASESGLGGMRELKRLNLGNNDIQIVPPILGKMQNLVELELWGNPFRQPRHQILSMGTPALLSYLRTRIPI

SEQ ID NO: 6622 - DNA, 4778 bp, DROSOPHILA
gcagcctcaagcttgccgaaggctccgccggcctcgcggatagagccaccgccgccgcctcccttgccggcgccactgcctaggtcgcccacctggctgccgctcatcttggccagcctgtggagcggaaaatggcggtgggaaccattagaatcttctggttttgtgcggttacgcaacagtggagtgaagtcagcatagactgcacacacacacatgcgcgcagggtgaaagcgatttcgatgggatcggaattgtttatcttatcgaacattgaggaaagtgtaagttgggggcatacataacactttgaatatggcgaatgagatatgagtgctctgttaagtcttgtaagccaattagcaggtagttatgaacgggggttaaatgtgggtagaaactcactggactccagcggggtacagacgagatgcgctacgacgtacaacgaacattctgtttgattcttgagtagtttagctgcaagagaagcgcagaaaatacaatttattgagaaaactccattacgaagagtaactgtaaagccgtctccttaacaaaacggagtgcattgaactttttcgaaaaccaagtcgcaataaaagagccgctatttttagccagttctttgtttgttgtttgtataaaatatatacacgaatacccaatgcacatactagatttaatgccggaaaagtgcggcgcgcttgaacattacttacatttttgcgacgacaaaagttttctgcagagtgaccgtaggcgcacccttaaataataccttcgcggcagagcgagcacagtcggcgtggtctatcgaatatgtgagcttgcgattttaatcgataacgctttataccctttgcatactgcaaataaaactaagcttcttctgttgtttacttaatcatggtaaactaatatttcaattgcagatttcttactagcaacaaatttaaattctcaatcgacttggactctaacttgacgctttaacgctttaacttgagttctcgtcgattgttgccttaatccagtcgacgtagtgcgtcacattcgtggccacttcgaagatcctacaggatgcatccccgtagctgacgagtccgagcaggaaagcccgcttctttaacccgaagagcagcttcgcgctcagcgggcccccggaatccccaccgcaggcatcgctgtccacgccagtggtgcagatttgggactggtcgacttcgatgttgaagttgctgttgcaacacgattgttcgagcgcaagcaaagtggtctcctggagaatgcggctgggcttatagtctgcggtgtgaccccagccagtgagggtgtagaagtgaaccttctccaagggttcggtttttccccagaattctggggaatcagtcaaagcgaggcttcgctgcgtatagcgttaaaatttgctgaagataagcttcgcttatgtacataaatactaatgcagatattattgacccgaatggcgtctacgacagaagtcaggggagccattaaaccactcgagataatattttggattgataatattttcttagaaaagccaacgaaatgttattatgagtagctagagtctaagctggaaagctctgctgaagtcttcgatggcgttcacaatccagtccctgtggtgcgtaacgttggtgtaaacggagaaggaatggcatgccgccgacccgtagctgaccagtccgtactggaaggtcagccagctgccggcaaaaggaacctgtgcgctcagcgggcctcccgagtcgccgtggcatgcatcgctatttgtgccagcagcacaaatctgcgactcatccacctgcttggtgaacttgcttcggcagaagtggaggtcggtgttgtacacagtggccctctggagcctccggctgggcgtgccatcgttggtgacaccccagccggtgatgttgaagatgggactttccgccatgtgtccctcgaccaggagacagatcggccggacgtagtctgaaagatatgtccactgcttagggagccctggctgctggatccacctcattacctgagtactggacgaagctcttcatgcgcaacaggccgatgtcgttgtccaagtttaggttataatccgcatgcaaaatctttctatccacagcgagttcatatgacttgggcacgcagcaatccttgccaggaaagcgggtgtcatactcgcccaagcgtattctcctgagtttatatgacttgggcacgcagcgcgagcaatccttgccaggaaagcgggttttatactcgcccaagcgtactctcctgtggaaatgggaattcgtaagtgttcgccgaaagacagtgctgcctcacttacatgtgtgtactaacgatgcaatgggcggccgtgagaacgaagcctgaaagtattagcagcaggtgactggacaaagaactcattcgtgggccacatttgaatacttacgactggtgattagcgagccaccacatagtttctcgcctagcaccttcaccatccatggatttgagaataggcctgcgtctgcgcccccggtgatcattgggataaattctggttttgtcgtgccacaactggagtctagcaggtgaccaggtgctccttcacccaactggatggagcagaccagaagagctaatccagctgcgatgaacttcatcttttcgcggtaatggagcgactggcaagcttagtcgagtttgaggtaatttttgaggaattttatgttgaccagctgataacagtacactctttatgaccgtcaacggaaacggatatgataggaatcagtgttttgttttaatgagtgctctcagtacttttttatttttattttatttacgaatctggggaaattccaactcactaccaaaaattagacccctgtgatgctttgtcttgcgccaactacttatacaaatttgaacttgaatatttttcctgcttagcttctcgattaacccttcgaaatgcagttatctgggtaaacgaatattcatcgcgatcagttgtggaatataatttaatctattctttaataaatccaattaaatgctgctagttatgaattttaatagtaacaagcaacttaatttgtgtttcatataacaaatcattagtgtgaccgaactcaactcataggtggtgtcatagccgcataataagaccgtatttggatgttgcagtgcactctccaataagaatcaagtttaacctcgtttcaaatcatttattcgccgatttcacgttgggtccgacacaaacagctctgaaatgttgatgcgacaattaagactaagttactggccgcctagtggtgctcggcgtgctccttggcctgcgattcggcccatgccttcttgttctcgggcgagttggctgaaaatgggcaggagggagaagtgcattagtacaaggggcccagaggtcgcgaggcgagtgttacgcacccagcttgctgatcttgtagaacacgggcacgcaggccacggccgcaatgaagtagtagcgccagatccattggttcttgatgtagtgcttgatggggaattgggctatcttcgcggagaaagtgtatgggtagcgcatggggcgtccagcgggtttctcggcagcagctttgtcggccatggtagtcgtggaattcgcagctgtggagggtcgaattaaacgaaatcaatttacgcaaaaattatgtaattttcggaggcggcagacgaacatacgaacctcacaaataaaagacagctatgggaatgccaactcgtgcggcgaggaaagcaccaaaaatgacactggctgctagcgagtctggcaaggccggccatgtgtttaccgcggcgaatcaagacggttatcgattcacttacatcgctatcaactggtggacgtttttttgccatcgtgagcaaaactttcgagttacttttcccgaataataatatagaatcgtaaggtaaagacagcaagcacactgcttaggtgctataagccagcattcgtgcttacccatagacgcaggattcagcttggatcttaattgcaccgccacaggagtctgaaccttttttaaccttttcacatcctttttcaccttaattgccatgtctctctcttttcaagctttcaaaatggttttaactagcgaacaggtgccacaggtagctagcttgcctcttagtaactaatttgccaagtagcgagtttcccaaatttagttttgatttagcatgtcggccgatttgatttcgtatttgatccaaacagtttgatagttttacatattgttacatcaataactaattccgtactccctatctggactgggactgacgcccagactttgaagagcaagcacaagaagcaaaggcaacgcaatcgaccgcgcaacaaacgaaatcgcctggaagacagccattcaacgacacaagaaacatcagccatcgacgccacgagtgcaatgcccggaaatgctgtggatccattggccacggagaagactcgtgaccagataatggccgagcgggaggcgaagaagctggctaagcaggccaagaaacagaaaactgcaccgactcctactgccgccactcctgctgttctgaccactccctctgctccggccaccaaaatcatcactgaagtggagcagaccaccattaccactaagctgacgaccaccaccacaacaaaggtgcaggatgcagtggcttcaaagacgactcagccagctgcggtaaatggcaaggatgcg

SEQ ID NO: 6623 - DNA, 1921 bp, DROSOPHILA
ccatagctgtcttttatttgtgaggccgcctccgaaaattacataatttttgcgtaaattgatttcgtttaattcgaccctccacagctgcgaattccacgactaccatggccgacaaagctgctgccgagaaacccgctggacgccccatgcgctacccatacactttctccgcgaagatagcccaattccccatcaagcactacatcaagaaccaatggatctggcgctactacttcattgcggccgtggcctgcgtgcccgtgttctacaagatcagcaagctggccaactcgcccgagaacaagaaggcatgggccgaatcgcaggccaaggagcacgccgagcaccactaggcggccagtaacttagtcttaattgtcgcatcaacatttcagagctgtttgtgtcggacccaacgtgaaatcggcgaataaatgatttgaaacgaggttaaacttgattcttattggagagtgcactgcaacatccaaatacggtcttattatgcggctatgacaccacctatgagttgagttcggtcacactaatgatttgttatatgaaacacaaattaagttgcttgttactattaaaattcataactagcagcacttgccagtcgctccattaccgcgaaaagatgaagttcatcgcagctggattagctcttctggtctgctccatccagttgggtgaaggagcacctggtcacctgctagactccagttgtggcacgacaaaaccagaatttatcccaatgatcaccgggggcgcagacgcaggcctattctcaaatccatggatggtgaaggtgctaggcgagaaactatgtggtggctcgctaatcaccagtcgcttcgttctcacggccgcccattgcatcgttagtacacacatgagagtacgcttgggcgagtataaaacccgctttcctggcaaggattgctcgcgctgcgtgcccaagtcatataaactcaggagaatacgcttgggcgagtatgacacccgctttcctggcaaggattgctgcgtgcccaagtcatatgaactcgctgtggatagaaagattttgcatgcggattataacctaaacttggacaacgacatcggcctgttgcgcatgaagagcttcgtccagtactcagactacgtccggccgatctgtctcctggtcgagggacacatggcggaaagtcccatcttcaacatcaccggctggggtgtcaccaacgatggcacgcccagccggaggctccagagggccactgtgtacaacaccgacctccacttctgccgaagcaagttcaccaagcaggtggatgagtcgcagatttgtgctgctggcacaaatagcgatgcatgccacggcgactcgggaggcccgctgagcgcacaggttccttttgccggcagctggctgaccttccagtacggactggtcagctacgggtcggcggcatgccattccttctccgtttacaccaacgttacgcaccacagggactggattcgaagcctcgctttgactgattccccagaattctggggaaaaaccgaacccttggagaaggttcacttctacaccctcactggctggggtcacaccgcagactataagcccagccgcattctccaggagaccactttgcttgcgctcgaacaatcgtgttgcaacagcaacttcaacatcgaagtcgaccagtcccaaatctgcaccactggcgtggacagcgatgcctgcggtggggattccgggggcccgctgagcgcgaagctgctcttcgggttaaagaagcgggctttcctgctcggactcgtcagctacggggatgcatcctgtaggatcttcgaagtggccacgaatgtgacgcactacgtcgactggattaaggcaacaatcgacgagaactcaagttaa

SEQ ID NO: 6624 - protein, 425 aa, DROSOPHILA
MKFIAAGLALLVCSIQLGEGAPGHLLDSSCGTTKPEFIPMITGGADAGLFSNPWMVKVLGEKLCGGSLITSRFVLTAAHCIVSTHMRVRLGEYKTRFPGKDCSRCVPKSYKLRRIRLGEYDTRFPGKDCCVPKSYELAVDRKILHADYNLNLDNDIGLLRMKSFVQYSDYVRPICLLVEGHMAESPIFNITGWGVTNDGTPSRRLQRATVYNTDLHFCRSKFTKQVDESQICAAGTNSDACHGDSGGPLSAQVPFAGSWLTFQYGLVSYGSAACHSFSVYTNVTHHRDWIRSLALTDSPEFWGKTEPLEKVHFYTLTGWGHTADYKPSRILQETTLLALEQSCCNSNFNIEVDQSQICTTGVDSDACGGDSGGPLSAKLLFGLKKRAFLLGLVSYGDASCRIFEVATNVTHYVDWIKATIDENSS

SEQ ID NO: 6625 - DNA, 7522 bp, DROSOPHILA
ccacgaagaggacctggacctgggaaagaaataggagcaggatcgggaaaaaggggacgcacgtgccaaccttaatattgttgagttattggcggccaaaaccaaacgtcgacagtcaagagttgggcaaaacggaacccaagaccagacccaaaaccaaacaccaagccaaagccaaaaagttcccttccgccttcgcctggaaactttagaatggcctggaaaacttttgcccagcaagggtggcatttcaccgccgcccacttgtgtaggcccctcgtttctcagagtctgccaatcaggcaaagtgcccaaagggctgtgaaaactctttcgctggaaaagtcgcgtcgcgcatttccgcacacatgttgcaggccatttttgtgattatcatttaccgttccaccacggatacccttgccccgcaatctcccgacaaactcgtttctttggcccaaaacgaccatcgatcgatggcggagcggaagttgctcagaatttatgtgccaccgtgggctgttgtattatgccaactgacacacgggatttgccagggctgcaaatattaaagatattttggcaacgtaagacatgaaactttttctaccatatttaaattggttgcagcaattcaatcaattgagcactcataaattataagcacattcttttgggccaatccaattatgcacatatttttttgaataatacttgtattaaaatttgaaaataaatactaagcaactcttttataacctaaaaaaaataaatttgttgccagcatttatcgagctggcattgagctgccctcttaatcaacttaataggctgtgcgaaattaggaaacactatagtcgcacgaaatagcaaaattttactcagtcgatgagattgctttcgccagtacaagtcggcagttttaattataaatcacaaaaaattacaaactaaaaaaaaaaaacaagttatccaaatctgtgattgtgaatcctgcaaaatgccgtgtaagagaaggacaactagtgcccgaccaacagccagagctcgagagatcgaagaggagcaagaggtccacgccaaaataaggtcatattcacgttccagggcgacaacattgaaggcatcaagcgaggccatcaatcgcgacgtttcacatccaaccagcaataagaaatgtgaaaccaatctgaattccaaaaatgtttcgcaaaaaggacaaaagtcacagctaatgacagaaagcgctgggaaatttgattcggagacaaagagaaaacggcaggcgacagtcagtggttccaagtcccaacttttggacgagttagcgagtgattcagataattatgtcaagcaacttcgaacgtttttgcgaagtacgtcaaatacggacgatgaacaaaagagggattcacctgcacggcaaagccgttctagatcaagacgcagatgtacacaaaaaaatgaaaatctcgatgaaccggatcaaaatacaatttttaaaaaaccggaagtttcttccaaaataaatttggaaaaacataaccagaggacttcaacggataaagaaaagcaatataaaggtcagaaactaaattcctccattgaatcgattttgaatgtttatgatgagttaccatcacattcggacaatcaagctttaaacttaagccaaaaacgtaataatgcctggactacgaagttgcctgagagcagtccaaaaaatataccgaagaagaatttcgattcaaagtctagcgatttagaagaggccgaagagaaaacatatttaaaacgtcagtctgagaggaatttttattcaggttaccgttcggagtctgaagggacaaatatcacgccggctaaacgttctaaagctcaaatcaactcaatacctaaactagagtacagtactacgtacggccaggctcagaatttagtcgtgtcggaaaacgctaacataacacaaaagccgagttcagatataaaatcgcgttatcgttcgactgagtataatcagattaacaagccagattctcaacagcccatcaactatgcccatcagaaggaagaaacaatagataggcgtcgtgaaatgcacatgagaaaggaacatcaatatgtagataatcacctgaacaacccggcacaaaataagcccgatcgtactgtaagttttttagaaatgctctctcaggccgaagctaaaaaagaaagtaatcaaggtgctaaaaagccaacggttaataaagtttctaacgtttctcaatatctaatcgatcttggctttactgccggtagccctaaccacgatagcaatagcaatgatggtaacgatgagcaagacaatattgataggcgcctgaatgctgatctagattctttatttacgactgatgagctggcatgtccacctccacctccactagcaaagattccaacaaatctgacagttgaaagaccacattctcggctatcggatcccaagaaaatagaatctgatatagatgcacgcctccaggcggaactggattctctacccatggtagcggtaccagctgacgagaatatagaaccattaggtaaaactgaccaacacttttcagtacctacaaacaagaacttgtcggagaacaaagcttttccgaaaccgaatcaggtatgcattcctccacaaccagctattcctccacaaccagccattcctccagcaccagcctattgtatggccaacaaaaccatggatacaggaatgtctagcgttgttcagatggctaataatccgcttgcttcaactcagcatcacgccttgccacaagtgccgatagtcacgcgacttaaggttgatcagggtgaggatgtatccgtcaaatttaccaccggtctggatggactaattaccaatgtgcaattgctgccatcaacgatggcaatgggtcagccaacagtgaaggccaccgaattagaaagctttacggcccagcaactgaatatgttattacaaagtggacatccctacctgtccttgcccatgactaactctggagttccaggtgccgtgctacaggaaacgttacagaccaaagatgcaggatttccatctgaacaagcggtcgaagatgaggaggttgactatgaggaaataggggtggccgacacctttgcagcttactggcccagcaaactgaagtttggaagagcccatcccgatcccgtggtggaaacggccactctgtcatccgttgagctgcccaatataaactatcagttggccctgccctcgaagaccaccgaatgtttgagtgccctgcagctggaggcagtggtctatgcctgtcaggctcacgagcagatcctgccaagcggagatcgcgctggatttctgctgggcgatggggctggtgtgggcaaaggccgcaccattgccggcattattttcgataactacctgaaagggcggaaacgtgccctttgggtctcggtctccagtgacctcaagttcgatgcagagcgggatctagccgatataggagcccacgaaaagatccgtgtagcgacaatcaacaagtttaaatacagccccattgattccgaagaaaatgaaaatttcaagcgcggcgtgatattttgcacttacacagctttaattggagaatcaatgacgaccaactcgaagtacaagactcgttttcgccagttgaccaattggctgggcaaaaagttcgaaggagtgatcgtctttgatgagtgccacaaggccaagaacctaagcctgatgaatgtgggtaagtccaccaagacgggaacgactgttctggatctacagaaactgttgccaaacgccagagtggtctatgcttcagccacgggagcaagtgagccccggaatatggcctatatggtgagattgggcctgtggggtccaggtaccgcctatccagaattctacgaatttgttaacgccgtggagaagcgcggcataggagccatggaaatcgttgccatggacatgaagctaagaggtacttacatagcacgtcaacttagcttcaaggatgtgagttttcgcatcgaggaggtgaacatgtcgaaggaatttcgcaagagctataatttgtctgccgaactctgggctgacatacacaagaagttccagaaggcgtgtcgcctaatgtgcgtcgagaatagggtgcagaagattataacctgtcagttctggtgcgcccatcagcgtttcttcaagaacctgtgcattgcctccaaagtgaatcacgtggtcaagatgacgcggcaggcgacacgaatgggaaaggcggtggtcattggccttcaatctactggggagtcgcgtaccctggagcatctagaacgtcatcatggaaagcttaacagctttgtgtccaccgcaaagatgatcattcagtcgtttgtggaaaagcacttcccagctcctaaacgcgactcgtttcatcatttactaaatacgggtgagtttgagccggaggcacgttcccgcccacccaaacagaagaagtcaaaaatgaataccgattgggttgaagatgatatggatgccgaggcgggcgaaagcgacatcgagatgtacgagagaagctgtactgcggctgttgagaagattaagtctggacaaaagcggcgaggacgaccgcccaaggcggacaaaggtatgttgatctaagtggtttattttgaataaatattaatcattttaatcccttaaccagtggagaagattaccatgcaggagcgcatcctggagcatctttgcaataatatgagggaacaggataacgaagatgaatccacaaacacttccgacaataccaaggtaaaggtaaacatcacggagcgtgatgtagaacgctgtataaacatgcgtgagatgctgctggagaaaatcgatgttctgggcaggaagttgccgcccaacacgctcgacaaactaatctctgaactgggtggcaccaatttggtggccgagatgacaggccgtcgtggaagagtggtgcgaacggagtacgatgggtataagtatgagccacgttgtgaaaacgactccactatggacctggtcaattatcgggagaagcaacgcttcatggatggcagcaagcacgtggccatcatctcggaggcggcctccagtggaatatctttacagagtgacaagagggtttctaatcagcggcgccgtctgcacatcactttggaactcccatggagtgcagatcgggccatacagcaatttgggcgcacccatcgctccaatcaggtcaatgcaccggaatatgtatttgtgatcaccgatctggctggtgagcgtcgatttgcatccacggtggccaagagactggagagcttaggagcccttacccaaggcgatcgtcgtgccaccgatgcccgtgatctctcccagttcaatatcgataatagcatcgggcgcagtgcccttgagaatgtgatgcaacagctgaccagcaataaaccactggaccggtctcaagtgcctcaatcgtataagggaaacttcatatacgattgttgcgtggcaatggccggcgtgggtatgatcaatgtgcgggaggagaacaaggtcaaggtgttcaccgtggagaaggatagtaataatatctcaaagtttctaaaccgcatccttggatgccgggtggaagtgcaaaatgcactttttaaattctttctggacaagatgtactcactgatcatgcaaatgaagcgcacaggacgcttcgatttggggattttagatctggatgcccatggagcaagtgtaaaatccatcaagctgatgaggttcattaggaagcacgccacaggaacggcggccaccgaacttcatacggtgacagtggaacgtggtatgtcctttgagacagccctagccaagtgagttgaaatttatatgggttaagtgtatttaactaacttataaactcccatagataccgaaaggagggccaatacgagcacgaaggcttctatattctacaaaagcggcgccaaaacaagaactccgcaattttatgcctgcaggcaccgtccaattcatcggatgtatcaaacggaaagatcaatttgcaaatctaccgacccaatacaggtccccaagtgcgattggagacacatgcctccatttcatcacgatatgtgaaggtaagcccggaggaggcccaaacatactgggtgcagcagtacgaattgtgcttgaatatgtgctcacacctctactggaatcggacctgtccaatgccgacgggctgtgaagtaggactccgaatgcgtacctatcacgtgctctccgggttaatgctaccgatttgggaccggatcgaactcattatcgtaaatagcggacacaagatccagatcatacgcatgaagaccgatgcaaacaagaagatagtgggtacggtggtaccgcctgccgtctacgatgacctggtggccgatttgtccacggattccctcgtggagagccattaaaatgacaccgcccagtgtacggcgaagcgcacagcacttctattgccactttaaaaatatcaaccgaaattgtagcattcaatgcaatacatgtggcgtaagctttcgctttttcaaaatgccaagcacgctccaccagctccacccaggaggagcagcacgcccatgttcccggcaataaacaatggccacagaagcacatacgggaagacacttacagctcgtctgcgtgcgtatgtgattcatatgtattgtctgctgcgctgcggagtgagcttcgcatacactaaaaaaaaaataaagctacccaaaaaaaaatcgtcttgttttttaatatattgtattatgtaaattgcaaaggtaattggaaggggttgtcaatcacagccagtagaatggcttaaatttaatttaaattaataattatgaatgaaatgaaacttgttactttatttaaccgcagtgctctttcttttccaatcctgcgctctttgggggatgtctgtgattgcattccatgttttgtcttgttgccattgctaggagaccaactaaggctgccccgctcggttacattataaattttaaaacgacccagtcgcttgcaccctgccacacatgcgagatataaacaaaattatacaaaggggagggaaggattgtggcgcatgagatgggcaacgcgtggcataaaccatgaccaaatggccttggcaaatgtcgtgcctaaggagccaaaacgcagttggcataataactcacgcgtgatgcagatatcgtattccaacagcactggcaacaacaacaaagacataaagatgccgaggcatataaattcagttgttatctaaataagaacaaactgttatttatctggccataagggtatgtaaggatctctaatgaagttatagccaacaatatttgcaaatttcagttttcctaatcctttttttttaagtaaacccatgttattggtcttgaatgattgtaagctcta

SEQ ID NO: 6626 - DNA, 5406 bp, DROSOPHILA
atgccgtgtaagagaaggacaactagtgcccgaccaacagccagagctcgagagatcgaagaggagcaagaggtccacgccaaaataaggtcatattcacgttccagggcgacaacattgaaggcatcaagcgaggccatcaatcgcgacgtttcacatccaaccagcaataagaaatgtgaaaccaatctgaattccaaaaatgtttcgcaaaaaggacaaaagtcacagctaatgacagaaagcgctgggaaatttgattcggagacaaagagaaaacggcaggcgacagtcagtggttccaagtcccaacttttggacgagttagcgagtgattcagataattatgtcaagcaacttcgaacgtttttgcgaagtacgtcaaatacggacgatgaacaaaagagggattcacctgcacggcaaagccgttctagatcaagacgcagatgtacacaaaaaaatgaaaatctcgatgaaccggatcaaaatacaatttttaaaaaaccggaagtttcttccaaaataaatttggaaaaacataaccagaggacttcaacggataaagaaaagcaatataaaggtcagaaactaaattcctccattgaatcgattttgaatgtttatgatgagttaccatcacattcggacaatcaagctttaaacttaagccaaaaacgtaataatgcctggactacgaagttgcctgagagcagtccaaaaaatataccgaagaagaatttcgattcaaagtctagcgatttagaagaggccgaagagaaaacatatttaaaacgtcagtctgagaggaatttttattcaggttaccgttcggagtctgaagggacaaatatcacgccggctaaacgttctaaagctcaaatcaactcaatacctaaactagagtacagtactacgtacggccaggctcagaatttagtcgtgtcggaaaacgctaacataacacaaaagccgagttcagatataaaatcgcgttatcgttcgactgagtataatcagattaacaagccagattctcaacagcccatcaactatgcccatcagaaggaagaaacaatagataggcgtcgtgaaatgcacatgagaaaggaacatcaatatgtagataatcacctgaacaacccggcacaaaataagcccgatcgtactgtaagttttttagaaatgctctctcaggccgaagctaaaaaagaaagtaatcaaggtgctaaaaagccaacggttaataaagtttctaacgtttctcaatatctaatcgatcttggctttactgccggtagccctaaccacgatagcaatagcaatgatggtaacgatgagcaagacaatattgataggcgcctgaatgctgatctagattctttatttacgactgatgagctggcatgtccacctccacctccactagcaaagattccaacaaatctgacagttgaaagaccacattctcggctatcggatcccaagaaaatagaatctgatatagatgcacgcctccaggcggaactggattctctacccatggtagcggtaccagctgacgagaatatagaaccattaggtaaaactgaccaacacttttcagtacctacaaacaagaacttgtcggagaacaaagcttttccgaaaccgaatcaggtatgcattcctccacaaccagctattcctccacaaccagccattcctccagcaccagcctattgtatggccaacaaaaccatggatacaggaatgtctagcgttgttcagatggctaataatccgcttgcttcaactcagcatcacgccttgccacaagtgccgatagtcacgcgacttaaggttgatcagggtgaggatgtatccgtcaaatttaccaccggtctggatggactaattaccaatgtgcaattgctgccatcaacgatggcaatgggtcagccaacagtgaaggccaccgaattagaaagctttacggcccagcaactgaatatgttattacaaagtggacatccctacctgtccttgcccatgactaactctggagttccaggtgccgtgctacaggaaacgttacagaccaaagatgcaggatttccatctgaacaagcggtcgaagatgaggaggttgactatgaggaaataggggtggccgacacctttgcagcttactggcccagcaaactgaagtttggaagagcccatcccgatcccgtggtggaaacggccactctgtcatccgttgagctgcccaatataaactatcagttggccctgccctcgaagaccaccgaatgtttgagtgccctgcagctggaggcagtggtctatgcctgtcaggctcacgagcagatcctgccaagcggagatcgcgctggatttctgctgggcgatggggctggtgtgggcaaaggccgcaccattgccggcattattttcgataactacctgaaagggcggaaacgtgccctttgggtctcggtctccagtgacctcaagttcgatgcagagcgggatctagccgatataggagcccacgaaaagatccgtgtagcgacaatcaacaagtttaaatacagccccattgattccgaagaaaatgaaaatttcaagcgcggcgtgatattttgcacttacacagctttaattggagaatcaatgacgaccaactcgaagtacaagactcgttttcgccagttgaccaattggctgggcaaaaagttcgaaggagtgatcgtctttgatgagtgccacaaggccaagaacctaagcctgatgaatgtgggtaagtccaccaagacgggaacgactgttctggatctacagaaactgttgccaaacgccagagtggtctatgcttcagccacgggagcaagtgagccccggaatatggcctatatggtgagattgggcctgtggggtccaggtaccgcctatccagaattctacgaatttgttaacgccgtggagaagcgcggcataggagccatggaaatcgttgccatggacatgaagctaagaggtacttacatagcacgtcaacttagcttcaaggatgtgagttttcgcatcgaggaggtgaacatgtcgaaggaatttcgcaagagctataatttgtctgccgaactctgggctgacatacacaagaagttccagaaggcgtgtcgcctaatgtgcgtcgagaatagggtgcagaagattataacctgtcagttctggtgcgcccatcagcgtttcttcaagaacctgtgcattgcctccaaagtgaatcacgtggtcaagatgacgcggcaggcgacacgaatgggaaaggcggtggtcattggccttcaatctactggggagtcgcgtaccctggagcatctagaacgtcatcatggaaagcttaacagctttgtgtccaccgcaaagatgatcattcagtcgtttgtggaaaagcacttcccagctcctaaacgcgactcgtttcatcatttactaaatacgggtgagtttgagccggaggcacgttcccgcccacccaaacagaagaagtcaaaaatgaataccgattgggttgaagatgatatggatgccgaggcgggcgaaagcgacatcgagatgtacgagagaagctgtactgcggctgttgagaagattaagtctggacaaaagcggcgaggacgaccgcccaaggcggacaaagtggagaagattaccatgcaggagcgcatcctggagcatctttgcaataatatgagggaacaggataacgaagatgaatccacaaacacttccgacaataccaaggtaaaggtaaacatcacggagcgtgatgtagaacgctgtataaacatgcgtgagatgctgctggagaaaatcgatgttctgggcaggaagttgccgcccaacacgctcgacaaactaatctctgaactgggtggcaccaatttggtggccgagatgacaggccgtcgtggaagagtggtgcgaacggagtacgatgggtataagtatgagccacgttgtgaaaacgactccactatggacctggtcaattatcgggagaagcaacgcttcatggatggcagcaagcacgtggccatcatctcggaggcggcctccagtggaatatctttacagagtgacaagagggtttctaatcagcggcgccgtctgcacatcactttggaactcccatggagtgcagatcgggccatacagcaatttgggcgcacccatcgctccaatcaggtcaatgcaccggaatatgtatttgtgatcaccgatctggctggtgagcgtcgatttgcatccacggtggccaagagactggagagcttaggagcccttacccaaggcgatcgtcgtgccaccgatgcccgtgatctctcccagttcaatatcgataatagcatcgggcgcagtgcccttgagaatgtgatgcaacagctgaccagcaataaaccactggaccggtctcaagtgcctcaatcgtataagggaaacttcatatacgattgttgcgtggcaatggccggcgtgggtatgatcaatgtgcgggaggagaacaaggtcaaggtgttcaccgtggagaaggatagtaataatatctcaaagtttctaaaccgcatccttggatgccgggtggaagtgcaaaatgcactttttaaattctttctggacaagatgtactcactgatcatgcaaatgaagcgcacaggacgcttcgatttggggattttagatctggatgcccatggagcaagtgtaaaatccatcaagctgatgaggttcattaggaagcacgccacaggaacggcggccaccgaacttcatacggtgacagtggaacgtggtatgtcctttgagacagccctagccaaataccgaaaggagggccaatacgagcacgaaggcttctatattctacaaaagcggcgccaaaacaagaactccgcaattttatgcctgcaggcaccgtccaattcatcggatgtatcaaacggaaagatcaatttgcaaatctaccgacccaatacaggtccccaagtgcgattggagacacatgcctccatttcatcacgatatgtgaaggtaagcccggaggaggcccaaacatactgggtgcagcagtacgaattgtgcttgaatatgtgctcacacctctactggaatcggacctgtccaatgccgacgggctgtgaagtaggactccgaatgcgtacctatcacgtgctctccgggttaatgctaccgatttgggaccggatcgaactcattatcgtaaatagcggacacaagatccagatcatacgcatgaagaccgatgcaaacaagaagatagtgggtacggtggtaccgcctgccgtctacgatgacctggtggccgatttgtccacggattccctcgtggagagccattaa

SEQ ID NO: 6627 - protein, 1801 aa, DROSOPHILA
MPCKRRTTSARPTARAREIEEEQEVHAKIRSYSRSRATTLKASSEAINRDVSHPTSNKKCETNLNSKNVSQKGQKSQLMTESAGKFDSETKRKRQATVSGSKSQLLDELASDSDNYVKQLRTFLRSTSNTDDEQKRDSPARQSRSRSRRRCTQKNENLDEPDQNTIFKKPEVSSKINLEKHNQRTSTDKEKQYKGQKLNSSIESILNVYDELPSHSDNQALNLSQKRNNAWTTKLPESSPKNIPKKNFDSKSSDLEEAEEKTYLKRQSERNFYSGYRSESEGTNITPAKRSKAQINSIPKLEYSTTYGQAQNLVVSENANITQKPSSDIKSRYRSTEYNQINKPDSQQPINYAHQKEETIDRRREMHMRKEHQYVDNHLNNPAQNKPDRTVSFLEMLSQAEAKKESNQGAKKPTVNKVSNVSQYLIDLGFTAGSPNHDSNSNDGNDEQDNIDRRLNADLDSLFTTDELACPPPPPLAKIPTNLTVERPHSRLSDPKKIESDIDARLQAELDSLPMVAVPADENIEPLGKTDQHFSVPTNKNLSENKAFPKPNQVCIPPQPAIPPQPAIPPAPAYCMANKTMDTGMSSVVQMANNPLASTQHHALPQVPIVTRLKVDQGEDVSVKFTTGLDGLITNVQLLPSTMAMGQPTVKATELESFTAQQLNMLLQSGHPYLSLPMTNSGVPGAVLQETLQTKDAGFPSEQAVEDEEVDYEEIGVADTFAAYWPSKLKFGRAHPDPVVETATLSSVELPNINYQLALPSKTTECLSALQLEAVVYACQAHEQILPSGDRAGFLLGDGAGVGKGRTIAGIIFDNYLKGRKRALWVSVSSDLKFDAERDLADIGAHEKIRVATINKFKYSPIDSEENENFKRGVIFCTYTALIGESMTTNSKYKTRFRQLTNWLGKKFEGVIVFDECHKAKNLSLMNVGKSTKTGTTVLDLQKLLPNARVVYASATGASEPRNMAYMVRLGLWGPGTAYPEFYEFVNAVEKRGIGAMEIVAMDMKLRGTYIARQLSFKDVSFRIEEVNMSKEFRKSYNLSAELWADIHKKFQKACRLMCVENRVQKIITCQFWCAHQRFFKNLCIASKVNHVVKMTRQATRMGKAVVIGLQSTGESRTLEHLERHHGKLNSFVSTAKMIIQSFVEKHFPAPKRDSFHHLLNTGEFEPEARSRPPKQKKSKMNTDWVEDDMDAEAGESDIEMYERSCTAAVEKIKSGQKRRGRPPKADKVEKITMQERILEHLCNNMREQDNEDESTNTSDNTKVKVNITERDVERCINMREMLLEKIDVLGRKLPPNTLDKLISELGGTNLVAEMTGRRGRVVRTEYDGYKYEPRCENDSTMDLVNYREKQRFMDGSKHVAIISEAASSGISLQSDKRVSNQRRRLHITLELPWSADRAIQQFGRTHRSNQVNAPEYVFVITDLAGERRFASTVAKRLESLGALTQGDRRATDARDLSQFNIDNSIGRSALENVMQQLTSNKPLDRSQVPQSYKGNFIYDCCVAMAGVGMINVREENKVKVFTVEKDSNNISKFLNRILGCRVEVQNALFKFFLDKMYSLIMQMKRTGRFDLGILDLDAHGASVKSIKLMRFIRKHATGTAATELHTVTVERGMSFETALAKYRKEGQYEHEGFYILQKRRQNKNSAILCLQAPSNSSDVSNGKINLQIYRPNTGPQVRLETHASISSRYVKVSPEEAQTYWVQQYELCLNMCSHLYWNRTCPMPTGCEVGLRMRTYHVLSGLMLPIWDRIELIIVNSGHKIQIIRMKTDANKKIVGTVVPPAVYDDLVADLSTDSLVESH

SEQ ID NO: 6628 - DNA, 6552 bp, DROSOPHILA
gcaatattcttgctattttatatgcttgtggtgcggtcgaggacttataatttataattactgtcatacatcgtatattgtgtgcggcgtgtggtgtacatttcttgcaactagtgatgtcaaatccagtgttagcttaggtgtagagaaactgtaaccgatttaacagcgaaatttgaaatatggaaaaatcaaaagtgaaataaagggaatatttttgtccaactgttatttatttgtttcaatatacatttataaatacatttacaaatacatttataaatattctccactccactacattggtaaacaaatctgactatcaacttggtaaagttcagaaaaagtatacaaaaatgaagccgacgttgggcaaactttcatttggtttctctttgatttccgtgaaatgcatcatagtacaaaatgaatagttcaaatcatattcacacatacaaaacgaggtctacactaaggcaatattcttgctattttatatgcttgtggtgcggtcgaggacttataatttataattactgtcatacatcgtatattgtgtgcggcgtgtggtgtacatttcacatataaaaatgtacgtaattaaaaactgttagatcacaaaggaaaatgctaataaataggaatttgcttagacataagtacatggatacatgtggtcgcgttaactaactaaggtacgagttcaactgatacattgtatgtttggctcttcaaaaagtcattaaaaagcataaaaatcgttctcaaaaaactacaatttctgttttaaatgcactttgcaaaagtatacatcaatttatgcttgcgcggctgataatttataattgctgcacaacgatatcatatgttagaactatatgtatggggtctttcgggctctcttccgttccgatggttcttcaaagatttatattcgacagcgacaaccaattttgacacagaagcgttaaatagtcgtgtatgcgtgtgaaaatagcaaccaggcctaaggggccaccttgccgacttcgtgcatcatgaccaaggacccaaccatcgccacaagcgtacggtccagccaagtgacagggttcgggtacaggaagccgccctcatagaagcccagatgaccgccatgggccacctccacataggcggtgttttgacgcgtcgctgaggggagaaagattaagcaataagcaacgtgatagcaagcaaagaactttctacttactggcatactccttgatgggatgcagcaaatcctccgggatcaagggatcatccttggcgttgatgaagatcattggcttcttgatcgtatcgaagtaaaacagcgacgagctccacttgtacaactcctgggtggagggaaagttgtacactctccgcgtgtaagcctcatccaactcgggcagagtggcagccgcgatgatttcgcgctcgttgagattatgccgagccttgacctcgtcggacaggaggatatgtcgatgtcgcaggataatgctctttacgttctcagtcatgatgtataggtaaaagcggcggaaattctgccagttgagcagccacttggtgcctctgcaatataattattaagtatttagctctgatttcctatattaatagtttgaatagcaactcactcgacggcattgtagccttgacatatggatatgcctccaatgaccttgtctggctttgtcttctggtcctcgcccatgtacttggtgaccagattgccgcccagactgaaaccaaccgcgacaattcgactttggcggtacttctggtgcaaatgctctaccatggccgcgaaatcctccgtgtggccgtaggtgaaaatgcgtgtggaggtcacctggacactgcgcagtgcgccaatgtgatttagcaccgcacagcggtatccattgcactgggccaagtgcacgaaggtgcgaatgtacaccgattccgagctgttggcgatgcccgggcaaatggccaccgtgatgtcatctgtgggagtgttgaatacatttagtacaggcaatgcatcgggattaggctgcctaactcttaccctcctgttcgttgagtggctggtacaagtcgtaggtcaatgtggagccatcctttagcgacatgtaaacacgttctccgagtggccagggacatcgtacccggccaacaatgctgtgcaagaccgtctgcacatggccactaaagccccaaagtcgcgggggaatgtatctggaaagagtgaaaagaatgggattattataacgtactttagattctttaatcagcaattattgcatgggtcgtaaacctattataaatgttgattaagctacttcttttccgttggcaagctatatgaatatatttcattttattccgatcttgtttgcccttgacattgcactgtgaattatggcaatgataaatctgcgcacaattgcttccagtttagttagcaggcaatttgccaaatttgcgcaaatactcgtattatttatacaaattgaattttgatctacgtccaagttttttaatgcgatgacttacaaattcgaaagagaatgccaccaaatgcacaaagccgcaattcagcaaacagcattagaaccaattgaacctaattgagtgcacgcagctacaccagaattggatggagaaagtcggatgttctctgccaaaggtattttcaattgaaaggtatatttttagaatttagaatcaacagggtaaatgggggtatattcttccttttctgcaaagccttctgtttccaaatcaagccctatttgattgagttgatttaagcattttacaatgcatttttttcctgcgtgtatcagaaatcatgtcagccgtgcaaaaacgtgatacaattttgtgtatccacttgtgagctcagcaacagtagccattcaattagtatcaatcaaagtaaaatggtgaaatggtttgtgggcaggggcgtggccactttgggaacaggcacaaatgccggcgtatctggcttttcaatttttaatcagtttcaagcatgaatttcccaacagtaatcaatatgaatgacacttagtgaataatgtgccctcgcatgcatatatatatgtagaaatatatcattaaaagttaatgtgtcgtttagagttcgcaagcctaaaggcaaaaacagctgcaattctttcccaccttcaagttgtcagctaaaaacgagcagcacacggtgctaatgagtcatcaccctgggtttctatcaacggcgcacctctaaaacaatcgtcttcacggaaattagaagcctgtggaaccttttgacacttgatctttgcccaacataaacttactatgtttgtgttctgatataagaatgaataatagcccactataatcccactgtttatgagcccattttgcaaattttctacgtaactatttacttagcttaaatgcccttttttataaaatgaggaaaagtaacttcaagtaagagtttacaactatataaatgcaccgcctattgaaaataaaatccgaaaaaattaactacactagaaaacgagctctattgttaaaatttcaatagcatttctggtcttttcgtgggtagaacaaatgcacaggaagatgacggaaattaacaggccctccggctttttagccgagtatatctcacctttcaaccggtttgtcaggtgagaaaacacaggtgagcgggggtagaaagcagcagcgcagcagtcgagagaactctgcttacgcaatctttgttgtcaaacaaaagcggcagattgactgggcagaaagccaaaacattcacaggtagtgtgccggcatttgaatcagccaaagtgccaaaaagaaataaactgcgccaacaattcgccggcaatcttttcattatcaacctacatttccatacaatatatgtatgaggaaacccccacgcgattatcgagtggcaggggaaatttgtggccaaaatcgggttgctaggcgttagtcgctgtctcaactgcgtaattgcggggcgaactttgagctatattgttattaatccttatcgcgactgctggcagacgtgtttcaaaaaaaaaaagtaaattaaaaacgaaagaaaaattctatttatttatgcggctcctggtcaacgaaggagaaacccagcgggcattcacagatttacacaaaataatgaaaatcgaatgaaaattttccaggcagcgagaagaaatgtttatcaaggaagtgataaaagttaatgaatatttgtgccattaaacttgatttctctatcggttcgctgctgataacctccgctaaactggcaaatacaattcccaatttaaaacaatttctacacccaagataacctattgaaatatttttagcccgtgaccgcagatgtacatgtataatgagtaagacttactatatcaccgataacgaaacctcagacaggaaggagtgctctctattttatagaggggtgcatatattgaacacaccaacctatttattgactgatagtgcgcatcaaagtgttggaattgcatttaatcaatgggtttgtagctgcatttcgtagacatacatagatagttactgatgagttactgaattgcttagacagcgacatcagttttattgactaatttgccattcatgattcattcgccagctgggaaattcgacggactgcgtgaaacaatggctttcagtttgaacatgctacttaattggcggtttaaagtaatttgaggtgattgctgatttgcttatcagcgaaaccgactggcacaattatgaaacctgaggtaactaatattttggcgcgactgtgatgctgatgacattgttagcaactcagctgcgatggcaatacaatcttctacaaactttattaagctccttgaaacgtgagtatattaagtttattccattaaaacaggaatccatagttcagttttgtactcttatatcgatttcgaaacaatataaccctacaagaactgaaggttgctataattttggccacacctgtgaccctgaatgtgttatgaaaatgaggaaaaaaaagagcaaatgatgattagcacatgatttaatgacacttgttcccggattacttacggttcccttaggacgggcgcgatcttgtagaggcagtcgaggaagtgggcatcaaggcaccacacactgggcttcagcggctggctgtgaacattaaggatgcggaacaggatgcacacgatgacggcgatgagggtaaggaaggcggtggacatggtggcgctgggtgctgcgagtttttagccaggatccgaggaagtgacccgccttgtcatccaatcgaactccacttatcctgctatttggcgcgcctccttgcggcttctcttcgtgtttcccagggcaatctgcgttgctttcgtcctttctatgtgcgtttgctacgttttttggctggcgtaaataagttaacactttccacgagaaccggatttaaatgctgctcgaaatttccgaaaattcgcctgctgcgatttttttcaactgccagatgtggtgtgaccgcgggcgaggccatgcgaaaataccaactgcgtgggcggagctgcgcaactatcggttgcacacttatagtattttatgctttgccgccaaaatgtacgcatttaaaatgctgtccaaaacaaagtattggttgttattacaattttaatgcaatgaatatataacattaaatcttttgatttagttttagtaatataagtaaggacaataaattatggtactgaaaactgagtgaacttgatggttttacctgcggtgcaaacagaattagcactccgatccaagaagtatgggcagaattggacatttaccgaaaaaaaaagatgcctgaatccaaaaataggatcgcaaattaaatttccttaatttaatgtgcagtaaataaataaaagtaactgattcaaacgtgaatagttgccatagaccagatatttcaacgaattcaaaagccatttgtgaggccttataagacgtatcttaatctcaaccttgtaggtaatccatcaggaagggcttatcatctggagcatagggcgtcaatggaacgtcgtatggtagcggaaacgctggcactccatcacgattgttacccaaaggaaaggtgtcctcgccagtctggaaagcaaagagcaccagttgcaatggactttgattcaaaaatctcacaagacctaccacaaatctgggcaggaataggacgccagcctcatagttggcgatcctcaggcagggttggatattcgagtttttgttaaagcagccccaggctgccttcgagagattcgccgaggttaaaacgaaccagtacaccgactgatcctccagattgaagcgcgtatagctcttgatgtgcggcattgcccgcgagcgaaagcgatcgctggacttccattgctgcagatagtccttgagccatggctgcttatcgttggtgttcttgccgtagggcaaacacccgccgcccagcattccatc

SEQ ID NO: 6629 - DNA, 2254 bp, DROSOPHILA
aaaaaatcgcagcaggcgaattttcggaaatttcgagcagcatttaaatccggttctcgtggaaagtgttaacttatttacgccagccaaaaaacgtagcaaacgcacatagaaaggacgaaagcaacgcagattgccctgggaaacacgaagagaagccgcaaggaggcgcgccaaatagcaggataagtggagttcgattggatgacaaggcgggtcacttcctcggatcctggctaaaaactcgcagcacccagcgccaccatgtccaccgccttccttaccctcatcgccgtcatcgtgtgcatcctgttccgcatccttaatgttcacagccagccgctgaagcccagtgtgtggtgccttgatgcccacttcctcgactgcctctacaagatcgcgcccgtcctaagggaaccatacattcccccgcgactttggggctttagtggccatgtgcagacggtcttgcacagcattgttggccgggtacgatgtccctggccactcggagaacgtgtttacatgtcgctaaaggatggctccacattgacctacgacttgtaccagccactcaacgaacaggaggatgacatcacggtggccatttgcccgggcatcgccaacagctcggaatcggtgtacattcgcaccttcgtgcacttggcccagtgcaatggataccgctgtgcggtgctaaatcacattggcgcactgcgcagtgtccaggtgacctccacacgcattttcacctacggccacacggaggatttcgcggccatggtagagcatttgcaccagaagtaccgccaaagtcgaattgtcgcggttggtttcagtctgggcggcaatctggtcaccaagtacatgggcgaggaccagaagacaaagccagacaaggtcattggaggcatatccatatgtcaaggctacaatgccgtcgaaggcaccaagtggctgctcaactggcagaatttccgccgcttttacctatacatcatgactgagaacgtaaagagcattatcctgcgacatcgacatatcctcctgtccgacgaggtcaaggctcggcataatctcaacgagcgcgaaatcatcgcggctgccactctgcccgagttggatgaggcttacacgcggagagtgtacaactttccctccacccaggagttgtacaagtggagctcgtcgctgttttacttcgatacgatcaagaagccaatgatcttcatcaacgccaaggatgatcccttgatcccggaggatttgctgcatcccatcaaggagtatgccacgacgcgtcaaaacaccgcctatgtggaggtggcccatggcggtcatctgggcttctatgagggcggcttcctgtacccgaaccctgtcacttggctggaccgtacgcttgtggcgatggttgggtccttggtcatgatgcacgaagtcggcaaggtggccccttaggcctggttgctattttcacacgcatacacgactatttaacgcttctgtgtcaaaattggttgtcgctgtcgaatataaatctttgaagaaccatcggaacggaagagagcccgaaagaccccatacatatagttctaacatatgatatcgttgtgcagcaattataaattatcagccgcgcaagcataaattgatgtatacttttgcaaagtgcatttaaaacagaaattgtagttttttgagaacgatttttatgctttttaatgactttttgaagagccaaacatacaatgtatcagttgaactcgtaccttagttagttaacgcgaccacatgtatccatgtacttatgtctaagcaaattcctatttattagcattttcctttgtgatctaacagtttttaattacgtacatttttatatgtgaaatgtacaccacacgccgcacacaatatacgatgtatgacagtaattataaattataagtcctcgaccgcaccacaagcatataaaatagcaagaatattgccttagtgtagacctcgttttgtatgtgtgaatatgatttgaactattcattttgtactatgatgcatttcacggaaatcaaagagaaaccaaatgaaagtttgcccaacgtcggcttcatttttgtatactttttctgaactttaccaagttgatagtcagatttgtttaccaatgtagtggagtggagaatatttataaatgtatttgtaaatgtatttataaatgtatattgaaacaaataaataacagttggacaaaaat

SEQ ID NO: 6630 - protein, 398 aa, DROSOPHILA
MSTAFLTLIAVIVCILFRILNVHSQPLKPSVWCLDAHFLDCLYKIAPVLREPYIPPRLWGFSGHVQTVLHSIVGRVRCPWPLGERVYMSLKDGSTLTYDLYQPLNEQEDDITVAICPGIANSSESVYIRTFVHLAQCNGYRCAVLNHIGALRSVQVTSTRIFTYGHTEDFAAMVEHLHQKYRQSRIVAVGFSLGGNLVTKYMGEDQKTKPDKVIGGISICQGYNAVEGTKWLLNWQNFRRFYLYIMTENVKSIILRHRHILLSDEVKARHNLNEREIIAAATLPELDEAYTRRVYNFPSTQELYKWSSSLFYFDTIKKPMIFINAKDDPLIPEDLLHPIKEYATTRQNTAYVEVAHGGHLGFYEGGFLYPNPVTWLDRTLVAMVGSLVMMHEVGKVAP

SEQ ID NO: 6631 - DNA, 3167 bp, DROSOPHILA
cattaaattgtatcagcatggactccccgctgaacgatggctctcaccatccaccgccgcacgctccccaccccctggtgagtgctctacggtccttaaactgccactacccaaacgtttgcatctatttcaggcggactatcagttttctgcggaggaggtgaaggcgttacgtgagtgcaacactgagtctttcttccagcgcagcctgcctttcggcactggactgggcctgctggcctacttcggcgtcaagaacggctatttgcagggacacgtcaagtacggcgccgtgcccaaggtcgtgatgggcgtcattctgggctactttgtgggcaagttcagttaccagcagaagtgtgccgagaagatcatgcgcctacccaactcccatctgggcgagctgctgcgtcagcgtagacagggcggcggtgtcatcagctccatcacaccggacgagaatctgggcagggccttcactctggcccccttctcgccgagctcggcggacgtgtacagcgatgaggcgtatcagcccgggaggagcacttctctcaatctggacacggaatcgcgccctactttgtccggccttgacgacatctaccgccccaccctggactgtaagctcatctaattcttcgcattccctattatgattctgtacattctccttcccagcagctggttcaatgctggaggcagagttgcccttggagccgtctaagccgggccagtcttacgaggacctgcgacgaaggaaccgagaagagtattcgaagcaccagcagagtccatactcgcgaccttacgaaccaccagttgccgttcaacagcgacccgtggagcaggcacaaagtgaacccgctggaaggaagaaccaatacggcgactcctggactgattaaggtattgttattttgttggacattaaacgcgcataaagttctgtgaaaattcgttgtctatttacatttttttttggggttggaatattcaattactttctagcctggtcgtagttttctatgtaccacttaaccgaggcgttgattgccgtttccaagtccgtaaatgcgtagtctggcaggaaggagcgaagcttggcattagacgcagtctttttgtactgtccatccgacttgctcgtatcacagaccagtcttccctggaataaatcaagttaatatcttgccttgtctcaaatttcgctttttaacccacattaaaattaaatgcttttgcaacggcttgggccacctcgaagatcgtcacctcctgcacttcgtccgcgcttaggatgatgggctccacactttcgtagttcctgagcacccagatcatcagctccgccaggtcccgggagtatacaaactgccgtagtggcatgccgcttccgaaaacggtgaacaccttgtcgttttcggggacgtcagtcttctccgtaaccagctggtgcatcctatagatcatgcccggaataacgtggctgacctctggattatagttgtcgtggggaccgaatatgttgcacggaatgaccgaggtgtacacccggccatatttatcgtggtaggcgtggttctgcacgtctatcagtcgctttgcgtaggagtaaccataattggaggggtgcggcggcccattgtgcaccatggtctcatctatggggtagctggttttgtccggaaaaatgcatgtggacaggcaggacaccaccttcacgcatccctgctcgtgtgccgtttgcaggacattgtcgttaatgagcaggttgttgcgctaaaagtggattcgcatgaaatgggttttggaatcatctgtgagaccaggagctcaccaagaagtccaggttgttgttcatgttgtggaacaggcctccgaccattgcagccagatggatgacatgcgtgggcttctctcgggcgaagagtgcctgcgtggcggccagatttctgtggagagaatttgtttacggatacgttcaattgaatttcttcatgacttacgtcaaatctgcatctttagagcccgcaaaaaaccattgctcgtcctctggggactgctccttgatcacagcctccagggccttgcccaccagcccagttccgcctgtaaccagaactttcttcatgatttttgtgcgattccacaaatcaagtcaattagtttctaaagtaattttcgactcaatgcgaccagctgctttaaatgccggctaatcagtcagtgctgcctgcctggcgtttttaatctaatcctttagctatttcttgttatcagaaaaagccacttttagattctttactaagccccatttggtcacactgtgcccaggtagtttttgtttatgcggtgtcggatatgcgaaaaataatttaaatggatatggaaacgcaagttatagacaccgttaacgagtttctggtaatagtgaaaccctgcgtctccaaaaaatcacccactcatccacgctctccatttcgcagaaggtcgactcccttgacgaggcgttcgttagcgtcattgtattcaagccaaacaccgagcaagaacgagctacccgcttcgccaatgatttgggtaggtaaatgcgtctgctggaactcgaaaattgttaaaaactatctgtttcagttaccgcctttgggaacgtggcgcaggagaaccgggagcaggtgcttcggctctacctgttgcgtgccgccggtgcctccggatatcacatcaaagtgctgatggcggcactggtgaagctggtggacgcacacgtgatcaccgccaggatgctgtgcgacaaggtgctgatgtgcgagaaactggacttcgagcacaggaccttctggatcgagagcttccggctgatcaagcgtgtgatcgtccaggtggactacaagggtgtgcgcgagatcatgaaggtatgccgcgacaaggcacaatggtttccgctgaacgtcaacgttacctacatgccacagctactggccgttgaggatatcctgcgattcatctttgatcgcaacaattgcctgctgcccgcctactttattgccaacgagattatgcgtccgtttccttaccactggaaactcaaccggctgatgaccgactttgtcgaagagttccgcaccacggcacaaatggtttcgatcattggacatgccagc

SEQ ID NO: 6632 - DNA, 999 bp, DROSOPHILA
aattgacttgatttgtggaatcgcacaaaaatcatgaagaaagttctggttacaggcggaactgggctggtgggcaaggccctggaggctgtgatcaaggagcagtccccagaggacgagcaatggttttttgcgggctctaaagatgcagatttgacaaatctggccgccacgcaggcactcttcgcccgagagaagcccacgcatgtcatccatctggctgcaatggtcggaggcctgttccacaacatgaacaacaacctggacttcttgcgcaacaacctgctcattaacgacaatgtcctgcaaacggcacacgagcagggatgcgtgaaggtggtgtcctgcctgtccacatgcatttttccggacaaaaccagctaccccatagatgagaccatggtgcacaatgggccgccgcacccctccaattatggttactcctacgcaaagcgactgatagacgtgcagaaccacgcctaccacgataaatatggccgggtgtacacctcggtcattccgtgcaacatattcggtccccacgacaactataatccagaggtcagccacgttattccgggcatgatctataggatgcaccagctggttacggagaagactgacgtccccgaaaacgacaaggtgttcaccgttttcggaagcggcatgccactacggcagtttgtatactcccgggacctggcggagctgatgatctgggtgctcaggaactacgaaagtgtggagcccatcatcctaagcgcggacgaagtgcaggaggtgacgatcttcgaggtggcccaagccgttgcaaaagcatttaattttaatggaagactggtctgtgatacgagcaagtcggatggacagtacaaaaagactgcgtctaatgccaagcttcgctccttcctgccagactacgcatttacggacttggaaacggcaatcaacgcctcggttaagtggtacatagaaaactacgaccaggctagaaagtaa

SEQ ID NO: 6633 - protein, 321 aa, DROSOPHILA
MKKVLVTGGTGLVGKALEAVIKEQSPEDEQWFFAGSKDADLTNLAATQALFAREKPTHVIHLAAMVGGLFHNMNNNLDFLRNNLLINDNVLQTAHEQGCVKVVSCLSTCIFPDKTSYPIDETMVHNGPPHPSNYGYSYAKRLIDVQNHAYHDKYGRVYTSVIPCNIFGPHDNYNPEVSHVIPGMIYRMHQLVTEKTDVPENDKVFTVFGSGMPLRQFVYSRDLAELMIWVLRNYESVEPIILSADEVQEVTIFEVAQAVAKAFNFNGRLVCDTSKSDGQYKKTASNAKLRSFLPDYAFTDLETAINASVKWYIENYDQARK

SEQ ID NO: 6634 - DNA, 7108 bp, DROSOPHILA
ggctacgcctttgcgctcttctgccgccgctcaccgcatctcaaggtcgtagagagcgtggtgggggaacacctaatgccgctcgccaccagttactgtgatctcgctgctcaaaacgagttgtacgatgcccggcttgggcttctgctgcactgcatctctttggtactgaagccactgcccctggatactgatatctccgccttcgtaggcttcctgaagcgccttctcgtggcagtgccacgatccggagttcaactggcggccgtcaaggccagcctacgtctgcagagattcggattcaagtacactctggatgccctgaaggactacaggcccaactacgagctcgacccgttaacgcgggccatgattcgatgctttgcgaaacggaggaggcacttccgtcacgtggcggccactgggcggcgtacagagatttgagattcccttttatgaattgtaactatttatttatgtatgttattgtatagattttgaattaaactaaatgccaactgcgctgcggatctttacaaatttaaacttacaactaaaatacacaaaacgattgcacttaggttaggctggggttaaggtaagtcgtggacatgggacatggagcgcaagcaagtgaatgaaacaaaggaaagcgtaatcaaaatgtacaaaagtgcttagcgtggatttggacagaagtagctatacttaattcgtggactgtacaataacatggatctaggatgcggcatacacatacatcagcggcttctactactcgaaatgcctgcagagtcagccggaagcacccatgccgtgcgcgagggtgaggtataagtataaggtacttgtgatctccgacatcatttgcggtctagaagcgccaccgggcagggctcccagttccaatctccgccgtagagagccatcagttcatgctagatcagtttgttcagctgcaagtgtttgtattgggttagttaacgatgcaatatggaactcaaatgggcttccctaccagcgatcgccgctgatgctccttttccagtgcaacttgggcctgctgcggcgaaaatttgagcactgccgatatcaccttgacaagcgtctcgttgttcgtgttcccagttaggtactgaaatggaatatatcagttagttgggagtatatatttggacattatctagtttgattccccacctggaacatgatgttgcgcaagtactcgaattccgtgttggccggaacagcctcgctgtgttgcatggatacctgtcggcaagagaaaggaatcagcaatggaatcaaagggtgggtgcaccgctgctatggactcaccagggtttcatccagttgccgcgagagtttcgcattctgcagcttaagtcgctcgttggactgttcgagtatgaggaagttctcgcatttttgctccaggaacaggtttcgattcgtcacgtcctgcacctcgttcataatctctttgagcttagactccagttcagccttctcgccggcagcggctgcctcctgaacgtttttgggcgccatgctggcgaggagttgctgggcttgtatgccggctcgcagggtttccagctcgttgatgcgctccgccatctgctggttgttagcctgcagctcctcgatctcctgctgcatattggactccgcaccggcgctcttgtgcttgagatcctccagctcccgttgcagtcgctcgttcaggctgcgcaggctgtcggagtcggttgagggggataaatgctccttaaggcaaatcacctcctgccttaagccatcagcttcagcctgcagcaaggcctgctcatcccgactcattgccaattcgatttgcttatcgtggagttgctgctgcgcttgaagaaggtctttttggaccgcatcactctgctcggtgacaaagctggcgtgctccttctggcgggtcagctccaccgcctgttcctcgatggccttcttcagttcggacacctctgccgttgctgtcgcactctgcgtttccttttcggccatttggacggcatgctgctcggccttctcctgaagaacgtacaattcacattgcagggatttcagtttctccttcagctccgcactctcagccaactcggcctccaattgcttcgtgtgcttattcaaatactcgttctcgatcaggatctcatcgaatttggccaatttttcggaggcttcaatcttttcttgtagctgacgatcccttgtggccatggcttcttggagctccaccacctgacggtttttctgggcaattgactccttcacctcctcgcgttcctggccgtgcttaatcttcaactgttccatctccagctgcagggcatcattggcttcgtgaagacgctctacgtctgagttggcggcgctccagcgagcttccaatgtggcaatttgcgtggtgtaggacgaattggtagcctgcagtttctcctgaatgccctgctctgtctgcttataagcatcaagttgctcgcgaagattgctgatcgtggcctgcagttgggtctcactttcgctgttttgggccttcaatttcgcgcatcgttcggcttggtctttcagctgctgctcctgttctctttgtcgctctctcagctccgacagttgttggtcctgctccttcagttctcgatctaagttagccttaaccctatgcagctcctcactggccgactgcaggcagtccagagtgtgtttggtcagcagcttatccttttcgtaggcatcgcatttatcctgcagcgtccgatggtcgtgatccatcagctcctgggcattttgcagcttcgagtgctcgtcgagcacctgttgcagcttcgcctggatcttgccgatctcgtcttgtttggcttgcagttgggactccaaatgattcgtctgctcctccagcagacagttgcgttcggccagcttggtgttttcgctctggatctcctccagcttagctgaggtcctctcgtcctgggcactgctgtccacttgctcctgctgcagtgactcgatgcgggattccagcttgcgcttctcccgttccagctcgctgtgtgagtcttgcacctgttgcatttgcgcctgcatggtgccaatctcctccagaattccagtgacgcgtgcctgcagctcctccttttcgctctccacctggcgagagtgactcagtcgatctgccaactcactttgcagagcttcgaggcgagcgctttgatcgcttgatttcgcctggtgctgctcgtgttgcttctttatcttgttcaacttgttgccgctggctttcagttccttttccttggccaacaaactggcctgactggtggccaagtcctgactaagagcctccaactgcccttttagtgcagccactgtttcgctctccgagttcgcgtgctgatcttgtagtatttgaatctctcgctgtagctgttccagcttaagcctatgctgttcctcctgggaggctttctcggaattcaaagcggccacagattcgcgctccatttccaggctcttctcgagttcgagagcatggagctcccgttgcgattgaatggctgccaattcctctcttgcccgagcgagctgagcttcccagtcgttttgttgatgacgctggacaatttcgagcaactgatcattgtgcaagcgcaggtcctgcaaactgtgctcactttcggttttaagcgcattcaagctttgctccaaggatgccgcttgctcttccttggccgagagtgcggcctgaagtgcgttcaaactgtgttcagtggaaagaagtttggcttcggcttcgtccttagctgcacgtagttcattgatcttctgctgggaatcagtactttgagcttctcgttgttcattaatgtggtgcaatttttctacattcacatcgttttccttggaaagagttttcagtttgtcttccaacaaagcgactttctcttcctgtgctttataatcattcctgagggagtgcaaaagttcttccgtggctaagagcttcgattcggcttcgtccttggctgcttgcagtttcttttgctgatcctgtgcttcgttagtttgagaatcgctacttttcttgttttctcgcaatttatctaagtaattttcgttttcttgtttcagtttacccaactgctccttcagatgctttagctgctgctccttggctgcttgttcgcttcggagagattccaagagctgatccttggacaaaagctgggactccgcatcctgaacggctgcttgaagtttctttagttgctcgcttgaatcgcttgcttgggtatttcgatcttcgttctgtttctgcagatcttttactttctgttcgttttccacccttatggcttccagttgcgcttcgagtgtgaccacctgttgctccttgatcgcatagctttcttttagggtgttcagcaggtgctctgtagccataagtttggcatcgacttcctgcttcgtggcctgaagctttttgaactgctccttgacttcgttgttgtgggactctcgctgagattccaattgcttgagtttctcctgaagcttacgcacctcggtgtcctttagctccaattccgtatggatggcctgctttgtctgggccagaagaagcacgttctcctcctcctgcttgcgcacagcttcgtatttttcggtcacacttttcagctgctcgtcccgctctttaagtaatctctgtaagtcggacacaccggaactgccattggtggacaggggcgactttccgatcgactcctccaggtcgattagctgttcggactccagctgttggccgcttctctccagagccgccgtaatattctcaggattttcgcccagcagctggagcttcgtctgataagcctgcattttgcagctcatgtcgtccatctcaacgcgcagagcctcctccaaatgcgccttggcctgctgctccagcgtgcactgctccctcagctcgctgattcggcgcagcgccttgtcttgcgtctccaccagcacagactgcaaagcgatattatcggaaatgttcgttacacaagcttatcaagcagaccgattagataggcagatagatagatacccgcgccttggagctgtcgcgttccagttccttgtactttttggccagatccgtgtaccgacagcggtacttgtggtaacgatcaagtgacttcttgtacgcatcgtacagctggtccttggtgatcacatccagacgagccgttgaggcggagtcgtcgaactcgctgctcgtttcgtccagatcagattgcaagtggtacacctggaaagtagaacacataattaaagcaatctcggagacttttcggccacttacagctggcgcttcatatgtaggcaggcggaaagacacgtcgctggccatggacgagttggagagcttgcgggtcctggaggtggcgccgttcagggattgcgtcgatcgtccgcgcagagcggatgcacttgtggccggcagcttttggatgcgataaggcgagttctgaggtgtgtctgcgcggtgaaagatggattgatatgtgagataaggaaccccaggtgactcatggcgtactcaccctcctccgtgatgctgaagaagttctcattgttgctggtgttcgtttccgaattgggtgttgtgctcgacgatgagctcacggcggcctgggaaaaaagtccaaggaagactcatgagcagctggtcacttcacttttcacttgtgcacccagaaatgggtcacaatcgcacaatcgaaggcgaccccttcccagttcaccgacacacatgcaattccgtgtctgtgtgcgtatgttttcctcaatttgcatttttcatcggcaataagcaccgccccgcccccgcacacaaaaatacctgtgcagcattcgcaaattgctggaacttcgagggcgacgccttcacctcctcgatcagcttgttcttcaggttggcgaacatttcgagtgcctgctgcgctctttttcaactggttgcgctacctggtttaagcactattcaatttgtaattaaaaaacatctaaataaatacgtgtctgcagatgttcattcaacggtcacactgccgatagcctcgggagttatcgataacaagcgcagtattcattagggacgaacgcaactgcgggtcattaagtttatgaacgtgacgaaaaattttaataaacataaataaatgttacgtacaatgtaatttttatttaatacacacaaaagtaacaatttaattagttataattgataatacctacctccatgttttttaataccatcttggttcaagatattttccacaggtggcgcaggttatctttaaaaatatttggaagcctgttgaacgccctttcaattctttaaatatagatatatagaaagttcctaggtatgatgtattcaattttttctaacaatactactataatgaactgtttacacgctaaaactgaatgaaagctggtcaaacttgctaattatgcaatgatttagcattttaagtagccgctcgtgtttgaggaatcctcatgttgtgggcaaaaacgcttagttaagcaccctacagtttgtttttattcgaagataatgcagcatacgtttaaattgcacttctttatttataaaaaccgcgcaatagttcgtataactgtgttttcttgtacgtgaaatatacactcttttcataaattctattttttacaagttgttattctttttaagttaattgatttttagtcgattataacggcaggcgataaggccttagttattaacgaagaggaattgaaaaataacttataaagaaacacatcaacgaactttattgctttggttctgtaacgaagcggccataaactttagtaacctgttccagcacgagctaaagatgagcttctagttaaagcattcaaaatatggatggtttattacgcacttttcaaatacatatataatttttgggttactggtaagtggtagtgagcacttgggaacatacaaaagagagtgaaatgcattttagtaaatgtctcgagttcatccgtc

SEQ ID NO: 6635 - DNA, 4568 bp, DROSOPHILA
cagacacgtatttatttagatgttttttaattacaaattgaatagtgcttaaaccaggtagcgcaaccagttgaaaaagagcgcagcaggcactcgaaatgttcgccaacctgaagaacaagctgatcgaggaggtgaaggcgtcgccctcgaagttccagcaatttgcgaatgctgcacaggccgccgtgagctcatcgtcgagcacaacacccaattcggaaacgaacaccagcaacaatgagaacttcttcagcatcacggaggaggacacacctcagaactcgccttatcgcatccaaaagctgccggccacaagtgcatccgctctgcgcggacgatcgacgcaatccctgaacggcgccacctccaggacccgcaagctctccaactcgtccatggccagcgacgtgtctttccgcctgcctacatatgaagcgccagctgtgtaccacttgcaatctgatctggacgaaacgagcagcgagttcgacgactccgcctcaacggctcgtctggatgtgatcaccaaggaccagctgtacgatgcgtacaagaagtcacttgatcgttaccacaagtaccgctgtcggtacacggatctggccaaaaagtacaaggaactggaacgcgacagctccaaggcgcggtctgtgctggtggagacgcaagacaaggcgctgcgccgaatcagcgagctgagggagcagtgcacgctggagcagcaggccaaggcgcatttggaggaggctctgcgcgttgagatggacgacatgagctgcaaaatgcaggcttatcagacgaagctccagctgctgggcgaaaatcctgagaatattacggcggctctggagagaagcggccaacagctggagtccgaacagctaatcgacctggaggagtcgatcggaaagtcgcccctgtccaccaatggcagttccggtgtgtccgacttacagagattacttaaagagcgggacgagcagctgaaaagtgtgaccgaaaaatacgaagctgtgcgcaagcaggaggaggagaacgtgcttcttctggcccagacaaagcaggccatccatacggaattggagctaaaggacaccgaggtgcgtaagcttcaggagaaactcaagcaattggaatctcagcgagagtcccacaacaacgaagtcaaggagcagttcaaaaagcttcaggccacgaagcaggaagtcgatgccaaacttatggctacagagcacctgctgaacaccctaaaagaaagctatgcgatcaaggagcaacaggtggtcacactcgaagcgcaactggaagccataagggtggaaaacgaacagaaagtaaaagatctgcagaaacagaacgaagatcgaaatacccaagcaagcgattcaagcgagcaactaaagaaacttcaagcagccgttcaggatgcggagtcccagcttttgtccaaggatcagctcttggaatctctccgaagcgaacaagcagccaaggagcagcagctaaagcatctgaaggagcagttgggtaaactgaaacaagaaaacgaaaattacttagataaattgcgagaaaacaagaaaagtagcgattctcaaactaacgaagcacaggatcagcaaaagaaactgcaagcagccaaggacgaagccgaatcgaagctcttagccacggaagaacttttgcactccctcaggaatgattataaagcacaggaagagaaagtcgctttgttggaagacaaactgaaaactctttccaaggaaaacgatgtgaatgtagaaaaattgcaccacattaatgaacaacgagaagctcaaagtactgattcccagcagaagatcaatgaactacgtgcagctaaggacgaagccgaagccaaacttctttccactgaacacagtttgaacgcacttcaggccgcactctcggccaaggaagagcaagcggcatccttggagcaaagcttgaatgcgcttaaaaccgaaagtgagcacagtttgcaggacctgcgcttgcacaatgatcagttgctcgaaattgtccagcgtcatcaacaaaacgactgggaagctcagctcgctcgggcaagagaggaattggcagccattcaatcgcaacgggagctccatgctctcgaactcgagaagagcctggaaatggagcgcgaatctgtggccgctttgaattccgagaaagcctcccaggaggaacagcataggcttaagctggaacagctacagcgagagattcaaatactacaagatcagcacgcgaactcggagagcgaaacagtggctgcactaaaagggcagttggaggctcttagtcaggacttggccaccagtcaggccagtttgttggccaaggaaaaggaactgaaagccagcggcaacaagttgaacaagataaagaagcaacacgagcagcaccaggcgaaatcaagcgatcaaagcgctcgcctcgaagctctgcaaagtgagttggcagatcgactgagtcactctcgccaggtggagagcgaaaaggaggagctgcaggcacgcgtcactggaattctggaggagattggcaccatgcaggcgcaaatgcaacaggtgcaagactcacacagcgagctggaacgggagaagcgcaagctggaatcccgcatcgagtcactgcagcaggagcaagtggacagcagtgcccaggacgagaggacctcagctaagctggaggagatccagagcgaaaacaccaagctggccgaacgcaactgtctgctggaggagcagacgaatcatttggagtcccaactgcaagccaaacaagacgagatcggcaagatccaggcgaagctgcaacaggtgctcgacgagcactcgaagctgcaaaatgcccaggagctgatggatcacgaccatcggacgctgcaggataaatgcgatgcctacgaaaaggataagctgctgaccaaacacactctggactgcctgcagtcggccagtgaggagctgcatagggttaaggctaacttagatcgagaactgaaggagcaggaccaacaactgtcggagctgagagagcgacaaagagaacaggagcagcagctgaaagaccaagccgaacgatgcgcgaaattgaaggcccaaaacagcgaaagtgagacccaactgcaggccacgatcagcaatcttcgcgagcaacttgatgcttataagcagacagagcagggcattcaggagaaactgcaggctaccaattcgtcctacaccacgcaaattgccacattggaagctcgctggagcgccgccaactcagacgtagagcgtcttcacgaagccaatgatgccctgcagctggagatggaacagttgaagattaagcacggccaggaacgcgaggaggtgaaggagtcaattgcccagaaaaaccgtcaggtggtggagctccaagaagccatggccacaagggatcgtcagctacaagaaaagattgaagcctccgaaaaattggccaaattcgatgagatcctgatcgagaacgagtatttgaataagcacacgaagcaattggaggccgagttggctgagagtgcggagctgaaggagaaactgaaatccctgcaatgtgaattgtacgttcttcaggagaaggccgagcagcatgccgtccaaatggccgaaaaggaaacgcagagtgcgacagcaacggcagaggtgtccgaactgaagaaggccatcgaggaacaggcggtggagctgacccgccagaaggagcacgccagctttgtcaccgagcagagtgatgcggtccaaaaagaccttcttcaagcgcagcagcaactccacgataagcaaatcgaattggcaatgagtcgggatgagcaggccttgctgcaggctgaagctgatggcttaaggcaggaggtgatttgccttaaggagcatttatccccctcaaccgactccgacagcctgcgcagcctgaacgagcgactgcaacgggagctggaggatctcaagcacaagagcgccggtgcggagtccaatatgcagcaggagatcgaggagctgcaggctaacaaccagcagatggcggagcgcatcaacgagctggaaaccctgcgagccggcatacaagcccagcaactcctcgccagcatggcgcccaaaaacgttcaggaggcagccgctgccggcgagaaggctgaactggagtctaagctcaaagagattatgaacgaggtgcaggacgtgacgaatcgaaacctgttcctggagcaaaaatgcgagaacttcctcatactcgaacagtccaacgagcgacttaagctgcagaatgcgaaactctcgcggcaactggatgaaaccctggtatccatgcaacacagcgaggctgttccggccaacacggaattcgagtacttgcgcaacatcatgttccagtacctaactgggaacacgaacaacgagacgcttgtcaaggtgatatcggcagtgctcaaattttcgccgcagcaggcccaagttgcactggaaaaggagcatcagcggcgatcgctggtagggaagcccatttga

SEQ ID NO: 6636 - protein, 1489 aa, DROSOPHILA
MFANLKNKLIEEVKASPSKFQQFANAAQAAVSSSSSTTPNSETNTSNNENFFSITEEDTPQNSPYRIQKLPATSASALRGRSTQSLNGATSRTRKLSNSSMASDVSFRLPTYEAPAVYHLQSDLDETSSEFDDSASTARLDVITKDQLYDAYKKSLDRYHKYRCRYTDLAKKYKELERDSSKARSVLVETQDKALRRISELREQCTLEQQAKAHLEEALRVEMDDMSCKMQAYQTKLQLLGENPENITAALERSGQQLESEQLIDLEESIGKSPLSTNGSSGVSDLQRLLKERDEQLKSVTEKYEAVRKQEEENVLLLAQTKQAIHTELELKDTEVRKLQEKLKQLESQRESHNNEVKEQFKKLQATKQEVDAKLMATEHLLNTLKESYAIKEQQVVTLEAQLEAIRVENEQKVKDLQKQNEDRNTQASDSSEQLKKLQAAVQDAESQLLSKDQLLESLRSEQAAKEQQLKHLKEQLGKLKQENENYLDKLRENKKSSDSQTNEAQDQQKKLQAAKDEAESKLLATEELLHSLRNDYKAQEEKVALLEDKLKTLSKENDVNVEKLHHINEQREAQSTDSQQKINELRAAKDEAEAKLLSTEHSLNALQAALSAKEEQAASLEQSLNALKTESEHSLQDLRLHNDQLLEIVQRHQQNDWEAQLARAREELAAIQSQRELHALELEKSLEMERESVAALNSEKASQEEQHRLKLEQLQREIQILQDQHANSESETVAALKGQLEALSQDLATSQASLLAKEKELKASGNKLNKIKKQHEQHQAKSSDQSARLEALQSELADRLSHSRQVESEKEELQARVTGILEEIGTMQAQMQQVQDSHSELEREKRKLESRIESLQQEQVDSSAQDERTSAKLEEIQSENTKLAERNCLLEEQTNHLESQLQAKQDEIGKIQAKLQQVLDEHSKLQNAQELMDHDHRTLQDKCDAYEKDKLLTKHTLDCLQSASEELHRVKANLDRELKEQDQQLSELRERQREQEQQLKDQAERCAKLKAQNSESETQLQATISNLREQLDAYKQTEQGIQEKLQATNSSYTTQIATLEARWSAANSDVERLHEANDALQLEMEQLKIKHGQEREEVKESIAQKNRQVVELQEAMATRDRQLQEKIEASEKLAKFDEILIENEYLNKHTKQLEAELAESAELKEKLKSLQCELYVLQEKAEQHAVQMAEKETQSATATAEVSELKKAIEEQAVELTRQKEHASFVTEQSDAVQKDLLQAQQQLHDKQIELAMSRDEQALLQAEADGLRQEVICLKEHLSPSTDSDSLRSLNERLQRELEDLKHKSAGAESNMQQEIEELQANNQQMAERINELETLRAGIQAQQLLASMAPKNVQEAAAAGEKAELESKLKEIMNEVQDVTNRNLFLEQKCENFLILEQSNERLKLQNAKLSRQLDETLVSMQHSEAVPANTEFEYLRNIMFQYLTGNTNNETLVKVISAVLKFSPQQAQVALEKEHQRRSLVGKPI

SEQ ID NO: 6637 - DNA, 7992 bp, DROSOPHILA
acccaaactgcaagcctaaactttccccagaccgctccacttccatttgtttacgaacagcgctgcaaagcggaacagccgacagataagcgtcagtgtaagcgcagctgataacgggcggcggagtggcgacctaaagacgcatggaccgcgcaggcagatggaaacagttcgcaccggttcgctcgagtgtgcagtagatgatccagcggcaggaatggcggccacgatccagaacaccctgaaggtggcgctgcgaaagcgcatgaaggatgcactgaagggcatcgacgcggaggccatcgcccggcagtcgcaggccgtcacggctaaggtaacattggtttggctgggccccaaggttatcaagttaattcccaatccccctaatcggctcgatcgcacaggtgctgcaaagcgagatcttccggcaggcgcagcgggtgagcatttacctgagcacagcctcggagctggacaccacggcgctgctgtcggagatgttccgcctggagaagatggtctttgtgcccacctacgagggcagcaggatgaagatggtgcggctgcgcggcatggaggagtacgagagcctgcctctgaccaagtggaacataaagcagccggacttcaaggaggcacgcgaggatgccatgaccaacggtgagtggctaggcatacatcagagctccttctaaacccacacacacacactcgatcaccacagggcacggcatcgatctcttcattgtgcccggtgtggccttcacccgctgcggagctcggatgggccatggcatgggctactacgacaagttcctcaagcagcacgcggagaagtatccgcacaagaagatctcgctgatggcactgtcgctcaacgagcagatagtcagcaacgaggagttgcccatggagtcgcacgacgtccgtttgcacagtgtaattacggaaaactaacttttggcttacatacaaagtgggaagtaaagcgaactaatacgaaagcaacacacactattaagtattggaattcagctgcccagcgggcatcttaggatctagttctggttcgtttgccgagtttacgggaagtgtcagtgagaagcgggttgggctgcaatgtcctcctatctcaggtaggatggcctggaacgcaggcctcgtccacgcggccgtccactgtagtggggcgacgaatagtgcgagtcgctgctactgaagtgggagtccgaggcagaccgatacgatccgggggactctgcccagctggagggcgaaccaatgcgcatcatcttcttttgcctgttaaaagagtaaaaagagcccattagcgttatcctgctaagtggtaatcgtgacactttacctaaaggcagctgctgccgagattcgagatcctcggttgcgacccacccgggagcctctcagcattgagggtatcttgttgtagccggtgggtcctgtgggctgggcgccacaagtttccaaggccaggaagtcgtccacgtgcagcgatggcggtcgcgaggtgttgggcggccgggagcggaacaaatcgcccctggaaggtggtggccgagcaaaaccacgaccccttaccgacgacacaaacatcttcttttcgggtcgaccagtcgcgggctcaacttccacacggcgcgtgcggaaacaaggcgccgtgggcgtcatctcccgattggattggggcgagccggataagttcatgacccgcttgctatcgccagccacattcaagtccggattgaggcacacgttggccaaatccgtgagatcgcaggcaatgcgctcgtagatcggctcgttcatgtcctcgatcagttcgatgggcagcgggtccagccagtagcgcgccgttagttgggcattctcggcggtggcgcagaatcgcgtgaagatcggacgcgcctcgtactgtgtgacaatgccctcggcctgtggcagatagggctccacggtcagagatgcactgcagctgctggcagatggattggcttcgccctccgcctctggtggcgtctccgtactggttccggcgagaatctcctgcttagaggcctgcagcaggatcagctgcttgaggtcgctcagcgccgcctcattggccactgccttatgcttctccatgacggtgagaatgcggctcagcaccggtggcttggccagctcaatgtcctggaactcaaccagctgagccaactctgtggcgcccagtttcagagtgcggtgtggcatggccgacatggcgggcggcggttctatttgggtcagagagcgcagcagcaggatcagagattcgatgttggcattgtactccaccgtttcgttgtgaaggatcacgcgctccatccacgcctggaactcggtgatcttttgcttcaacaactgcgccagatggtagaaagtgaagctggcggtatagataatattaatattaaaagcgtgcgagtgatattcagaacttactcgtgctccgtgaggatgaccagattgcgcaccgctagaatcgatatgccatgcgtgacctccacgcttgtcaggttactgaagaccgcatcgatgattcgcggaatgagctccttgggtggcagtgcggcagccagattcaaagcgggcgaagccgtgctcttgtgcgaaatcagcgaaatgcccgagtctaggaaactgtccagaatgcggtgaacggcctcctggcagttggaaaccacgtcgttaaactcgttcagtgccagcagcgactggaagagttcccagaactttccggagagtatggacagcatggagctcttcaaaggggcaaaagcgcacaagcgagtggagaaacgaagcagccgttccaggttggtggtcggaatacagttggatgtctggtactcattgcacagcagttccgtgatcgtcttggcgatcagcagcgtcatgttgggcgccaggtcggacagttgcatgcacactcgctgcagtagttcggacagctgcggaaaactggacggagccagtgcctccaccagcttggcgatctgaccgctctggggatgcaagtgggcggaccacagtttccgctcggtaatcagacgctgcttgtgctgctgctgcaactggtcgcatagcggctggggcataggcagcggcagtggaagcagctccgccaaaagtttcagtcctgtacggaaggaatcattagatggatcagatctcttgcaaagtctagcttaccaggaatgaagtgcgcgggaccatcgacattcttaagcacctctctgatcatcagggtccaaagggacttgtgcagcgactcctcgtcttgttcgttcggctgggtgtaggcgagcagggtctggaccacctccatcttgcactgctccacctcgggtcccgcctggcagcgcgtggggaagtagtagagcaggtagtacactttcaccaggtgatcgatggctgtgaggtccttgtaggtgccgtctctgcacagaatcgcgtaggagagcagctcgcggaggatctgtagcgttggcagcatgatctggcagcaatgcactccctggatggtcatcagggcgggagcgtgcgcacccggctgctcgaagtaggcgcatagtcgctccatgatctggatgcaaagttggacaccatccgccgcgtacagctgcagggccacgaacctatgtttgagctcctcggtcactggaggagctttctgacctgccagcggcttgcttatggagagatagcgcaaaatccgcatggccattatcagatctccgggaaaagtggttaggtaatccagggagcgtcctatcacctccaccagcggcataatgtcatcgtatacgaacacattgatggcctctaagggtttcatgtacacgtacatctcctgcaggacggccgacaccgagggctcgaaggtctcgtggttcttggccagctccaggatcacacctccgtgctcgataaggtagtccaactgctcgcagtagcggacgcaggcgtccaccatgtccacggcatagctcaataccggactcttgtacttcgtgcccggcgaactcagctggcgttgcgtctgcagacgctgctccttcttgatcagatccatgaagatcttaagattgttattcaagcccagcacctccacggtgtgctgccgcccagccggatcgcaggtttgcgagtaaatggcatgcatatgcgtggccaacttgacggcatcgtattcgggagccgcggcagcgtaagcaatggcgtccaggtggtaacgcgtctgcaccttgtacgacatttcgatgcccaacctggccaggcgtggcagtactgggcgcaggatcggcctgggtcgcacttgaggagcagcagctggagctggaacggaaatcggggccgcaactggcttcccctcctcgtcggccgtcggtggagttggcttctcgcctccagcttccacagcttcattttcgacctccattgccttgtcctctgcatccgacttctctgccttctcctctttttcctccgggtttcgaggaacctcgtccaggcccagcagtatggccacaatcgtctgcgttacaggaaaagcatcatccacgaagtaatcaatgccgacatgcgagcgcaaaagggtgtgcatcaagtctagcatgcttagatacgtcgtggccggcaactccttgcagtttgccaacatgaccagcagggattccgccagtgagttctgtcccaagtaggactgcagggcatttccgaaactgcgctgcgccgtgggatcggtcaccacctcgaatttcttggacacgggcagaaagcgacgcggctgcaagtagctcaactggctggagaacagtgcatccatcagcatctcgaaggcaaactctatctgctggcaagttatcactgtgtcctccatttgatcgcgattaccaggtatgattattcggtccacgaagagacgacggcaccagatctgtacactctccaggccttcccacaaatgcagcttctttataatcgcctgcagtgcgtacttcgtcctggtcagcttggctgtcttgatggcttcaacaatcatctgatagccgttgttcttcgctcccataaagtgttcgatacccatcctggtgtccagcagggcgtagacggccttgaggagctgaagcttgatggacagagccatgtacggttcgtggtacagccggaacaccgcctcaaagatatcgaatttgtgctctttcaacaagtgctggaagagctcttcgctactgcccagaagttcagccattcgcgcacccagcttgatgtggcggatcttaaaagctggctgtggttgcatgcatgccgcctggaaactcagggcaatctgcagcacgttagccgcctgtcgcagatgtagctcatcgtttccgaagaactgctgcaggacaaagttcctccgcttgtagtgctgggctaggtaacccaattggttgttcagttgttcacccaagtacacaaattgctccctttcgtccacactagcgccatgttcctcgctgaaggcattaacattctcacagcgggtttgcaggaccagcttcttaaagagcagcttcagagtttccagctccttgcagaagtgggctgccatgtccccttcaaagaccaacagtggcttctgccacggctcgaaagcatcgatggccggaggagcagcggcagcagcagcctccaactcccgctcgtactccgcaatggcagccgcatccactgcgtcgtcctcctcgtcgtcgccgatgatctcgtcgtcactgagaatgggctcaaactgctcttgcggcgtgcacgatcggtcctcatcgtcccgatcccgttcaccacggtgcagcgactcggaggagtgccggtagtgagatgactgcatcttgtagtgggagcgcgagtcctcgtcctcgtagtccatcgtgtctggcgaacgcggacgtgtcggtgagtctatcgacgcgggcggggttctgggccacttgtgctcgtccacaacggagcgagatctctcggagcgcttgcgacgtgaccgatggctggaatactccggtgaacgcgaccaatccctggagcccttgtcgcgggaactgcaatgaaaggtctgtgataagtctgaatataataaataaaacagataaccacttaccacctgatgtactccctgtcgttgctctccgaatgcgtgtgcgatcttctgggcggtggcggtgagtgatccgtggaatgcgtggaccgacgcagtcgtcgcatctctcgctgctcctgctcctcggcatgctggtggtaatgatcccgcgacattccatactccatgtcctccggatcgtaatcgctgacatttcctttgtgagcggtcagcagttcggcctgcatcggctcctgccactcgtctttcagcacatcctcctggaggagcacctcgccactcaggttggctatctccgggcccacgggctcgcagggcagcgttggactggcgattggctcggtcaccgagttggtgaaaatgccgtagatggccagtgtgatggtgctgtaccagccgcgcagcaccagaccgtcggtgacgatcttctcctgcgagcaatccaagtgaatgcagtcgttctggttgtaacgcagcaggccgaggttctcgaatgccgacgcagccggcattcccaggtcattgacgaagaactccaggtcgaacttggaggggttggtggcgcccaggcgaacgccgccgggaaagtctgcctggactcgggcgccgagaggaatgatccgcacctgtgtgatgaagaccggcttgggaaactgcaccaaatccaaattgatgtcctatgaggagaggaggaagtggggttcagcgaatgcaccgagtgggggcttctggaggcacttaccgtcacttcctcatgcgagaaagtgtcgaagaacagcagctcggacccgtcgtctacgtcggccatgttgtgtgcttaaatcgagtctttttcagtaaaatcttctacagtccggaagttttatttattttccgcaactgctagggatggaacttaagacgataagtgatcgatatcatcaattgctctactacaattggtaggggtattcaagagggtatgctttagaatatgttgaatacatctttaaaaactaaacaaaaattgtctcagtctagtagcttgcgcaaaacaatgcatcaaattttaacgtcacaattggctcatgtctagaaatgaattggattttttctcaatattccccatttttggtaatgatgctctcaatgttttctaaaagattgtaaaatagccctaaaaaccataggcttaaacctaacgcagggaatcgcactgattcagagtacatttgtttcccttcaatggacgcacgcaaatcatgtaaatttagttattatcagtaattcaaaatttacttcctctacaatattatcaaactataattcgaacctcttattataaataaagtgtgaactatcaaaaacgaagtagtgagaacgacctataagagttccataaaatagtcccataccatatatatcgataggctcgtgctgggttgtcgataagggaaatgttttggagaccggctgcagagaaaaacgcggattttgttttatttctctgttttgtgtattaaatcgccagatgcgcagcttaatattgtccaactcgtgaccgactagcgaattgtgtggaaaatgaggattctccttgttttctgcaagttctagaaccgcagtggcgcttgaacacgcaaccacgtgaaatccagcaacaacaagtctgcgcaacatgaatttggacgagttctccgacttcaatatagatcagcttctgggcccaagcgcaccgctgcaagatgctctggtggcgccgtataagcaggtgtcgctgcccaggagcaaccaagatgtgtacgccaagcgaagccggctggccgagc

SEQ ID NO: 6638 - DNA, 5695 bp, DROSOPHILA
atggccgacgtagacgacgggtccgagctgctgttcttcgacactttctcgcatgaggaagtgacggacatcaatttggatttggtgcagtttcccaagccggtcttcatcacacaggtgcggatcattcctctcggcgcccgagtccaggcagactttcccggcggcgttcgcctgggcgccaccaacccctccaagttcgacctggagttcttcgtcaatgacctgggaatgccggctgcgtcggcattcgagaacctcggcctgctgcgttacaaccagaacgactgcattcacttggattgctcgcaggagaagatcgtcaccgacggtctggtgctgcgcggctggtacagcaccatcacactggccatctacggcattttcaccaactcggtgaccgagccaatcgccagtccaacgctgccctgcgagcccgtgggcccggagatagccaacctgagtggcgaggtgctcctccaggaggatgtgctgaaagacgagtggcaggagccgatgcaggccgaactgctgaccgctcacaaaggaaatgtcagcgattacgatccggaggacatggagtatggaatgtcgcgggatcattaccaccagcatgccgaggagcaggagcagcgagagatgcgacgactgcgtcggtccacgcattccacggatcactcaccgccaccgcccagaagatcgcacacgcattcggagagcaacgacagggagtacatcaggtgttcccgcgacaagggctccagggattggtcgcgttcaccggagtattccagccatcggtcacgtcgcaagcgctccgagagatctcgctccgttgtggacgagcacaagtggcccagaaccccgcccgcgtcgatagactcaccgacacgtccgcgttcgccagacacgatggactacgaggacgaggactcgcgctcccactacaagatgcagtcatctcactaccggcactcctccgagtcgctgcaccgtggtgaacgggatcgggacgatgaggaccgatcgtgcacgccgcaagagcagtttgagcccattctcagtgacgacgagatcatcggcgacgacgaggaggacgacgcagtggatgcggctgccattgcggagtacgagcgggagttggaggctgctgctgccgctgctcctccggccatcgatgctttcgagccgtggcagaagccactgttggtctttgaaggggacatggcagcccacttctgcaaggagctggaaactctgaagctgctctttaagaagctggtcctgcaaacccgctgtgagaatgttaatgccttcagcgaggaacatggcgctagtgtggacgaaagggagcaatttgtgtacttgggtgaacaactgaacaaccaattgggttacctagcccagcactacaagcggaggaactttgtcctgcagcagttcttcggaaacgatgagctacatctgcgacaggcggctaacgtgctgcagattgccctgagtttccaggcggcatgcatgcaaccacagccagcttttaagatccgccacatcaagctgggtgcgcgaatggctgaacttctgggcagtagcgaagagctcttccagcacttgttgaaagagcacaaattcgatatctttgaggcggtgttccggctgtaccacgaaccgtacatggctctgtccatcaagcttcagctcctcaaggccgtctacgccctgctggacaccaggatgggtatcgaacactttatgggagcgaagaacaacggctatcagatgattgttgaagccatcaagacagccaagctgaccaggacgaagtacgcactgcaggcgattataaagaagctgcatttgtgggaaggcctggagagtgtacagatctggtgccgtcgtctcttcgtggaccgaataatcatacctggtaatcgcgatcaaatggaggacacagtgataacttgccagcagatagagtttgccttcgagatgctgatggatgcactgttctccagccagttgagctacttgcagccgcgtcgctttctgcccgtgtccaagaaattcgaggtggtgaccgatcccacggcgcagcgcagtttcggaaatgccctgcagtcctacttgggacagaactcactggcggaatccctgctggtcatgttggcaaactgcaaggagttgccggccacgacgtatctaagcatgctagacttgatgcacacccttttgcgctcgcatgtcggcattgattacttcgtggatgatgcttttcctgtaacgcagacgattgtggccatactgctgggcctggacgaggttcctcgaaacccggaggaaaaagaggagaaggcagagaagtcggatgcagaggacaaggcaatggaggtcgaaaatgaagctgtggaagctggaggcgagaagccaactccaccgacggccgacgaggaggggaagccagttgcggccccgatttccgttccagctccagctgctgctcctcaagtgcgacccaggccgatcctgcgcccagtactgccacgcctggccaggttgggcatcgaaatgtcgtacaaggtgcagacgcgttaccacctggacgccattgcttacgctgccgcggctcccgaatacgatgccgtcaagttggccacgcatatgcatgccatttactcgcaaacctgcgatccggctgggcggcagcacaccgtggaggtgctgggcttgaataacaatcttaagatcttcatggatctgatcaagaaggagcagcgtctgcagacgcaacgccagctgagttcgccgggcacgaagtacaagagtccggtattgagctatgccgtggacatggtggacgcctgcgtccgctactgcgagcagttggactaccttatcgagcacggaggtgtgatcctggagctggccaagaaccacgagaccttcgagccctcggtgtcggccgtcctgcaggagatgtacgtgtacatgaaacccttagaggccatcaatgtgttcgtatacgatgacattatgccgctggtggaggtgataggacgctccctggattacctaaccacttttcccggagatctgataatggccatgcggattttgcgctatctctccataagcaagccgctggcaggtcagaaagctcctccagtgaccgaggagctcaaacataggttcgtggccctgcagctgtacgcggcggatggtgtccaactttgcatccagatcatggagcgactatgcgcctacttcgagcagccgggtgcgcacgctcccgccctgatgaccatccagggagtgcattgctgccagatcatgctgccaacgctacagatcctccgcgagctgctctcctacgcgattctgtgcagagacggcacctacaaggacctcacagccatcgatcacctggtgaaagtgtactacctgctctactacttccccacgcgctgccaggcgggacccgaggtggagcagtgcaagatggaggtggtccagaccctgctcgcctacacccagccgaacgaacaagacgaggagtcgctgcacaagtccctttggaccctgatgatcagagaggtgcttaagaatgtcgatggtcccgcgcacttcattcctggactgaaacttttggcggagctgcttccactgccgctgcctatgccccagccgctatgcgaccagttgcagcagcagcacaagcagcgtctgattaccgagcggaaactgtggtccgcccacttgcatccccagagcggtcagatcgccaagctggtggaggcactggctccgtccagttttccgcagctgtccgaactactgcagcgagtgtgcatgcaactgtccgacctggcgcccaacatgacgctgctgatcgccaagacgatcacggaactgctgtgcaatgagtaccagacatccaactgtattccgaccaccaacctggaacggctgcttcgtttctccactcgcttgtgcgcttttgcccctttgaagagctccatgctgtccatactctccggaaagttctgggaactcttccagtcgctgctggcactgaacgagtttaacgacgtggtttccaactgccaggaggccgttcaccgcattctggacagtttcctagactcgggcatttcgctgatttcgcacaagagcacggcttcgcccgctttgaatctggctgccgcactgccacccaaggagctcattccgcgaatcatcgatgcggtcttcagtaacctgacaagcgtggaggtcacgcatggcatatcgattctagcggtgcgcaatctggtcatcctcacggagcacgacttcactttctaccatctggcgcagttgttgaagcaaaagatcaccgagttccaggcgtggatggagcgcgtgatccttcacaacgaaacggtggagtacaatgccaacatcgaatctctgatcctgctgctgcgctctctgacccaaatagaaccgccgcccgccatgtcggccatgccacaccgcactctgaaactgggcgccacagagttggctcagctggttgagttccaggacattgagctggccaagccaccggtgctgagccgcattctcaccgtcatggagaagcataaggcagtggccaatgaggcggcgctgagcgacctcaagcagctgatcctgctgcaggcctctaagcaggagattctcgccggaaccagtacggagacgccaccagaggcggagggcgaagccaatccatctgccagcagctgcagtgcatctctgaccgtggagccctatctgccacaggccgagggcattgtcacacagtacgaggcgcgtccgatcttcacgcgattctgcgccaccgccgagaatgcccaactaacggcgcgctactggctggacccgctgcccatcgaactgatcgaggacatgaacgagccgatctacgagcgcattgcctgcgatctcacggatttggccaacgtgtgcctcaatccggacttgaatgtggctggcgatagcaagcgggtcatgaacttatccggctcgccccaatccaatcgggagatgacgcccacggcgccttgtttccgcacgcgccgtgtggaagttgagcccgcgactggtcgacccgaaaagaagatgtttgtgtcgtcggtaaggggtcgtggttttgctcggccaccaccttccaggggcgatttgttccgctcccggccgcccaacacctcgcgaccgccatcgctgcacgtggacgacttcctggccttggaaacttgtggcgcccagcccacaggacccaccggctacaacaagataccctcaatgctgagaggctcccgggtgggtcgcaaccgaggatctcgaatctcggcagcagctgcctttaggcaaaagaagatgatgcgcattggttcgccctccagctgggcagagtcccccggatcgtatcggtctgcctcggactcccacttcagtagcagcgactcgcactattcgtcgccccactacagtggacggccgcgtggacgaggcctgcgttccaggccatcctacctgagataggaggacattgcagcccaacccgcttctcactgacacttcccgtaaactcggcaaacgaaccagaactagatcctaagatgcccgctgggcagctgaattccaatacttaatagtgtgtgttgctttcgta

SEQ ID NO: 6639 - protein, 1854 aa, DROSOPHILA
MADVDDGSELLFFDTFSHEEVTDINLDLVQFPKPVFITQVRIIPLGARVQADFPGGVRLGATNPSKFDLEFFVNDLGMPAASAFENLGLLRYNQNDCIHLDCSQEKIVTDGLVLRGWYSTITLAIYGIFTNSVTEPIASPTLPCEPVGPEIANLSGEVLLQEDVLKDEWQEPMQAELLTAHKGNVSDYDPEDMEYGMSRDHYHQHAEEQEQREMRRLRRSTHSTDHSPPPPRRSHTHSESNDREYIRCSRDKGSRDWSRSPEYSSHRSRRKRSERSRSVVDEHKWPRTPPASIDSPTRPRSPDTMDYEDEDSRSHYKMQSSHYRHSSESLHRGERDRDDEDRSCTPQEQFEPILSDDEIIGDDEEDDAVDAAAIAEYERELEAAAAAAPPAIDAFEPWQKPLLVFEGDMAAHFCKELETLKLLFKKLVLQTRCENVNAFSEEHGASVDEREQFVYLGEQLNNQLGYLAQHYKRRNFVLQQFFGNDELHLRQAANVLQIALSFQAACMQPQPAFKIRHIKLGARMAELLGSSEELFQHLLKEHKFDIFEAVFRLYHEPYMALSIKLQLLKAVYALLDTRMGIEHFMGAKNNGYQMIVEAIKTAKLTRTKYALQAIIKKLHLWEGLESVQIWCRRLFVDRIIIPGNRDQMEDTVITCQQIEFAFEMLMDALFSSQLSYLQPRRFLPVSKKFEVVTDPTAQRSFGNALQSYLGQNSLAESLLVMLANCKELPATTYLSMLDLMHTLLRSHVGIDYFVDDAFPVTQTIVAILLGLDEVPRNPEEKEEKAEKSDAEDKAMEVENEAVEAGGEKPTPPTADEEGKPVAAPISVPAPAAAPQVRPRPILRPVLPRLARLGIEMSYKVQTRYHLDAIAYAAAAPEYDAVKLATHMHAIYSQTCDPAGRQHTVEVLGLNNNLKIFMDLIKKEQRLQTQRQLSSPGTKYKSPVLSYAVDMVDACVRYCEQLDYLIEHGGVILELAKNHETFEPSVSAVLQEMYVYMKPLEAINVFVYDDIMPLVEVIGRSLDYLTTFPGDLIMAMRILRYLSISKPLAGQKAPPVTEELKHRFVALQLYAADGVQLCIQIMERLCAYFEQPGAHAPALMTIQGVHCCQIMLPTLQILRELLSYAILCRDGTYKDLTAIDHLVKVYYLLYYFPTRCQAGPEVEQCKMEVVQTLLAYTQPNEQDEESLHKSLWTLMIREVLKNVDGPAHFIPGLKLLAELLPLPLPMPQPLCDQLQQQHKQRLITERKLWSAHLHPQSGQIAKLVEALAPSSFPQLSELLQRVCMQLSDLAPNMTLLIAKTITELLCNEYQTSNCIPTTNLERLLRFSTRLCAFAPLKSSMLSILSGKFWELFQSLLALNEFNDVVSNCQEAVHRILDSFLDSGISLISHKSTASPALNLAAALPPKELIPRIIDAVFSNLTSVEVTHGISILAVRNLVILTEHDFTFYHLAQLLKQKITEFQAWMERVILHNETVEYNANIESLILLLRSLTQIEPPPAMSAMPHRTLKLGATELAQLVEFQDIELAKPPVLSRILTVMEKHKAVANEAALSDLKQLILLQASKQEILAGTSTETPPEAEGEANPSASSCSASLTVEPYLPQAEGIVTQYEARPIFTRFCATAENAQLTARYWLDPLPIELIEDMNEPIYERIACDLTDLANVCLNPDLNVAGDSKRVMNLSGSPQSNREMTPTAPCFRTRRVEVEPATGRPEKKMFVSSVRGRGFARPPPSRGDLFRSRPPNTSRPPSLHVDDFLALETCGAQPTGPTGYNKIPSMLRGSRVGRNRGSRISAAAAFRQKKMMRIGSPSSWAESPGSYRSASDSHFSSSDSHYSSPHYSGRPRGRGLRSRPSYLR

SEQ ID NO: 6640 - DNA, 5045 bp, DROSOPHILA
aacaatggtacaaccttatcggcttttaaatttaattcagtcttcacaacttcaatgctttaagactgctagtttaatttgggtaataaacttctaacagggtaaaagtggtgtgacactagtttttgaatttgatatgctaatattaaaataccatcgtggggtacaaggtacattttactaaataaagatcgcttggaacataaacctttctgttctaagcacaacactggataactatgcagccgcaataagttagaatagttatatatcttttggatagcggagtgtttggccagggtgcgaggatctagatacaaattgaagccataatagttccattatggggcgcaccacattgctgtccggacacaaatgcaccgagcccctcgtgatgtgagtttaggaagggcaattggtaattaccagcatgagggccacctccgccatgggggtgacatacaggcactggtggaaaagcggaatcgcatccacgatttccacttgggagcccttcgatgtcttctcggccagcaagagtccgttgaccgcctggtgtggatacttggccgcgtggaatatcaacttggcgtacgcccgctccgagaccttgtagtcgcacattttctcagaatattatctcaatttattcggcaaaaaataaaacatgaattggaaattcgacagctagaaagtgtgaccgcgacgcagctgttcaaatataccgcaaacgtcaaatatacaatgaaaaatactaaaatggatgagcatggaatggattccacaaaaaatgtgatcaaaactatatttgttaattatgtctttaacattgaaaatatatttataacttaagttctagaaaatggtttctaacataggttgcagtagtctggtcacatcgatatgggcgcgcaaacaatatgtggattccacttcaaattaatttattactcaaactaatatttaattctaacgtgaatgatggaaaacataactgaatatgtgtaacattttatttcttaactgtccgtctgcgtctcgctcttgcttggtttttttctccggttttttatatatgtatattgtaactaaaaatatttagcagttcagctgaatgtccggtggcagaccaacccggccttccaattggatccttgaacaccatcaaaccacaccgatgggggaactacgtctggctttcattcagtattgccttgatgtcgtcggcgtcaagagtctcgtacttgagaagcgcctccgcaagcgctttgtgctccctggtgtgttttcgcaggatagccttcgcccgctcgtagctgtcgctgaggatgcgcttgatctccgcgtccacggcttcaatggtgttgggaccaagggtgtcaccggtgcccagaccctttgacgcctcgatggtgcgaagaccgaccttgtccgacatgccccagtccctgaccatatgcgtcgcgatcgaggttgcctgcttgagatcactgctggctcccgacgtaatcttgtccgtgccgaagaccagttcctcagcagcacgaccgcccatcatggtgtccatcatggccagcagctgtgcctttgtgacatggtaacgctccttctccggtatgtaggcggtgtgtccaagggagggtccgcggggcatgatggtcaccttgtgcagcggatgcgactccttggtgtagaaggccacaatcgcgtggccgccctcgtggtaagcggttatggtgttggcctcctcgtccggtagacgagccttgcgctcgggtcccataagtactttgtctcgtgccgtttccaaatgcttcatgctgaccgtttcggctccatcgatggcagctctgccaaaatgttagaattattagtaccgctcttcaaaattgtgattgaataatacaacacaagttattccttaccttaacgccgcttggttaatcatgttttccagatccgctccagtaaaaccagaggtgccgcgcgccagcatgtccaagtctatttcatcgtgcaaaatcttcgtcagatacagagacaatatctccttacgtccagtgaaatcgggcgtcgacaccatgacttctacatcaaatcggccgggacgcagcagagcctgatccaaatcgtcgcgacgattggtggctcccaaaacaatgacgccagcgttctgatggaagccatccatctcggagagcagctgattgatggtctgattggcgtaaggatgcagcacagagttggttcgcttggcgcccaccgagtcgatttcgtcaatgaagataacacaaggggcacgggcctttgctgcctctgcaagatgatgttcttgtttagttgagcactttggataattgaaatctacttactgaacagatcacgcactcgtctggctccttggcctacgagcacctcgtcgaactccggtccggcagcatggaagaaaggaactttggcttcaccggcgacggcacgggccagcagtgttttgccagtacccggcgggccaaccaggagcactccctttggaagctttccgcccaaatttgagaacttttccggactcttcaggaattcaacgacctccttgagctcctgcttggcttcgtcgcaacccttgacatcctcaaaagtgacgttgatctcctcagggtccacttcaacctggttgcccagttgtatgctgctgaaagaaaggcatatcagatgggtaaagcaaaactaataacgtggaggctcaccgaaatacggatccattggaggttgtaaagaagctcaggaaaatgcccaagaacacgacgataacgacgatagtctgcaaagtctgcgtgacaattactagaatttatttataacactaaagaagaccaaggccttctgtggttttcaaagtaatcatggtacactttgaatgaatttaaactcgtaccttcagatatttcatagtttttcctgattttggagagtcctccgagttagcggcggccaagtagccctcggcaaaggcaattttcaggctctcctggaatacaaaacattagtacggttaacaattgagagaccctgtcgtcctacggctttattaaatccatgctcttcggatttggccagcagccgtctcagtttttcagcctgaaggggtgtgtccccatccagacgctggggcgagttggccagagcattctttagtcgggaggtcattgtgggattgcgcttttgttccgcctcaatggaacgatccgtcttaaagccacgtatctgatttctataaagagctaaatttgagatatagttcgtagatactttccgtataattacagctgttgttgtgagaagagcggacgaagaagacctggtgtaatagttggaatcaccttgctgaaaacataaaccaggattaagcggagcctcgaaaggataatttgcaatacgtacacattggcgcctgtgggcacggaacctgctgcaccggttagcgaaacttcgaactgataattttgcagctggacacgaccgatctgtgtggccgactcctccaacgtgactcggacatcgcgcatggagggcagcatgctcgtcaccttggccagcacatcatcgaccagccgccggtcgagaatgccattcagtcgagccgccctctccaccatgccctgtatactggcgctcgaacggctcagcaggttccgcaggtcgagcactaggtcatgactccggctggacgtggacgtggacttggacaaccgggcagctcccgcgctcccgtgcagcttggttcgattaacggagtagtagtgcggctttctgctgaagttgcctaggtacaggtagggctgtcacatcacatcacacgcagttccccgattccaagtgttgggtggtagaaatggagcagtcaggtgggcgaatgaatgtattgtcatcgggcagcacttaccacggagtgtgtggtggtggaaaacattgccaaaactacaaatttcaataaattacaagggcaggctcaggatcgcggccagcagacgacacagctgtaactttacttgacagcgaaaatgtcataatctcgtcgcgtcgtgcgcgttgcatccctggttctggtggtgcgcgactttccacctcttatcaaagcacgcgttctccaattactggcaattttcaaaagtgtattcgtttgtcgactggtggttttgattttattcgatttttaatttggtttatatatctaaactgcctctccgtacagtcaacgctgctgatagtgttgctaaacttacataaatatataaaattttgtataaataaaatgaatgataatcagcgcaaactttgcattctataaaatgtgatttgtttactactaagatcaaatgaaagtctattccaaattttacttatattgacaacaaattccattgtatcaactgtaaatgaatgttgtctttgttatttagttttaacttcttaaagaaaaaggtttttaaccagtttaggatagacaaagagtccctatcgcaaccatcgtgcatagatcgaccatcactagttctggagatgtgcagaagtcactggcccgtttcgccggcgaccagggttggcaaatcggctgcgccggtagttggtccgttatacatttcacaaattccacattaaattgtatcagcatggactccccgctgaacgatggctctcaccatccaccgccgcacgctccccaccccctggtgagtgctctacggtccttaaactgccactacccaaacgtttgcatctatttcaggcggactatcagttttctgcggaggaggtgaaggcgttacgtgagtgcaacactgagtctttcttccagcgcagcctgcctttcggcactggactgggcctgctggcctacttcggcgtcaagaacggctatttgcagggacacgtcaagtacggcgccgtgcccaaggtcgtgatgggcgtcattctgggctactttgtgggcaagttcagttaccagcagaagtgtgccgagaagatcatgcgcctacccaactcccatc

SEQ ID NO: 6641 - DNA, 2475 bp, DROSOPHILA
taaagttacagctgtgtcgtctgctggccgcgatcctgagcctgcccttgtaatttattgaaatttgtagttttggcaatgttttccaccaccacacactccgtgccctacctgtacctaggcaacttcagcagaaagccgcactactactccgttaatcgaaccaagctgcacgggagcgcgggagctgcccggttgtccaagtccacgtccacgtccagccggagtcatgacctagtgctcgacctgcggaacctgctgagccgttcgagcgccagtatacagggcatggtggagagggcggctcgactgaatggcattctcgaccggcggctggtcgatgatgtgctggccaaggtgacgagcatgctgccctccatgcgcgatgtccgagtcacgttggaggagtcggccacacagatcggtcgtgtccagctgcaaaattatcagttcgaagtttcgctaaccggtgcagcaggttccgtgcccacaggcgccaatgtcaaggtgattccaactattacaccaggtcttcttcgtccgctcttctcacaacaacagctaaatcagatacgtggctttaagacggatcgttccattgaggcggaacaaaagcgcaatcccacaatgacctcccgactaaagaatgctctggccaactcgccccagcgtctggatggggacacaccccttcaggctgaaaaactgagacggctgctggccaaatccgaagagcatggatttaataaagccgagagcctgaaaattgcctttgccgagggctacttggccgccgctaactcggaggactctccaaaatcaggaaaaactatgaaatatctgaagactatcgtcgttatcgtcgtgttcttgggcattttcctgagcttctttacaacctccaatggatccgtatttcgcatacaactgggcaaccaggttgaagtggaccctgaggagatcaacgtcacttttgaggatgtcaagggttgcgacgaagccaagcaggagctcaaggaggtcgttgaattcctgaagagtccggaaaagttctcaaatttgggcggaaagcttccaaagggagtgctcctggttggcccgccgggtactggcaaaacactgctggcccgtgccgtcgccggtgaagccaaagttcctttcttccatgctgccggaccggagttcgacgaggtgctcgtaggccaaggagccagacgagtgcgtgatctgttcaaggcagcaaaggcccgtgccccttgtgttatcttcattgacgaaatcgactcggtgggcgccaagcgaaccaactctgtgctgcatccttacgccaatcagaccatcaatcagctgctctccgagatggatggcttccatcagaacgctggcgtcattgttttgggagccaccaatcgtcgcgacgatttggatcaggctctgctgcgtcccggccgatttgatgtagaagtcatggtgtcgacgcccgatttcactggacgtaaggagatattgtctctgtatctgacgaagattttgcacgatgaaatagacttggacatgctggcgcgcggcacctctggttttactggagcggatctggaaaacatgattaaccaagcggcgttaagagctgccatcgatggagccgaaacggtcagcatgaagcatttggaaacggcacgagacaaagtacttatgggacccgagcgcaaggctcgtctaccggacgaggaggccaacaccataaccgcttaccacgagggcggccacgcgattgtggccttctacaccaaggagtcgcatccgctgcacaaggtgaccatcatgccccgcggaccctcccttggacacaccgcctacataccggagaaggagcgttaccatgtcacaaaggcacagctgctggccatgatggacaccatgatgggcggtcgtgctgctgaggaactggtcttcggcacggacaagattacgtcgggagccagcagtgatctcaagcaggcaacctcgatcgcgacgcatatggtcagggactggggcatgtcggacaaggtcggtcttcgcaccatcgaggcgtcaaagggtctgggcaccggtgacacccttggtcccaacaccattgaagccgtggacgcggagatcaagcgcatcctcagcgacagctacgagcgggcgaaggctatcctgcgaaaacacaccagggagcacaaagcgcttgcggaggcgcttctcaagtacgagactcttgacgccgacgacatcaaggcaatactgaatgaaagccagacgtagttcccccatcggtgtggtttgatggtgttcaaggatccaattggaaggccgggttggtctgccaccggacattcagctgaactgctaaatatttttagttacaatatacatatataaaaaaccggagaaaaaaaccaagcaagagcgagacgcagacggacagttaagaaataaaatgttacacat

SEQ ID NO: 6642 - protein, 736 aa, DROSOPHILA
MFSTTTHSVPYLYLGNFSRKPHYYSVNRTKLHGSAGAARLSKSTSTSSRSHDLVLDLRNLLSRSSASIQGMVERAARLNGILDRRLVDDVLAKVTSMLPSMRDVRVTLEESATQIGRVQLQNYQFEVSLTGAAGSVPTGANVKVIPTITPGLLRPLFSQQQLNQIRGFKTDRSIEAEQKRNPTMTSRLKNALANSPQRLDGDTPLQAEKLRRLLAKSEEHGFNKAESLKIAFAEGYLAAANSEDSPKSGKTMKYLKTIVVIVVFLGIFLSFFTTSNGSVFRIQLGNQVEVDPEEINVTFEDVKGCDEAKQELKEVVEFLKSPEKFSNLGGKLPKGVLLVGPPGTGKTLLARAVAGEAKVPFFHAAGPEFDEVLVGQGARRVRDLFKAAKARAPCVIFIDEIDSVGAKRTNSVLHPYANQTINQLLSEMDGFHQNAGVIVLGATNRRDDLDQALLRPGRFDVEVMVSTPDFTGRKEILSLYLTKILHDEIDLDMLARGTSGFTGADLENMINQAALRAAIDGAETVSMKHLETARDKVLMGPERKARLPDEEANTITAYHEGGHAIVAFYTKESHPLHKVTIMPRGPSLGHTAYIPEKERYHVTKAQLLAMMDTMMGGRAAEELVFGTDKITSGASSDLKQATSIATHMVRDWGMSDKVGLRTIEASKGLGTGDTLGPNTIEAVDAEIKRILSDSYERAKAILRKHTREHKALAEALLKYETLDADDIKAILNESQT

SEQ ID NO: 6643 - DNA, 5829 bp, DROSOPHILA
gcactcgatcacaatcaggtcgaaactggagttggcataggaagctgtaatgcataaacatcactgattttaatctgctgactcactggctagtcaaaaacagcacacacacaccgcaccgcacgcaacttacaaaacgaaaggcggtgcacattttccaaagccacatcgccgccagtggccgcctttagttgctccacgcgcttgtccaagtcggcgctgtccgtccatatgtatagggatttttgtagacccttaaagttctccattgtggatgtgtttctagaatatctcaaaagttcaagcaccgaacggaaccgatttttgatttcacaagttagatatggcaatgcaccgaaaatcgagcggtgatatcgattgtacctgcctatcggattgcaaatgatattcagtgattgtagatttttccactttacactgtgactgctaaaatatatgaataactaagtgtactccaccagattcgttttttaatgagttacagcttacattctgatacataattaacagcttttagttgcatattgtgtgtttctgccactaaacctatttaaacggttacatttaagcctaaagtcgcgaattatcttttaaattcacccatgtgtactttcccacggcccgttttaaaaatgcatggacagttagacaagaaggttggtagtttgtaccttgaattttaaatgtgggcgctcaaaatcgaagtgttcaatgaaaatcgatacctttcgcatcagttaaaagtatttatagatataagaaataatatctttaacagtgatgtgatgggaataaatatacaaatgtattcagaaactgcaaagttaaaacaaaatatattagctactccaaattggctataaaataaccaaatgcccactgccatccaaatccaaccaacagtgctgtgaagcgacaaacatatcgccggtaggcagcgactatcataaataagcgcctatcggactatcgatacaacatcaacatcctcagtcgcttttttagttgtagcatattataaatataactcgagcgctagttgcagccttaaacagaagccagccgccactaccgctagtcgctagtcaagatctgctcgaaacgctgaaatatgtgtgattagtcgtgaatcgcagctagccgcaaatccagcttgagctacaacaacaaagccaatccgcggttaagaggaagagagtgcgtgagagaaacgacagctgctctgcgtgtgtgtttgtgcagcaggataacaaaatagaaaacatacagcagcaacaacaacaacaaaaacagcaccagcgaacagtgtataaagtgccaaacgaatttgccaaatagccaaaaacgaaataatagaaaagatccaaacaaaattccaataagttcaatgcaaggagacatgtgcataaatgaagagctacagccaatttaatttaaacgccgccgccccgcccgccattgcctacgaaactacggttgtaaatcccaacggctcacccctcgatcctcaccagcagcagcaacaacagagccaggatatgccgcactttggactgcccggtccgcagccgccgtcgtcgcagcagcagcaacaacaattgcaagtgcaccaccaacagcagcagcagcagcaacaacaacaacaacaacagcagcatcaacaacaaatgcagatgtccttgctgccgggtccttaccggccacacatcgaggagaagaagctcacgcgggacgccatggagaagtacatgcgcgagcgcaacgacatggtcatcgttatcctgcacgccaaggtacgaaaggatttccacttttaagccggtattatcaggtgcttggtctggatttagtattcaagatattctaaaacatacaagggaactcctgagtcttaagtcttaattaaattatttgaagcttgaaatacattatttcaatattactaaaaatatattaacccaaactggagaaacgtaggatatcctaactttcatttaaattagaaacttggtcagttttgtacgtcgatttcctaaattattcgattttttagattaaatagattaaattcagattttctttctatttcaagtttaacgatgtatcctttctttgaaaattacttgtatgctttacaagatatttattttttttttataatttagttttaatctaatcggtcagtccgcaacgccaaaaccacacccactatttaaaggtgctagtgtttccattgtccactttaaagtgttacatttttgcggtttttggcgaacgcagacatgaaaatggaataaaattgtcgcggttgcttttagcggtggcgatcttcaagcgacgactgccgccaaatgggaatccttcacactcgactgcccgcaaattgagcaacgcgagcgcggtccagtccgcaatgaaaataattgaaattaattacagaaaattaacaaagctgcattgcttgcggttttgatatgattttccgataatctggacggcaatttgtactaattgaattttccctgcaccatcgtgcgcctctgtctgtctgtctgtgtgaattccaggtggcccaaaagtcctatggcaatgagaagcgattcttttgcccaccgccgtgcatttatctgttcggaagtggctggcgccggcggtacgaggagatgttgcagcagggcgagggcgaacagggagcacaactatgcgcgttcatcggtatcgggagcagtgaccaggatatgcagcagctggatctcaatggcaagcagtactgtgcggccaagacgctcttcatctcggactcggacaagcgaaaacactttatgctgtcggtgaagatgttttacggaaacggtcatgacattggcgtttttaactcgaaacggatcaaggttatatccaagccgtccaaaaagaaacagtcgctaaagaatgccgatctgtgcatagccagcggcaccaatgtagccctgttcaatcgcctgcgttcccagactgtctccacccgttaccttcacgtggagaacggacactttcatgcgtcgtcaacacaatggggagcttttacgatacacctgctggatgacaatgagtccgagtcggaggagtttcaggtgcgcgatggttacattcattacggagccacagtcaaactggtgtgctccgtaacgggcatggccctgccacgtctgatcatccggaaggtagacaagcagatggccctgctggaagccgacgatcccgtttctcagctgcacaaatgcgccttctacatgaaggatacggatcggatgtatctctgtttgtcgcaggagaaaatcatacagttccaggccacgccgtgccccaaggagccgaacaaggagatgatcaatgacggcgcctgctggaccatcatatccaccgacaaggctgagtaccagttctacgagggcatgggtcctgtggcgtaagtatagcttacttacaactcaatggattagttttcatttcgtgttttcttccagttctccagtcactccagtgccaatcgttaattcccttaatctcaatggcggcggggatgtggccatgctagagctgagtggcgacaactttacgccgcatctgcaggtgtggtttggcgatgtggaggcggaaaccatgtaccgctgcacagagacattgctatgcgtggtgccggagatttcacaatttcgaggcgaatggctttgggtaggttttccaatgtaaatctgtttaatacgcgctataaattttacttttaatggtccttgcaggtacgtcagcccacgcaggtgcccatttcgctggtgcgcaacgatggaataatttatgccaccggtctgaccttcacgtatacacctgaaccaggtcctcggccgcactgcaatacacaggccgaggatgtgatgcgagcgcgacagaacaataacaataataacatcactagcattagcaacaataataacagcaacaatgcgggatcgccggcagccggcggtggcttgcaacaacaacagcagcagcatcaggctctgccctccatctcagaagtgcaatggaatagtcatggtagcggcttatcctgagtgcaggattattgcatcgcacacatatgtatcctaagttatttatagtttttatcgaagaccttagtttgtagattgacaatttttctcatactaattttcaacccctcgtgacgtaaaccaaaatgtgtccccttctctctaaagtgaatcatactttacacatgtatctagtgctagttcggaaccaatagaattgtaaatgacacataaaactctgtacataactcgaaaagctcactgacatacatacatacatttgtatgtgcatgaatatacctttacacaaaacatgtaattctagttaaatatacaattgatgtaagtttatagacgatttttagatgcggttgaaatatttatgattttctttgctatgaatttccaaagatctaaatgaaaaaaaaaaatactgcgaaatgcatcggaaatttttattatacacaagccagtagccacgctacaaaaacattccatttccctctttagctttctaaaaagtcgaagacaaagtcaaaaagggaaaaatttgtttctgtacatacagttttgttgcatttttttattaactttggaaattcgtagcattaaaaatcccaataaaatattttgtaaaataaaatcgcaacaagacaaaacagcgatttatttaagtgtaagcgaaatgcctaacataaataaaaaaaagaaatcccaaatgatgacaaagaataatcaaatcatgtcagcttatgtttttggtttagcgtgattcttctggttcaccatttttcctgtggcctaaggtggagcgctggggaggattggttgccttaaattgctgtgggaatattacccagtatcgtgtgaatatttttaaacaaaacaagtgcagctcttcccacgatggtttgcctcaaccccctcggacgggccgactttaattatagtttggtctggaattgctgaacgcgaagctaagaagcaaatatacatagatatataacactattgtttccgttttggccaagttaaggagcagaatattctcacagcccaaaaagccgctgccgagctgctgtgagaatttttactgcctttgttgaatatttatgcattcgttgctgctgctgtctttacagatttacaaattaagattcgcagttttgaattaattatcgctcacttccgctcgacggaatcagaaggtgagcgctggccaagcatttaatctcatcttgcacttgggagacatatttcttatcagagtcagccaataggaacttggctgcaacccctaagattttactgcaccgggcgatgggaacgaaagacttaaacaacgaactttggttgcgtgaggaatcaaactactggcggccgcctgtgttcattatgatggaaaaaccaccaccaaaagttctggctctggcaattggaactgcaacctcttaaggtcgtcgccgtcttataagaagctgaatatgaaattagtttggaatttttaatgaacaattccttcacatttccccaggccctctttctccaccactgtttggataggcgagtgcgatgattgtggtcgtttttagaaagggggagacagcaatttctaaaagttctcaggactgctacacaacctcataccgtctactaaaaaagttcattatcttgaaaaatctaagtctacctgccgtcgtctttagtctttagcttgccgtgccgactgctgccgttt

SEQ ID NO: 6644 - DNA, 2932 bp, DROSOPHILA
atcaacatcctcagtcgcttttttagttgtagcatattataaatataactcgagcgctagttgcagccttaaacagaagccagccgccactaccgctagtcgctagtcaagatctgctcgaaacgctgaaatatgtgtgattagtcgtgaatcgcagctagccgcaaatccagcttgagctacaacaacaaagccaatccgcggttaagaggaagagagtgcgtgagagaaacgacagctgctctgcgtgtgtgtttgtgcagcaggataacaaaatagaaaacatacagcagcaacaacaacaacaaaaacagcaccagcgaacagtgtataaagtgccaaacgaatttgccaaatagccaaaaacgaaataatagaaaagatccaaacaaaattccaataagttcaatgcaaggagacatgtgcataaatgaagagctacagccaatttaatttaaacgccgccgccccgcccgccattgcctacgaaactacggttgtaaatcccaacggctcacccctcgatcctcaccagcagcagcaacaacagagccaggatatgccgcactttggactgcccggtccgcagccgccgtcgtcgcagcagcagcaacaacaattgcaagtgcaccaccaacagcagcagcagcagcaacaacaacaacaacaacagcagcatcaacaacaaatgcagatgtccttgctgccgggtccttaccggccacacatcgaggagaagaagctcacgcgggacgccatggagaagtacatgcgcgagcgcaacgacatggtcatcgttatcctgcacgccaaggtggcccaaaagtcctatggcaatgagaagcgattcttttgcccaccgccgtgcatttatctgttcggaagtggctggcgccggcggtacgaggagatgttgcagcagggcgagggcgaacagggagcacaactatgcgcgttcatcggtatcgggagcagtgaccaggatatgcagcagctggatctcaatggcaagcagtactgtgcggccaagacgctcttcatctcggactcggacaagcgaaaacactttatgctgtcggtgaagatgttttacggaaacggtcatgacattggcgtttttaactcgaaacggatcaaggttatatccaagccgtccaaaaagaaacagtcgctaaagaatgccgatctgtgcatagccagcggcaccaatgtagccctgttcaatcgcctgcgttcccagactgtctccacccgttaccttcacgtggagaacggacactttcatgcgtcgtcaacacaatggggagcttttacgatacacctgctggatgacaatgagtccgagtcggaggagtttcaggtgcgcgatggttacattcattacggagccacagtcaaactggtgtgctccgtaacgggcatggccctgccacgtctgatcatccggaaggtagacaagcagatggccctgctggaagccgacgatcccgtttctcagctgcacaaatgcgccttctacatgaaggatacggatcggatgtatctctgtttgtcgcaggagaaaatcatacagttccaggccacgccgtgccccaaggagccgaacaaggagatgatcaatgacggcgcctgctggaccatcatatccaccgacaaggctgagtaccagttctacgagggcatgggtcctgtggcttctccagtcactccagtgccaatcgttaattcccttaatctcaatggcggcggggatgtggccatgctagagctgagtggcgacaactttacgccgcatctgcaggtgtggtttggcgatgtggaggcggaaaccatgtaccgctgcacagagacattgctatgcgtggtgccggagatttcacaatttcgaggcgaatggctttgggtacgtcagcccacgcaggtgcccatttcgctggtgcgcaacgatggaataatttatgccaccggtctgaccttcacgtatacacctgaaccaggtcctcggccgcactgcaatacacaggccgaggatgtgatgcgagcgcgacagaacaataacaataataacatcactagcattagcaacaataataacagcaacaatgcgggatcgccggcagccggcggtggcttgcaacaacaacagcagcagcatcaggctctgccctccatctcagaagtgcaatggaatagtcatggtagcggcttatcctgagtgcaggattattgcatcgcacacatatgtatcctaagttatttatagtttttatcgaagaccttagtttgtagattgacaatttttctcatactaattttcaacccctcgtgacgtaaaccaaaatgtgtccccttctctctaaagtgaatcatactttacacatgtatctagtgctagttcggaaccaatagaattgtaaatgacacataaaactctgtacataactcgaaaagctcactgacatacatacatacatttgtatgtgcatgaatatacctttacacaaaacatgtaattctagttaaatatacaattgatgtaagtttatagacgatttttagatgcggttgaaatatttatgattttctttgctatgaatttccaaagatctaaatgaaaaaaaaaaatactgcgaaatgcatcggaaatttttattatacacaagccagtagccacgctacaaaaacattccatttccctctttagctttctaaaaagtcgaagacaaagtcaaaaagggaaaaatttgtttctgtacatacagttttgttgcatttttttattaactttggaaattcgtagcattaaaaatcccaataaaatattttgtaaaataaaatcgcaacaagacaaaacagcgatttatttaagtgtaagcgaaatgcctaacataaataaaaaaaagaaatcccaaatgatgacaaagaataatca

SEQ ID NO: 6645 - protein, 594 aa, DROSOPHILA
MKSYSQFNLNAAAPPAIAYETTVVNPNGSPLDPHQQQQQQSQDMPHFGLPGPQPPSSQQQQQQLQVHHQQQQQQQQQQQQQQHQQQMQMSLLPGPYRPHIEEKKLTRDAMEKYMRERNDMVIVILHAKVAQKSYGNEKRFFCPPPCIYLFGSGWRRRYEEMLQQGEGEQGAQLCAFIGIGSSDQDMQQLDLNGKQYCAAKTLFISDSDKRKHFMLSVKMFYGNGHDIGVFNSKRIKVISKPSKKKQSLKNADLCIASGTNVALFNRLRSQTVSTRYLHVENGHFHASSTQWGAFTIHLLDDNESESEEFQVRDGYIHYGATVKLVCSVTGMALPRLIIRKVDKQMALLEADDPVSQLHKCAFYMKDTDRMYLCLSQEKIIQFQATPCPKEPNKEMINDGACWTIISTDKAEYQFYEGMGPVASPVTPVPIVNSLNLNGGGDVAMLELSGDNFTPHLQVWFGDVEAETMYRCTETLLCVVPEISQFRGEWLWVRQPTQVPISLVRNDGIIYATGLTFTYTPEPGPRPHCNTQAEDVMRARQNNNNNNITSISNNNNSNNAGSPAAGGGLQQQQQQHQALPSISEVQWNSHGSGLS

SEQ ID NO: 6646 - DNA, 2843 bp, DROSOPHILA
tggcagcggatcgacggtggtgtacgccgtgcagcggatcgcggagcgcgtgtggaaggagggcgagctgacggacctcatctgcgtgccctcgtcctaccaggcgcgccatctgatactcgactacaaccttaacctgggcgatctggacaggaatcccaacatagacgtggccatcgacggggccgacgaggtcgatcgccatatggtgctgatcaagggcggcggcggctgcttgctgcaggagaaggtggtggcctcctgcgccaagcacttcatcgtggtggccgactacacaaagaactccatccgcctgggcgagcagtggtgccgcggcgtgcccatcgaggtggcgcccatggcgtacgtgcccatcaagctgcacatcgaggcgcttttcggcggcgaggcctcgttgcgtatggccaaggtgaaggcgggacccattgtcacggacaatggcaacttcctcctggactggaagttcatcgccaacagggagtacgactgggacgaggtcaaccgcgccatcaccctcatcccgggcgtcctggagacgggcctgttcgtgaacatggcccacaaatgctactacggcatggccaatggctcggtcaaggtccagaacaagtagttcttgggcggagttgggggagcgctttttgcatttatgtttcaccaagttgttccttaaattttaggtttgccatttgtaatggatttaaatacatattgagttcttagccgagaaaacgatgtgtcctaacttgaaagtttcagcaaacgaatcttattcagcttcttcattcaagtataacatcgaaatacgtccaaatcaccacaaaagggtatccattacactgaaatcagacccactaaatctcaattggttacagttccactacaataaagtggatgtcgaatgtcagttcacatgcgctttgtatacttttgtctcgattgcggctacaaaaataaataaacattaaacaagctagatctagaaggccttcttggtccgcccagggagcagggcctctttcagatactggaacagcgacagcaggccctgcttcttgttacgcgagaagtagttgctgaccacgtccggactgcgccggctctggtcgctgacggtggtgggcaggacactgtcattcgcactcagcgagacgaacagggcgaagggcacgatccacatgcagatggtaaagtaagccagcacctgaaagtgtaaatttcctttaggcgtttgctgcggcctaattcaagttgtatgtaaacaaactgatgatgtggatacacaatgcaatgcatattgcatataatggctgtataaaaacgtacatacgtttgtacgtagcgaatgcgctttccatgactaatgatttatgcaatacatatgctcacctgcgtgaaaggcacatagacagtgacgaaatgctggaaggccaggaagtgattgaccaccagcatggccagggagcccagcagcggcagcgagagcaggcgcacgaaggggaatccactcatgatgcccaggtggaagccctgcgccaccagtccgcagatgataaggctccacggcaggtcctcgaacagcagcagcaggatgtagacgaagatcgtgaagctgatcagaaataggatgcacttcctagccgccgtcgtgtactcctcggccagctccgccagataatagagaccagccactggaaatacaaattgcagacgttgcaattggacaagtgcggctgcacggcgacagctcaccaatcgacagggtgaggaacacgatctgtatggccagcgaaacccatcccagcaggtacaggacggccatcttgcgtacttcaggcggaatcgaaggatatatacggctcaaatcggccgacaaaacaaaacaatccgattagagtggcgtgtggtgtgtggctcgaaataccaaacatttaatcagcttgtatagaaacgggcacactaatgcgcagagctgccagatattctcgttccaacgctttttcaaatattttttgtgggaaacatgaggaatttaggattgaaatccatatgcaaactaactaatgtgagcagcagcatccatggaccatgacttaaaaatatctgcaaatgaagtaaaaatacattcataagtaaaacgagttcaattctttataaaatgtcggatatcaaaaccgaatatcttagaaagcaaccgtttcaaatttcatctgaagcaaacagtctagattctgcttttgatatcctgcaaattgtccagccttttcgaaaaatccgtaacttttcgtatgtgttccatactcgcacgtgcaaggatgttttgtgcaggaatagtgcagcgtagactgagcatgggtctcaatccaaagtgagtagcgcttgcacataactccttcccttaaacaccccatccgaaatccctgaagactcggcctggcgcccaggaagctctactccgaggagaagaagcccccgggtgttttcctttggggcggcggacttggcaagctgcagggcggtctcaaggaggaggagtacttcatttcgttgacccaaaccctcgtgggcaagatgcgggacaagaaggagcccggcgactacctgcccaactgggacgagttccagaagactctggaccacgcctcgctgggcagcacctcttccatgaacaagcacaagaacgtactcgaggaggcctttttcctgaacaaggttgctataagtctccagctcatttttcttctaatttccattgcaatatctttgctttcagactgcagacgacatcaaattattgcacgatcgtgcccaagaagagctca

SEQ ID NO: 6647 - DNA, 597 bp, DROSOPHILA
atggccgtcctgtacctgctgggatgggtttcgctggccatacagatcgtgttcctcaccctgtcgattgtggctggtctctattatctggcggagctggccgaggagtacacgacggcggctaggaagtgcatcctatttctgatcagcttcacgatcttcgtctacatcctgctgctgctgttcgaggacctgccgtggagccttatcatctgcggactggtggcgcagggcttccacctgggcatcatgagtggattccccttcgtgcgcctgctctcgctgccgctgctgggctccctggccatgctggtggtcaatcacttcctggccttccagcatttcgtcactgtctatgtgcctttcacgcaggtgctggcttactttaccatctgcatgtggatcgtgcccttcgccctgttcgtctcgctgagtgcgaatgacagtgtcctgcccaccaccgtcagcgaccagagccggcgcagtccggacgtggtcagcaactacttctcgcgtaacaagaagcagggcctgctgtcgctgttccagtatctgaaagaggccctgctccctgggcggaccaagaaggccttctag

SEQ ID NO: 6648 - protein, 198 aa, DROSOPHILA
MAVLYLLGWVSLAIQIVFLTLSIVAGLYYLAELAEEYTTAARKCILFLISFTIFVYILLLLFEDLPWSLIICGLVAQGFHLGIMSGFPFVRLLSLPLLGSLAMLVVNHFLAFQHFVTVYVPFTQVLAYFTICMWIVPFALFVSLSANDSVLPTTVSDQSRRSPDVVSNYFSRNKKQGLLSLFQYLKEALLPGRTKKAF

SEQ ID NO: 6649 - DNA, 3098 bp, DROSOPHILA
cacaagacacaccaacccagatatatcacgatgtggactgagaaagagtccgagcgaaatatgcctcatactcttacatactgattatgcttgcgtgttcaggcgctcttgtatagctaggatataatcaaaaggcgccccacgtagaacagattcccccatgtcatgcccacgaccacgaccacagccacacccacacctgcccatcccttccagcggacactgggtgaaaaataaccaacaagagacataactcaatcaagcaaaagatattatatacaagcccaaagcatactccttatacacagaactacagaagcatatagcatataactggcaaatcaaatacgagtaaggtgctcaggatggcatcccgttggtgatcagagatccgtgatcagtgattcgtagtcccggtcccctatacgtttagtgtacggtgtaaagagttcgttatgcgttcgatcagataatatgaaaatatacaatacactgaaattatataaataaacgtttttgcgatactttcgatctccgatatatccacataagtacgtattatgtatacctatgtataatcagcaatcgcgatattacaatattattgtaaaatatttcaatttacaagccagacaaaccaaaagcaaaattatatacatattattcatctgtatttattaacgataattgtaacgcgcttaggtttactcaacacaataaacagaacagaaccggaccggaccggacttaaaaaggatattacaataggtgcaccaacagacggactcggactgcagacaacatttgactcaaaacatgatgaaagaattgattatttattaattagttgaatgttatttaacttatatgcattattctaaagattactgaaatccaaatgtaattacaataaattaaattgcaaggttgaaattccggcatgttccctcgaatgcgattttgctagactaaaaaaaaaacgtacgtttgaaacggacgactagtacagtttctgcagatcgttgagcggctgattcaggaagtcgttggtccagtttttgtccggattatctagatggttgtcaaagtcaaccaaatcccgcatggctccgcgcttcagcagcagcgacacgccttccaatgtatcggacgcctgtgagagcgtaaacttggcctttgaccaccttgctccagagtctccgggacagttgaatacctggatggcggctcggtcgtgctgcagcgtcatcagtttgttgtccaccaccacaaagcaggcgttcttgaagttctcctggatcttgtcagctatcttggcggctggggtcttgtcgacctggttgtcgtagaagttctccggtgctgcgtagtagcctgcgattactaatccttcccgttcggcgtgggcatcgatctgaaagtgtaaggtaatgtattattatcgttattttataaaatgttttaatttaaacaatggtacaaccttatcggcttttaaatttaattcagtcttcacaacttcaatgctttaagactgctagtttaatttgggtaataaacttctaacagggtaaaagtggtgtgacactagtttttgaatttgatatgctaatattaaaataccatcgtggggtacaaggtacattttactaaataaagatcgcttggaacataaacctttctgttctaagcacaacactggataactatgcagccgcaataagttagaatagttatatatcttttggatagcggagtgtttggccagggtgcgaggatctagatacaaattgaagccataatagttccattatggggcgcaccacattgctgtccggacacaaatgcaccgagcccctcgtgatgtgagtttaggaagggcaattggtaattaccagcatgagggccacctccgccatgggggtgacatacaggcactggtggaaaagcggaatcgcatccacgatttccacttgggagcccttcgatgtcttctcggccagcaagagtccgttgaccgcctggtgtggatacttggccgcgtggaatatcaacttggcgtacgcccgctccgagaccttgtagtcgcacattttctcagaatattatctcaatttattcggcaaaaaataaaacatgaattggaaattcgacagctagaaagtgtgaccgcgacgcagctgttcaaatataccgcaaacgtcaaatatacaatgaaaaatactaaaatggatgagcatggaatggattccacaaaaaatgtgatcaaaactatatttgttaattatgtctttaacattgaaaatatatttataacttaagttctagaaaatggtttctaacataggttgcagtagtctggtcacatcgatatgggcgcgcaaacaatatgtggattccacttcaaattaatttattactcaaactaatatttaattctaacgtgaatgatggaaaacataactgaatatgtgtaacattttatttcttaactgtccgtctgcgtctcgctcttgcttggtttttttctccggttttttatatatgtatattgtaactaaaaatatttagcagttcagctgaatgtccggtggcagaccaacccggccttccaattggatccttgaacaccatcaaaccacaccgatgggggaactacgtctggctttcattcagtattgccttgatgtcgtcggcgtcaagagtctcgtacttgagaagcgcctccgcaagcgctttgtgctccctggtgtgttttcgcaggatagccttcgcccgctcgtagctgtcgctgaggatgcgcttgatctccgcgtccacggcttcaatggtgttgggaccaagggtgtcaccggtgcccagaccctttgacgcctcgatggtgcgaagaccgaccttgtccgacatgccccagtccctgaccatatgcgtcgcgatcgaggttgcctgcttgagatcactgctggctcccgacgtaatcttgtccgtgccgaagaccagttcctcagcagcacgaccgcccatcatggtgtccatcatggccagcagctgtgcctttgtgacatggtaacgctccttctccggtatgtaggcggtgt

SEQ ID NO: 6650 - DNA, 617 bp, DROSOPHILA
agaaaatgtgcgactacaaggtctcggagcgggcgtacgccaagttgatattccacgcggccaagtatccacaccaggcggtcaacggactcttgctggccgagaagacatcgaagggctcccaagtggaaatcgtggatgcgattccgcttttccaccagtgcctgtatgtcacccccatggcggaggtggccctcatgctgatcgatgcccacgccgaacgggaaggattagtaatcgcaggctactacgcagcaccggagaacttctacgacaaccaggtcgacaagaccccagccgccaagatagctgacaagatccaggagaacttcaagaacgcctgctttgtggtggtggacaacaaactgatgacgctgcagcacgaccgagccgccatccaggtattcaactgtcccggagactctggagcaaggtggtcaaaggccaagtttacgctctcacaggcgtccgatacattggaaggcgtgtcgctgctgctgaagcgcggagccatgcgggatttggttgactttgacaaccatctagataatccggacaaaaactggaccaacgacttcctgaatcagccgctcaacgatctgcagaaactgtactag

SEQ ID NO: 6651 - protein, 203 aa, DROSOPHILA
MCDYKVSERAYAKLIFHAAKYPHQAVNGLLLAEKTSKGSQVEIVDAIPLFHQCLYVTPMAEVALMLIDAHAEREGLVIAGYYAAPENFYDNQVDKTPAAKIADKIQENFKNACFVVVDNKLMTLQHDRAAIQVFNCPGDSGARWSKAKFTLSQASDTLEGVSLLLKRGAMRDLVDFDNHLDNPDKNWTNDFLNQPLNDLQKLY

SEQ ID NO: 6652 - DNA, 14607 bp, DROSOPHILA
cggtggcttgtcaagaaatgccttcccatggctaatacaattcccaactggaagtagtttgggtttcagaagtcaacagtgttaccgtattttaatgtacatctggcttttaagcgagtacacacacatagcattgcgatgttttttaaacttgcactgcttgcaagcagggctccactgtatttcaatgaaagaacagcgtgttgggcgtttttgaattatactaattaccttcaataacaattccctatatatcacttagttttaataaataaatcgtttgagtgtggtctagagatgatgtattatgatgaagtgcggttgttggggacaagcgggatacgtctgcgggtcaaatcggcggtgggacatagtgagagggcaacggctccaaaaccaagcgttgcgaacaatcaccaacgcgccctggtacgcgagaaatgttgatatcgcacatgacctcagcatccaccttcagtttgagaacaaattaaatcaggcacataccagacaaccaggagaacactgaggaggcgtcatcaaagatatctttggacacgtggcataaacaagccaaactattatctaatcaatatttttatacaaattttgtatgtttccatgttatcttcgttgctcctgttagttactacgtttcatagcccttaaattggttgcttaacgtaaaataaaattatattgtataaaaataaagaggaattcacctataacaaacgaaaaagtaaataaataagaacttccccatgttaaaaatgccaccaccatctttacatataagtatgtacatatgaatgaatcacttaggttgcttgaatattacaatttcattaatagctaaatcacatttgatgtgttagtggaaaacggctatatatataaattatcgaaattgtgaatatcgaattgcgatagcacaatgggaaattccaccactagatttttggtacttttaacagatccttttcggttttgcgttgcgcgaagtgatctgaacttatcaaagtttgtaaggtaatacataaagtgaaaaagaattaatttgctcttgaaaggcagggtaagtagcaagagactatcttagtgatatgcaattagttttgaatcggatttaattttgcaacattaaaaataagctcattaaaacttgtctaaattgactcgacaagtttttcattttccaatttttaaatccgcaaaattaaaaccatttgaaaacgtattacatatattattccccttatcatttttaattcttctattgtaaaaactatcccatttaaatattaatgttacacccattttcgttttacaattttcgaatacttaagctcattttgacttcattcttccattttcggttatgtttcagcgttgtcgaagcccctttttgtacttctaacggatttttctcatattgttacacccattttcgttttacaattttcgaatacttacttttattaagctccttttgacttcattcgttcattttcggttatgtttcagagttgtcgaagcacctttttgtacttattacggatttttctccttatttgactgtagcaattagagagcttggcaaccctagaacatgaattcctaatttggtttcctctttgcgttctattctaacaggatcttgaaaggtctaatataaaaaaaagattttgcgtgtaaagttgattcatttttttaaaaagaaaataagttgaaagtaaaaattgtcccattttctggttattggcatcgtatctttctttcgtgtgcgtttcttgatttacgctttgaaatgttgtcctattcggctttctcattctgggttatgtccaatttttttttttttgcttttccgcatatttgttggcttttctgttctgtctattctatctttcgccttgtgtttgtgtgcaactttgttttatgtgtttgccaatttgtaacacttgcattccatctaaaaacttaccgttaaaagtataagaacaagcacaacaaagaattcattcattgtaggttttcgtgaataaaattgagaatactgcattagatttgtttaggtttcgtttcattccgtaattctttccgtctccacttaccattcgctttatgatcttttgtaactcctcgaattacatcttgctctttcatgaactttttcattcttttttgccccaaaattttcaaacttacatcaagtgtttttttggttctttatttttatcaaataaatgttcttgttttatgtttaaacgagttgctcaacatttgttgaatggtttctttgggtcaaaatacaatacaatatttcaaaaaatgtcgtatattttttcatctacgttttcctccatattcatttgctctatcatttctttgctttgtgtgtttgtttcgccgtcataaaattgattttaccatgtatgtacgaatatatatctcatataatttacatagtttctagttaattgtaggcaaacgattttacagggatcttcaaattagcgttttcgggagtggttctctcatatgactcgaaatggatatttttgaaagtttccctccaactataatctacttattaaaggtttctaatttgctccaatagttaatcaatattttttgtttttatttctttaataatgcttaaattaatattgttttgtttttgtatttccgtgtgtgtgtgtaagttcagttaggtatttataattaaaagtagtatatatgatgcatagtcctctgtttaattattaaatttaaatgtttaatcatagaatttgcatccaagaaacacagttacaaaggttttaacacttactattctttcggttttgggtttctttcacgatccactgatttttatatttctcccttttgtttttctttattttaaataaacgttaacatagtaaaaataataaagcgtacatttcgctacgaaaagttgattcgtaattgaacaaaaaaatttatgagtaatgaaaatgcttttactgttctctcgatgaaaacaaactattgtaatagtgtatttttcttctttacaaagaagaatttatcaggccgtgatgttgaatattatatattttatctttagtttattttattcgccttgatcactggttagcgactgtaatttgtttttataaggtaggatgattttttgattaggtgagtggtaataacataaaaataaacaacttcacatcaggttttggttgatgcaataaaacaatttccatgaccgcccctgccgttttagaaaaaatctcgaaacaaatctcgtattgtgaacagctactagatataaagtccataatgaggataacttagcctgacactgactagtttacacgaggtcacttgcttgatcgcgattttatcgtgtaaaatctgatttagttggccacgtataaactaaaattgcttttcgtgtgttctcttttcatatatctttaaacatatgtataatttattatccgtttttttttacttagcttgttggttggtatttttgttgcttttggcttataatggcggctacaattgttttcgtaatttccccatttttcttttagtttttaaaaagtttgttgtctgtgatatacgtaatttataagttttcattttggtaacttgctgctttcattcaccatcgtcagtaaccaaaactgcaatttgaggaacctactcctgcccaaaacgatcgatttaagccagagtgggaaactgacgctcatcgttgaccttgggagcggtgttctgttgtcgctcaaaacgcttattcggccctggaccgctgttctgattgttgttctggttgtttcccggaccgcgacgatcgatgggtggcctttgattttgagcggatgaaccgccgccctcgttattatgctgctggccatcccgtgggccacggtttccaccctcacgattatctcggccgccctcacgattgccgccatcgcggttgccaccctcgctgcgtggtccgcctccaaatccaccgggtctggggcctccacggccaccgcgtccaccgaaaccgccaggtccgccacgacgaccatcgttgaaattgaactgaatgtccaggacgcgctgttgcctgcccacacgctgtggataaagggcagggtcgtactcgagctcctcttcgctgtcgttctccttcttcttgttgctagttaggacgaccattttcttccattgtgtggtgtcctcacctgcgggaaatattgattgtagattaatttctagatgataggccatcatttagagttaagctaagatcggtttgattttcaattttatacttcttttatacggattttagctcaatatgatttgtaactttggttgttggcttggcgaaaaggtttcttagaataacggaagttaaactatcattccgtggtatcgaattcaaattattaaccataaaaaaattatgcattgttcacgcaccttctccagccttgcggatattaaaggttggcttgatgcgctgtccttgctgtgccttccactcgtccaaggtcagctctttggcttcctcctcggcggtagcctgctcgttttgtggttcagtgccagattcatcggccttggcgccgccctcggcattggtcacattggtttcgctttcgttcttgttcacatcatcaatagcctccttgaccgatccccagttgtgggagccagctccatcgcgtttgtcaattgacttcacacctgtgcataaagaaagtatcaaatattaataatgatttatgtctgcttaaattcagaaacgtcaagaagcggaaaatctgagcttctatatttgcaaattttagccacagctatagtgcaacttgcctgcaagccctaaagtaagtttttctgcttaatttattaactgaatactttaattattagccaaataatggtctattttatcaataccccactaattaggtcaattgagaagtaaccacgatagggggactatattcactgccctcgctcgcatagtcacagataagccgacagtagcagccccagttcactgtaatcagattcagtgggggaactattccaacccctgtttccccccaatgattatgcctgcaaaggcctcctacaagcacttgcgttagacgggaatgccgccaagaagatgggcgaactatttttaacacattttctctttcgatttgtgccgcagtgcttcttgtttctgttgctgccggccgctgtgatattataattttggatattccaaaaacgaagcggtcggtctaagcaggcagtggaaaacgggggaaaacgcggcgaaatagatttcattcaatggaaagaagtgtgatgtagcttgttgaatgttctgtccgaccattagtattgatttgactcacttatcccccacgtgagtgggagatttgcctgtgttgtttgaccattgcccataagttcatcgggattttgtgtgccacaaattggtttacaccgttctcccgcacttttcgtgaaattgcttggcataaacaatatatatttaaactgatttataatgcaactgtttaaatattactatccattaaataagattggcaatctgctcggagcaggctaataaatattttatactttgaaatacattaaattcatgatttagattagctatagaaatcttaaatcaattgatggaaatttcacatagtttattaaaaggaatcgcatttcaaacaccgaacgaattccagtttcttttaaatatttgttgtgtacacagaagattggaatcatgttgcttgaaggcgactaataatttctcatgactataaacatggtaattggttacgcgtaaactgtggatggaatttgtttttcctgcgttgcctgctgagttttattttctggttgtcatggagtgtggcttttggtttatttgttaattttttcgtatgggcgcgctcgttttatggttatgtctaccccttggtggttcaactttagtttcgatcttatcaacagaaacattaactattcatatgcgaaaaaatggtcattaatctaaacgatttactccctaaatatcccatcttctctatcctttttactaagtatacttctctgtaaagactttaatgtgatctacactgtatctacttgacttgacccctaacccatttggtaccttaatgccttaatgaaatgaccacacactcaccagttctatcggaacccgactggcggtcgaactcgcgcttcctgttctggccatcgtagttgcggttctgacgctggggacgatctccgccagcacctgggcctccacctggtccgcggtaaggtcgcgactgctggccatcgggtgctccgacgttttcgcggacattgcggcgattgttgcgctgctcacgagtctcggcattgccattctgttgacggaagtttacgctgcgctgctgctggccaccttgtccttgaccctgtccttgaccgctaccaaattcacgtgttcggttggcgccacctccttgccgtggagcaccctgttgtttgtaattgctgctggcgttattattgaactgctgctgtttgttgtcggccgatggagtgaacttcttgccatcggttttgtttaacgcattattgggcttgttctccttttcggcctgatttggtttcttggcattgggtccaccaatattggatcctgcgttcgccttgttattgctgttggccaccttgttggcggtcgttttggtggccgctgcagcagcagctgacggttgcttcttcttgccagctgctgctgcggcagcagcggccgtcggcgccacaagattatctaatggatcgctgacatcgtcgtccatgaacaaaagttcataacgatttttaccggcgctgtccatgattttgtgggtgggtgtgtttttcgttgctagctggctgccgctttaattgcctttttgctctgtaaaaagaaataaatacacacagttttagtgggaattgattgattttcctttttcgcccgccgcctctcacaccctgtgagattcgataggatttctttttcgtgtcacaaactatggtctaatatggcatatattcgctggatttatggtttacgacattaacacgtggactaacgtgaatttactcaatttatttaggccctttgggtggatttttcttacttttctgctggctgtttggtggctgctgctctctaaccttaattttcagtgtttcttcttcgcctcgctgctagtattacctacacacactgcctcacgcgattccacacgcacatgggccaaatcacgcacaccacagtcagcacgaacagagcgcccacatgtgttcttggtatacatagaaaaacagaaactcacgtttttcaacgcgtttcgcggcgaatgtcgcaaatcgattcgaatggcagctgtgtttagcgggctctcgatttggcgggcactttttagtttgaagtgcaagccaatttcattagttggagaatatgtgaaaaattgagcaaattatataaattggtacaaaatgttggagcatatattataagaattcataattcaatactttagaaatgaacgtattaagttattgcttttatacttatatagaattaatttttttttctttcagccaaattaaaaaaaaaatatcaatatgtctgacgactgggatgatgaggttcgtattgcttcgtacaaagaatatatgcttactaagcctatctattttagcccattgttgatactcgcggcgcccgcggtggagattggagcgatgatgaggacacggccaagagcttcagcggcgaagctgaaggcgatggtgttggagggagcggtggtgaaggcggcggctaccaaggaggaaatcgagatgtgttcggaaggatcggcggaggcagaggaggaggagctggaggttatcgaggaggaaatcgagatggagggggcttccacggtggacgtcgcgagggagaaagggacttccgcggtggagaaggcggcttccgcggtggacaaggcggctcccgcggtggacaaggcggctcccgcgggggacaaggcggcttccgtggtggagaaggcggcttccgcggtcggctgtacgaaaacgaggatggtgagtaaaccttttggacgacatgttaaattttgggttatggtcatttgagtcattcctgctgaattccatgtggtgtgctttgttttgtcaagtagtttgttttcttttgttttgtgtatgcatatttgcccaattggtggcaaattggccaacattctagctaaggaactgccgccgatcccatctagctgcgataaggatgaggtgggcgcattcatcgatcagctggacttgagcaagtacacgaccagcctagcactgattcgaaaattgcgtgactacttgctgactgcatttaaggctttggtgaaccaagcatgggcttctctcgagaaattagctcaagaaaagcgtgcacaaaaggcacatcagatacgcgaaacaacagatatgatgaatcgccttatggaggacatgggccgattgattcgtgaaggtgaacatgaggaagcaaatgggattgggatgggatttcaaagcattgatgcggattgcagagctgatttgtcgcaatggaggaatttacagcaagttgtgatgccgcaatcttcggagatcagagatggacaaacaaacaggacaagcggtactgagggcggtcgatcaggaggtttaaccgatggcgatgacttaaccgaaatacaaagcgccgcatacgccgtgtatcatcaggttttggatcgaggttaccaaacgggtcgacggctgtatgatgataatcaaggagcattgagagaagattctattccaacagaagaccgagaacacccagaaaataatcaagtggatggatcaacatatggagtgactagatttctgcactggctaagtgagaactttgtcactcggcatgaaataagggccgtacgttttggcagtccgcatatggtttttcaatcttatgactggccagagtctccaaagcagcacatttcgacggtccatcaaaaaggcatattttattctcagcccttaattaggacacgcataatagccactgttgcgagcgagccaaacaattcgagtagtggtcagctcagcagtatggtaaacttggcacgacatcagcggtcgcaaaatcaggaaacgccagatggaatttacgttagtcgctacaatgcaactggagatgaggagactccctgctccgcaaccggagtccccggcagagttgtggctctgcgtgcttcgagcaccccaaatgaacataggagcgatccagggtacttaaaccaactctaactagtctagtctagcgcttttctttcttaccatctatggatactttttattccctttttccaatgagcggttgtgtagaaaagagcagatttcaaacatttaaagattacataaaagaaaaaaaaaaacaccaaatttagccagacaccgaaacaatttataggaaatttgattagagaagtaccttaatgcagtataaattcagcttacttttctatatgtacatattttccatctcttcgcttactttcgtttccttctctataacttaaatgaacacataagctaagtaatgtccgtttcacagcttgtcttttatacccaatttgacttacgaagatgggaccataccatcattggcagcaggcggcgctgcatcgacaccgttggctccatcactgccagcagagcattcattggggttagaaatggatagcaacactttggtggtaccagctgatgcggatgaaacccgcttagtcggacatccaggatcaacagtggttcgttctcggcttggaggccctccagcatcaacacctttactatcattccgacctagactgccggtcattgacgaagagcatcatctacgctttaccagggtgtcacgcgagctgcaaatgagtgttgctttcccgccggaagagacaacactaagcgagcaacgtgagtggggctcgattttccgaccacgtgatgaaatggttaactatgccgaaggtccacctcctcgccaaacacaaagggcgcgtcgtcgctcgcgtacacgcagacgacgtaatcgtatcgcttcagctgccagcccgcaactaacaccggaacgaattgtccgtcgcgaggaagccttccaaagcagccgacatattgcagccacttttatgtccagcttgctacaaaatgcagctggagaagtgacgacgtcttcaggtctggcagtaacccgttcagtgaaagaaataacgacatcagtccatatcacccgaaatgtactacaagaggaggtaccaccgaccacagaagcaacgacgacctccctagaagttgcacaggcaacagggtattcggattctggggcttgtatgcaatctgcagcgttctctcaagatcttcctgtagtagctcccttggagatatctggaaatgcatcaagtgaccaagcatcatttgatcaagctttggccttactgcctcccataaattccactccaataggtcagcatccaattgctgttttcggacctaaaaccgaaattgaaattaaaccccaaaaaatggacatctctaatatgatgaatacatcggttccaccaatgccaatggaagtcgacgaagttccactggaggtatcaaacactttggccaatatgagcgatcacgcttatgtgactgatatacagatactaccgtcgttgcaactcaattctttgaatcttgttagcaccaatattacagacaatgcagtaaatatcgccccatcgacatcaacaaatgatttgcaaacgccaagtgaccgcagaacatcaatgcaaaatcaactatatcgagtgtccatgaacgatttggcatatatttcacaacacgctaatgtggttcgtctgatggtagatcgtcaagaggaactaggggcacaggtcagctccctggggccttttaaggaaaatagccaaggcgcgctaaattttagtacaatgcccgctgtcaaagtctacgatccacgtataattcagaacattcagaaggataagatgagagtagttcatgggctcttcggtgctcttatcagacagtcccaggttgatatgcacaatgcaccattcatccgaaatcgcaaggatgcgttgatggcatatcgctttttactcgagcttaagactgcaaatattataagtcttagctcggatggtagatttttcgggctgctctaatcaaataaaaagcattttaattttaaaaatacaaaaaaaatttaatattagtttgcttaaataatttaataaagttgaacgtggtattagaatcatcgccatttcttattattcgttgacattaaattgttatattgtccgtgattagctaataaattggtacagaaacagtattaaaataaaatacacaatttaaaaatgaattttagttttggttatgaatttttatgaactgtatttcgtctgcttaaatttaagtgaataaaattgttatgaaaatcaaatattttctaggtgatgaacgtcgtggaagactagatcgggaggaacgcggcggtgaacgtcgtggaagactagatcgggaggaacgcggcggtgaacgtggtgaaagaggggacggtggttttgcgaggcgccgtcgaaatgaagatgatataaataataataataatatcgtcgaagatgtcgaaaggaagcgagagttttatattcctcccgagccgtccaacgatgcaattgagatattcagcagtggcatagcttccgggattcatttttcgaaatacaacaacataccggttaaggtaacaaaatgcaatttatattaaaagatcttcaatcggtataaatcatatttctttaggtgaccggcagcgatgttccacaacctatacaacattttacgagcgctgatttgagagatattattatagacaatgtaaacaaatctggatacaaaataccgacaccaattcaaaagtgttccataccagtaatatcctctggtcgagacctaatggcgtgtgcccagacgggttctggaaaaacggcagcttttttgttgcccattttgagcaagttgttggaggatccccatgaactggagcttggaagaccccaggtagtgattgtatccccaacaagggagctggcaattcagatctttaacgaggcgaggaagtttgctttcgagtcatatctaaagatcggtattgtttacggaggcacctcgttcagacatcaaaacgagtgcattaccagaggctgccatgtagtgatcgccactccgggacgacttctggatttcgtggatcggacctttatcacgtttgaagacactcgattcgttgtgctggatgaggccgatcgcatgctagatatgggtttctcagaagacatgcgaagaatcatgacgcatgtaactatgcgtccagaacatcagacattgatgttttccgccacgtttccagaagaaatccaaagaatggccggcgaattccttaaaaattacgttttcgtcgccattggcattgtaggcggagcttgctctgatgtgaagcagaccatatacgaagttaataagtacgccaagcgatccaagctaatagtaagtggtcctacaaattaaagcccaacaccaatttgttatattctattctctttaggaaatcctttccgagcaagcagatggcaccattgtgtttgtggagacaaagcgtggcgccgactttttagcttccttcctgtcagaaaaggagtttccgacgacctccattcatggcgatcgtctccagagtcaacgcgagcaggccttgcgtgatttcaagaacggctctatgaaggttctcatagccacttcagtggcttctcgtggattaggtaagttaggacgctcacactttcctgaatcaaatttcattaagttcttttttcatcttgctagacattaaaaacatcaagcatgtgatcaactatgacatgcccagcaagatcgatgactacgtacatcgcattggacgtacaggtcgtgtaggcaataatggacgagccacaagcttctttgaccctgaaaaggatcgagctattgctgcggacttggtaaaaatcttggagggatctggccagactgttccggactttctacgcacctgtggtgccggcggtgatgggggttactccaatcaaaatttcggtggggtggatgtgcgtggcagggtgagtaaactggaaaaacttcttttgttttgcacttccagcttactgaatttttgatttttcttatacagggaaattacgtcggcgatgccaccaatgtcgaggaagaagagcaatgggattgaaatgtatggacatagatttcaaataattaaatgtaatgcagtaattgatgtaattagttaaataagttagatattaataacatattaattatatgtattataacgcatataataataaaatgcatatttaggatatgcaagccattcgaattttctattttaatttccttttacaaagaaatgtataacaaaatataatttgaaaaaatgttctggctctaattcgatttcttttaagtattttgtgaactgcttttaataacgagcggttgcaaaacttaacagaaacgtgcactttgatcccaactaataccgtgtactatcatgtgtttggttttaagtactcatccttcgtgtttcgttgtttgttgtttgccttgctgtacacttggctcttgcgctctctcgctctccgttggagccggctttttgaatgcatgcctcgccctgctcgcgcccagtcctcctcccccgaaaagcatgccgaccagcaaatgttgcccttttgcgtttgctgtctttgcagaagcaaaatcaataactgagaaatccaccacactgctgctcttcgtgttgaattctcaacttccgcagcaaagtgaaagacatttcagtctctgacggcatttcgtagcgcgcaaacactttcttcgcgtcgcgctccccatgacatatttccaaataaaaggaaaaagctgtgaaagtaatagtggttaattgtttttaagtaaaacgaatttctattgtgattaaagcgcttggttccgttgcgtacgatagtgtttttcgttaagtgacaaataaaatcgtgctcttgttaatctaaaaattgtttaacctaaatgcgcaaagcgattatgaaataagaaagacatttgaattttgtctttgttttcacaagggtttttcgattcactccttttcacgcaacttgtctgcgaaaccgccttagtagtttcgctttccgaaacgcatttaggatcggtcttggggttgtgcgtaatgtctgaacccaccccattttactcggcaatgctccagcaccgaccaacccacttttactagccaccacatacagcagcagtggcagcaacaacagcgtccttttagccggcaaagtcttgggattctttcttttttttttttgc

SEQ ID NO: 6653 - DNA, 2236 bp, DROSOPHILA
cgaagtgatctgaacttatcaaagtttgtaaggtaatacataaagtgaaaaagaattaatttgctcttgaaaggcaggccaaattaaaaaaaaaatatcaatatgtctgacgactgggatgatgagcccattgttgatactcgcggcgcccgcggtggagattggagcgatgatgaggacacggccaagagcttcagcggcgaagctgaaggcgatggtgttggagggagcggtggtgaaggcggcggctaccaaggaggaaatcgagatgtgttcggaaggatcggcggaggcagaggaggaggagctggaggttatcgaggaggaaatcgagatggagggggcttccacggtggacgtcgcgagggagaaagggacttccgcggtggagaaggcggcttccgcggtggacaaggcggctcccgcggtggacaaggcggctcccgcgggggacaaggcggcttccgtggtggagaaggcggcttccgcggtcggctgtacgaaaacgaggatggtgatgaacgtcgtggaagactagatcgggaggaacgcggcggtgaacgtcgtggaagactagatcgggaggaacgcggcggtgaacgtggtgaaagaggggacggtggttttgcgaggcgccgtcgaaatgaagatgatataaataataataataatatcgtcgaagatgtcgaaaggaagcgagagttttatattcctcccgagccgtccaacgatgcaattgagatattcagcagtggcatagcttccgggattcatttttcgaaatacaacaacataccggttaaggtgaccggcagcgatgttccacaacctatacaacattttacgagcgctgatttgagagatattattatagacaatgtaaacaaatctggatacaaaataccgacaccaattcaaaagtgttccataccagtaatatcctctggtcgagacctaatggcgtgtgcccagacgggttctggaaaaacggcagcttttttgttgcccattttgagcaagttgttggaggatccccatgaactggagcttggaagaccccaggtagtgattgtatccccaacaagggagctggcaattcagatctttaacgaggcgaggaagtttgctttcgagtcatatctaaagatcggtattgtttacggaggcacctcgttcagacatcaaaacgagtgcattaccagaggctgccatgtagtgatcgccactccgggacgacttctggatttcgtggatcggacctttatcacgtttgaagacactcgattcgttgtgctggatgaggccgatcgcatgctagatatgggtttctcagaagacatgcgaagaatcatgacgcatgtaactatgcgtccagaacatcagacattgatgttttccgccacgtttccagaagaaatccaaagaatggccggcgaattccttaaaaattacgttttcgtcgccattggcattgtaggcggagcttgctctgatgtgaagcagaccatatacgaagttaataagtacgccaagcgatccaagctaatagaaatcctttccgagcaagcagatggcaccattgtgtttgtggagacaaagcgtggcgccgactttttagcttccttcctgtcagaaaaggagtttccgacgacctccattcatggcgatcgtctccagagtcaacgcgagcaggccttgcgtgatttcaagaacggctctatgaaggttctcatagccacttcagtggcttctcgtggattagacattaaaaacatcaagcatgtgatcaactatgacatgcccagcaagatcgatgactacgtacatcgcattggacgtacaggtcgtgtaggcaataatggacgagccacaagcttctttgaccctgaaaaggatcgagctattgctgcggacttggtaaaaatcttggagggatctggccagactgttccggactttctacgcacctgtggtgccggcggtgatgggggttactccaatcaaaatttcggtggggtggatgtgcgtggcaggggaaattacgtcggcgatgccaccaatgtcgaggaagaagagcaatgggattgaaatgtatggacatagatttcaaataattaaatgtaatgcagtaattgatgtaattagttaaataagttagatattaataacatattaattatatgtattataacgcatataataataaaatgcatatttaggatatgcaagccattcg

SEQ ID NO: 6654 - protein, 661 aa, DROSOPHILA
MSDDWDDEPIVDTRGARGGDWSDDEDTAKSFSGEAEGDGVGGSGGEGGGYQGGNRDVFGRIGGGRGGGAGGYRGGNRDGGGFHGGRREGERDFRGGEGGFRGGQGGSRGGQGGSRGGQGGFRGGEGGFRGRLYENEDGDERRGRLDREERGGERRGRLDREERGGERGERGDGGFARRRRNEDDINNNNNIVEDVERKREFYIPPEPSNDAIEIFSSGIASGIHFSKYNNIPVKVTGSDVPQPIQHFTSADLRDIIIDNVNKSGYKIPTPIQKCSIPVISSGRDLMACAQTGSGKTAAFLLPILSKLLEDPHELELGRPQVVIVSPTRELAIQIFNEARKFAFESYLKIGIVYGGTSFRHQNECITRGCHVVIATPGRLLDFVDRTFITFEDTRFVVLDEADRMLDMGFSEDMRRIMTHVTMRPEHQTLMFSATFPEEIQRMAGEFLKNYVFVAIGIVGGACSDVKQTIYEVNKYAKRSKLIEILSEQADGTIVFVETKRGADFLASFLSEKEFPTTSIHGDRLQSQREQALRDFKNGSMKVLIATSVASRGLDIKNIKHVINYDMPSKIDDYVHRIGRTGRVGNNGRATSFFDPEKDRAIAADLVKILEGSGQTVPDFLRTCGAGGDGGYSNQNFGGVDVRGRGNYVGDATNVEEEEQWD

SEQ ID NO: 6655 - DNA, 3707 bp, DROSOPHILA
gctcatcgtctccaaacgttcgagccgcgctcgctcgtagacatcggagaactccttggaaaggaagagcacctgatcttcggtctgggagccaaaacagttgtcgtcggagtcatctttgtgcagctccgacatgtgttcctccattaggaagcggttcgtgttgtacggaacgagcaaggagcgcgaacgaaccagcttggttctgctattctgtcgttgattcccctccagcgttgctcctgcacccgttgacatatcgagtttccactgcggataatggttcttggtcttcttgggctgcatcttggatttttttccccgccgatgtttcctcttcggcattcccgagccgcctcctacagcgacaccgcctccgccactggcgccccctcctccgccgctatccaaaggtcgttgttgggagccactttctggaaagagcaagaggaccaaattcaaatttgaaccgccaaaatactcgaaaatgcaactctgcccactgcaggggcaaaggaaagaaaaaaacaatccaataagacagtcgccatttgtcgcttgcctttttcagcgctccccgagtgacgatttttaccattttttacagcttcagccatgttgccaacacaaatacttaatttattaagcacttaattaacactttaagctataactggagatttgttgccgatttgtaggtttgcgatttttatactaagcgaactaaaactcgattgaagtgtaaccaggtgctgacgccggagtcccacataaagttctccgcctaacgcgaccaaaaataccccaattgctatcacattgaataatattaggcgccaatttcaaaataaataagaaaatctccatattttaaagacaatctttctactttgttacccacaaggtaagttattgaaatattgtttctgaatcaaaagatttagttattattttagtttgttttactgaacattttgttgtaccaagtatttacttcaatctatgctttgagactgtcgtgaatccaatcgatgtaggacgccaccctggtgtagacatccggccagtcgggattggggcagggaacgggtccgaacgacaccagtccaccgagcagatagccatcgttcttgaacagcatcagtggtccaccagcgttgccgtagcactcctgggaattggtcaggccacagagcttcgaggcttggatgcgcaactgctggctggcgtacttcctttgacactcctcaatcgaactaatggtcacataaccttttcgcatcctttgcgaggaactagcctgccatccggccacctcggtgaccaggtcctccagctcgtccgctcgcagctgcttgttgggcaggcaaatgggttgcacaaagtcgttgagcttggcaggacttgccagtcggacgagggcaatgtcgttgatctgcgtcctgtcggtgcgattgtagagcggatgtggaagcaactcctcgatggctatgtcctggtagggaggcgcgcaatccgccactttactatcctcatggtactgacagtcgggattcgtgctagtgtcccattcacccaaccggacagcagtaatctgcagattgctagtcgccgcctgggccacacaatgggcagcagttagcacataccgatcactgataagcacaccgccacacgcatggatcttctcctggttgcctgcggagtaaaaaaggtggggattaatactgtgacctacatatacatatattaccaaaaccggcaactcaccgcgcgtatactcaatgagggccagccagggaaactcccggattcgcgtatctgtgtcattcgaacgctgccaacgaacctttccgcaatccgagggcaaaagtgggtgggtcagggcacccaagccggcggtactaggacagcatacctagaaaaacagtggctttatcattatattataaagtatatctcttttacgaggaactcccaaaagcgtactcgaataacgagtttttttttatgatacagtttgaggtcacttatttttacaaaaagtttccttaacattaacaatggaagtaattaaaatatttaaaaggagaatgatatctcatttgaaaccattcgtattatcaaaatgtggtgtatttccctattcaaatcgtttacaagttcttatctgtagaaaatgataagaacgcaagcgtttataaaattccaaaaaaatgaagctgggcagtgaaagtgaaaaccagaacaggcccaatataatcgagcttgttttatttagtagcgcttaatggatcaagttgtggaagttcgagttcaattgggtagggagagatactgtggtgaatcacccacctggacgtcgttgccccgcactccgcactgattatcacggagcaggttgcgatcgctctggctgagattgccggatagcaggattctcatgaagtagtcacactcccggatcgaaatgcagtgaccggtgacacggccactcggaatttttgcaacacaattgatgggcgggagttgagctggaatatcggagatcggggatcgtcccacgttaacttaagttcacagccagacttgtttacgatcccgtattccgtacacactcaccattcgcgcccaatgccagcgagccgacaacaacaagtagagctggaaaacttcccatgccggaccggatcgatcagatacgatacagctgagcggaacgaatgagactgcgatcgaagctgagtctgagattaacattaagttcggccggtgcctgtgaattaccagagagtcgctttcggaccgggttcagataacataatcgtagttgtgtaactggggggctttgtagagcttttaatgccctgcactacggcatattcacttacaatgagttgtcgagatttcagcgtgttacgcttagatgagatctagtaattaatattttatttgtggaataagctcacaagctaatactgatatactgatcgtgattttaaaagtctcccatttggagacgttagaaattcgaatgccgaacatcttaagtcgagcctctcatatgttcggcatctcggcgtttagttgtggtgtgaattaaccatgaccgggttgaaaatttgtcggaactcgcttgcaggctgatgaaggatgtttgaagtcggaaattgaatgactacacgatgaccgccaactagtgtgcccaggtggacgagatcgcagagttgccttggtcagctagtatgaccagctgtgcagcgttcgataacgtgatatcggcgcgaattgaattttggcgcggaggtttttcctctatgactcttctttaaacctacttttgttgttctttatgtcgttatttaatggtatttgtcgggtatatgatctttggcttgcctttactcgagaatccatctgggtatcagccgcgagagaaatctttcagtgcaacccacacgggtatcattcgcacactccccaggaggagtctatgggctcacaacttcaaattcagcagcagcagacattgtccggacccggatccatcacattaacagcatcgccacaactgcctatctctatcagtagaatgcgacagcatcagcggctactccaacatagttcatctggctctgggaggccttttgcggccgatcattttatcctgccgccaagaaatattgcgcaatagtggttccaaagct

SEQ ID NO: 6656 - DNA, 1110 bp, DROSOPHILA
tatcgtatctgatcgatccggtccggcatgggaagttttccagctctacttgttgttgtcggctcgctggcattgggcgcgaatgctcaactcccgcccatcaattgtgttgcaaaaattccgagtggccgtgtcaccggtcactgcatttcgatccgggagtgtgactacttcatgagaatcctgctatccggcaatctcagccagagcgatcgcaacctgctccgtgataatcagtgcggagtgcggggcaacgacgtccaggtatgctgtcctagtaccgccggcttgggtgccctgacccacccacttttgccctcggattgcggaaaggttcgttggcagcgttcgaatgacacagatacgcgaatccgggagtttccctggctggccctcattgagtatacgcgcggcaaccaggagaagatccatgcgtgtggcggtgtgcttatcagtgatcggtatgtgctaactgctgcccattgtgtggcccaggcggcgactagcaatctgcagattactgctgtccggttgggtgaatgggacactagcacgaatcccgactgtcagtaccatgaggatagtaaagtggcggattgcgcgcctccctaccaggacatagccatcgaggagttgcttccacatccgctctacaatcgcaccgacaggacgcagatcaacgacattgccctcgtccgactggcaagtcctgccaagctcaacgactttgtgcaacccatttgcctgcccaacaagcagctgcgagcggacgagctggaggacctggtcaccgaggtggccggatggcaggctagttcctcgcaaaggatgcgaaaaggttatgtgaccattagttcgattgaggagtgtcaaaggaagtacgccagccagcagttgcgcatccaagcctcgaagctctgtggcctgaccaattcccaggagtgctacggcaacgctggtggaccactgatgctgttcaagaacgatggctatctgctcggtggactggtgtcgttcggacccgttccctgccccaatcccgactggccggatgtctacaccagggtggcgtcctacatcgattggattcacgacagtctcaaagcatag

SEQ ID NO: 6657 - protein, 311 aa, DROSOPHILA
MRILLSGNLSQSDRNLLRDNQCGVRGNDVQVCCPSTAGLGALTHPLLPSDCGKVRWQRSNDTDTRIREFPWLALIEYTRGNQEKIHACGGVLISDRYVLTAAHCVAQAATSNLQITAVRLGEWDTSTNPDCQYHEDSKVADCAPPYQDIAIEELLPHPLYNRTDRTQINDIALVRLASPAKLNDFVQPICLPNKQLRADELEDLVTEVAGWQASSSQRMRKGYVTISSIEECQRKYASQQLRIQASKLCGLTNSQECYGNAGGPLMLFKNDGYLLGGLVSFGPVPCPNPDWPDVYTRVASYIDWIHDSLKA

SEQ ID NO: 6658 - DNA, 6141 bp, DROSOPHILA
taaactctcaatcggattagcattaatcatcatctccgggcgattgccagctaagttctgctaaatattccttattgtttgtccaaggagtcaacaaacaaatggcataatccgtgatggttgggagctgcaagagcgcatcatacacgactgaataagccatcaaattggttgcaattgacacatactttcgcctgattgacgccctaagtctcacttttgcaatgcaatccatttggcccccggcacatcaattacagacgattaatttatctaattggcagctagttgccgatcccgatcccgaatcctactcctattccgggtccactcggttgacaagcagctggaagcggcgaacaaagggacaacctaatgctgggccgccatttccatgttctttccacatgtcatcatcggtggatgcgaatgcggatgtggatgtggatgtgaatgtggcagtgagaagtacatattttgacgtacccgtgtaaacgtcaaatgccagaaaggaccaagcagctccgccgaaacaaaggagctgctgctgcatggccgaatggtgtcggtgtgtgttccgtgtcaggcaatccaccagtcaaagtcctgacaggacccgtttctgacagccagcctccttgagcctccgccttgcccatcccctgcccagccctttcgtgccaccccaaatcgcattcctttcagtgctggctacaagatttcatcgccattggcttaattaatacccagaacgtggagcctgacagcccgcagagtcttggccattataggttgacacaggtggctgccttgaaagttggtcaaaagtagggtagaaaattaactaaatgatgactacaaaatgaggaggaatttcgttaaaacagcattatgaacaaaatataacaaaggtgctttttttgaggtctaaatgcatggccctatttaattcacaaataattttattagatatcaggataagtaggctatatcaagtaggctataagtgtttctctatagcctcgataaaatcgctggagcaatctttctgccatttctggttcattttgccctgatagagggctttcttcagaggttcttcaaactccttgaggtcttctaactgcgctttaagtcgatcaatttcctccgtacttcgaagattttgagccaaactaagcaaaagtcccgtgagctctttcttcttgaatttttcactaaaaatatgggcttgttaataagttacatatagtaaaataaaatatttgtagcttacccgagtttcttggcatggcttataatatagtttgctgtgggagaaaccaaaggttccctatttagtgcggatttcactgctaacatatagcaatcaccgagcagtttctcgtcggattcaagtgtgtagttcagaaactgttcgaagttcccaaagttacgaacacaaccgagcgcagatgccaatatccttctctgcgatccattggtggagttctggaacagtccgaatacttccaggaactctgcatcgccaccttcatccagtagcgagcagtaagcaaccttctggaaatcggagggcagctccagctgaccttcagttctatgggttatagcgagaatcttggcctgatccgtgcaatcagccacatggtaacgacaggcctgtgaatatgcaaagtgtgcaaatggaatgtccttgatggcgggcttagcttcccttattcctgatagctttggaaagcggttatacaatggcaaaagtagcttctgcatgtagttctgtaacatggaattgactttaaataatcaatattaaacctcgaattaagcttaccttaaatttgtttgcctccgcgacattcagtagggctcccagtcgattgaggataccaatggccctctgccaaggcaaaaagtcctgctctttcttcagatattccagcaaatcgaatgctttgtcatatttgtgtagccggactgcagccaaagccatgagatcatccagcaactgagctttatttagtttgtggatgccaccagaattgggatcattcctcagactctcgattatcaagcgccagttgtgctcatcatagttaactctgaagatggttgctacttggggattcagtatgacccactcgtcagtggatagatgatcgggcaacttcagtactttagtgttcaagggacattccaaccaaaactgtggggtagtttgattaaagtccggtagattttgcctaacgaaccttaaaggaacccaccagcaggatgaagccttttcaattccatgctcctggaagaatctgctctgattgagtgttacctcgccagttttgtagttccgtataagggttaccaagggataaccaccctgtagggtccaagaatccatggccctacttaggttaaagtcggacgaaataacctggtttttcaaagcagccatttgcagggaattccaaagatcagcttgggccacattaccaaaagaaaagcgttccaaaaaagatcgaattccgtggaagaaggcttcctctccgacaagtttgtgcagcatgcggatggtcagcgatcccttctcgtacacatactccgtgaactgtccgagcacctcggcgggattcttaacatccttggagatggccggcacagttgcgttcgagtctttgctaaagaagttcgccaaatcccttgatataaagcgctctcctcttctccattcgggctgcaaagaatcgagggccaggtagccgaagtaggtagatggaccttccttcaaccagagatcattccaccaattcatggtgaccaaatttccgaaccactgatgggcatattcgtgagccaccgtgaaggcagtactatccttctgtttctgcggataatcgccttgattttgaggcaatctttcctcgttgtaggtgaccagaccccagttctccatggccgtaaatctgtgagtgggcaccgtcagttggtccactttcgccagcggaaagttaatttggaataaattctcatagaaggagagcagctttggtgcaatttccatggatatcatttcctgacccaacaacttcggctgcatccagttgcgaaagataactctattgctggtcttactctcctcggtggcggcattttccagatcatggacagcaaaggccaccaaataggttgaggtccttagaagagtgtcgtgatcgcaccatacataatttgtaagactatcactggaataaaatttaagcgagcatttcatgaacttcaatcctaatccttcacaatatagggctacttactgatcctgacacctgagaacaggcatgccactcaatcccatgtattttttatgatagccaagggttatgttaaaggtcgccttccaggatggttcatcgaagcagggaaatgcctgcctggcaaatgtgggtgagaactgagtgaccgccaggtgactgaagtaccacaaaagttattcatttgtcccattaaatatgaattaaacaactcactgaacttccttggtaactatatccgtgtagttacttttatagtacccactttgggaatcatttagcccggctttgaagtgcatttccaacttgtagatctgatcctttaccaattcccgacccaagtgcaggatgtagaagttgtgcacctcattcacttcgattcgattaactccaaacttttcctggccagaaacaactgatgttcggttctcatctatctttaagtacgccgcatgcaaggtgatgttcttggtggtctcccgtgccagaagatctattgtcacagatccctcgaatctttgatcggtgctatttaggtgtgtgagaattcgcaggttgtagtgcaaaggctccacagatctgggcaaacgataatcctcgtagacagctctgatggaaggaacaaggattaagaagatccaccagatccagagacttggctgagcccgccacatgttgggatgctgagaagggaaagattaggtacggattggtatggatgaggtattagattaaaaagcttatgaatacccatgattaggcagtggcaaaaaaaggattataatagtactacaaatccaagctaagatgcaggtaggcctttgcttattcattattagtttcccaaattatttagataacagtgaatatgttttggaatatgttttcgaggttcctccgtggttcgtccacctctcaaattacgtgtttagtgcggggtggtggctgcaattcgaacacatcccaatcccagccacaccgcaatgtgagtcttttcacaggaagacaaccccactggaaactccgcgtgatgcagttcctcagtggcctgcgacaccggtactgcctgtggcgcctccgccgcctgctgggcgtggccttcgacgagggcggattccatgagggcactcgccaggcggcggtcaccatgatcgatgcagtgcgccaggcggactggccctgcatccggagttgctgcacggagcggggatcggccgacatctacggcttgtcccagatgaggagtccctactgcagtttggttcgctttcagaaggaacacctgcggcatgctcttcccgtgagggtggtgcgtcgctggatcgatggtcgctactatgtcatggtggacatgctctttgtcggcctgcgcaacctcctcgatctcggaacggagcaggaaaaggaggaaatgctccagcggattcagagcgttctggtgaactcccagatcgatgataagttcgaaccgagcaactgccgcctggccattgccgaaatagtgctcaccttctctatggaactgggcgatccccaggatcctcgggatatagaaagtgaagatcaggacagtggctggctggtggactcctacaaggtgcagcgcttcaagctgatcagcttcagtccgaaaacactgaaccttcgcgttattgactttctgaaaccggttcgacagaagtagcccacaaattctccgttccgaaggtgttgtcattggggcactcgagtaatttcagtcacgtgccgttctccggttcatcgatccctcgcattggcattacgttaaacccactttgtcagcgatctctatccaccgatcgtggcgcgactccgcttcgatgtgaactgatccgctgggagggttacctggtatatttatggcttggacaggtgtgtcgagaggcttaccaacactgtgattttcaaattgctgtgagtttttcaataaatgtttgtcagtttgtcttaccgtaaatggaagatacaaggaggtcttcaattagtagctaaggagtaaaggtcttacatcttactgaacataaatatatactatttaaattattcggtaattaaaactgcaagagcacgctgccttttagttaaagccgcgaagtaagtgtaatttgtcaggctgcgggcttttagaccctgtacgcgcatttacactccagatggggtaagagttaactattaactactcgcagccagagtccaaggatgccccagctccaccaacctcttccgcaggggtggcgagtggggctgggaaatcacggcgtgtcgctttcgaatggaacataaaaaattgagggcttaattaaaaagcaaaaatgtgctgcgattttccgcttttttaacgccaacagcagcaacttcggcccgtatttatatccgtaccccaacccgtggcccaaaaaaaaaaaacccagggaaaatgcgaatgcgaatgggaaaaacaacacattttccagggccagagagcgaagggaagggaggagtaaaaactacttgccgacgactttttatgtggcccatgttccttggaggcgaaggaagcactgccagcagttccatttgaaattttccgggcctcatgtgtctttttatttcgccttcccccccccccctgggctcctacaaattaagctttccctcgctttgttgcctcttttttggccagaccaggccaagaccatgacttttgttgttaattaaagtgacggctaaaaacatgaaactctcaagtgctcattaaaattgaaatgcgactgcaggaacaaaccaaatgtgtgccaaataatgacgtttggctcttaatgccactccatgttct

SEQ ID NO: 6659 - DNA, 2871 bp, DROSOPHILA
cggagtcgcgccacgatcggtggatagagatcgctgacaaagtgggtttaacgtaatgccaatgcgagggatcgatgaaccggagaacggcacgtgactgaaattactcgagtgccccaatgacaacaccttcggaacggagaatttgtgggctacttctgtcgaaccggtttcagaaagtcaataacgcgaaggttcagtgttttcggactgaagctgatcagcttgaagcgctgcaccttgtaggagtccaccagccagccactgtcctgatcttcactttctatatcccgaggatcctggggatcgcccagttccatagagaagcatcccaacatgtggcgggctcagccaagtctctggatctggtggatcttcttaatccttgttccttccatcagagctgtctacgaggattatcgtttgcccagatctgtggagcctttgcactacaacctgcgaattctcacacacctaaatagcaccgatcaaagattcgagggatctgtgacaatagatcttctggcacgggagaccaccaagaacatcaccttgcatgcggcgtacttaaagatagatgagaaccgaacatcagttgtttctggccaggaaaagtttggagttaatcgaatcgaagtgaatgaggtgcacaacttctacatcctgcacttgggtcgggaattggtaaaggatcagatctacaagttggaaatgcacttcaaagccgggctaaatgattcccaaagtgggtactataaaagtaactacacggatatagttaccaaggaagttcagacctcaacctatttggtggcctttgctgtccatgatctggaaaatgccgccaccgaggagagtaagaccagcaatagagttatctttcgcaactggatgcagccgaagttgttgggtcaggaaatgatatccatggaaattgcaccaaagctgctctccttctatgagaatttattccaaattaactttccgctggcgaaagtggaccaactgacggtgcccactcacagatttacggccatggagaactggggtctggtcacctacaacgaggaaagattgcctcaaaatcaaggcgattatccgcagaaacagaaggatagtactgccttcacggtggctcacgaatatgcccatcagtggttcggaaatttggtcaccatgaattggtggaatgatctctggttgaaggaaggtccatctacctacttcggctacctggccctcgattctttgcagcccgaatggagaagaggagagcgctttatatcaagggatttggcgaacttctttagcaaagactcgaacgcaactgtgccggccatctccaaggatgttaagaatcccgccgaggtgctcggacagttcacggagtatgtgtacgagaagggatcgctgaccatccgcatgctgcacaaacttgtcggagaggaagccttcttccacggaattcgatcttttttggaacgcttttcttttggtaatgtggcccaagctgatctttggaattccctgcaaatggctgctttgaaaaaccaggttatttcgtccgactttaacctaagtagggccatggattcttggaccctacagggtggttatcccttggtaacccttatacggaactacaaaactggcgaggtaacactcaatcagagcagattcttccaggagcatggaattgaaaaggcttcatcctgctggtgggttcctttaaggttcgttaggcaaaatctaccggactttaatcaaactaccccacagttttggttggaatgtcccttgaacactaaagtactgaagttgcccgatcatctatccactgacgagtgggtcatactgaatccccaagtagcaaccatcttcagagttaactatgatgagcacaactggcgcttgataatcgagagtctgaggaatgatcccaattctggtggcatccacaaactaaataaagctcagttgctggatgatctcatggctttggctgcagtccggctacacaaatatgacaaagcattcgatttgctggaatatctgaagaaagagcaggactttttgccttggcagagggccattggtatcctcaatcgactgggagccctactgaatgtcgcggaggcaaacaaatttaagaactacatgcagaagctacttttgccattgtataaccgctttccaaagctatcaggaataagggaagctaagcccgccatcaaggacattccatttgcacactttgcatattcacaggcctgtcgttaccatgtggctgattgcacggatcaggccaagattctcgctataacccatagaactgaaggtcagctggagctgccctccgatttccagaaggttgcttactgctcgctactggatgaaggtggcgatgcagagttcctggaagtattcggactgttccagaactccaccaatggatcgcagagaaggatattggcatctgcgctcggttgtgttcgtaactttgggaacttcgaacagtttctgaactacacacttgaatccgacgagaaactgctcggtgattgctatatgttagcagtgaaatccgcactaaatagggaacctttggtttctcccacagcaaactatattataagccatgccaagaaactcggtgaaaaattcaagaagaaagagctcacgggacttttgcttagtttggctcaaaatcttcgaagtacggaggaaattgatcgacttaaagcgcagttagaagacctcaaggagtttgaagaacctctgaagaaagccctctatcagggcaaaatgaaccagaaatggcagaaagattgctccagcgattttatcgaggctatagagaaacacttatag

SEQ ID NO: 6660 - protein, 844 aa, DROSOPHILA
MWRAQPSLWIWWIFLILVPSIRAVYEDYRLPRSVEPLHYNLRILTHLNSTDQRFEGSVTIDLLARETTKNITLHAAYLKIDENRTSVVSGQEKFGVNRIEVNEVHNFYILHLGRELVKDQIYKLEMHFKAGLNDSQSGYYKSNYTDIVTKEVQTSTYLVAFAVHDLENAATEESKTSNRVIFRNWMQPKLLGQEMISMEIAPKLLSFYENLFQINFPLAKVDQLTVPTHRFTAMENWGLVTYNEERLPQNQGDYPQKQKDSTAFTVAHEYAHQWFGNLVTMNWWNDLWLKEGPSTYFGYLALDSLQPEWRRGERFISRDLANFFSKDSNATVPAISKDVKNPAEVLGQFTEYVYEKGSLTIRMLHKLVGEEAFFHGIRSFLERFSFGNVAQADLWNSLQMAALKNQVISSDFNLSRAMDSWTLQGGYPLVTLIRNYKTGEVTLNQSRFFQEHGIEKASSCWWVPLRFVRQNLPDFNQTTPQFWLECPLNTKVLKLPDHLSTDEWVILNPQVATIFRVNYDEHNWRLIIESLRNDPNSGGIHKLNKAQLLDDLMALAAVRLHKYDKAFDLLEYLKKEQDFLPWQRAIGILNRLGALLNVAEANKFKNYMQKLLLPLYNRFPKLSGIREAKPAIKDIPFAHFAYSQACRYHVADCTDQAKILAITHRTEGQLELPSDFQKVAYCSLLDEGGDAEFLEVFGLFQNSTNGSQRRILASALGCVRNFGNFEQFLNYTLESDEKLLGDCYMLAVKSALNREPLVSPTANYIISHAKKLGEKFKKKELTGLLLSLAQNLRSTEEIDRLKAQLEDLKEFEEPLKKALYQGKMNQKWQKDCSSDFIEAIEKHL

SEQ ID NO: 6661 - DNA, 5102 bp, DROSOPHILA
ggtttgcccgtgggcgccgtgatgaactgtgccgacaacaccggagccaagaacctgtacgtgatcgccgtccacggaatccgcggtcgccttaaccgtctgcccgccgctggtgtcggcgacatgttcgtggccaccgtgaagaagggaaagcccgagctcaggaagaaggtgagtgtggtgcccagtgctccggctgaatcggtcatgtgctaaaagtgcccatgggctagcaacccgcccagtgaacacgtttttccactttgtttgtgtgcgttttcttgaatgaaattcaacttgtttctgtttcaaagaagccaatttgaaattagttagctcttattacattgggttgcttaaggttaataatcgtattttgtgctacactatttgtcatttgttttgaacgggcagttttaatttctatcaattgcagagtatttcattgtaaagtaatacgataatatagatagatttgtattagacgtggaaggtttctccttacgcttccaataaattttccccacatgttttgtgccggctaagatagcttatcgcaccaaactcacgtttttaatatttttgtttattgataagaatttaaaattgtagtgaagaaggtttataaaacggtttcactgcacttctcataattcccccacctataacaacgcacttttgcataactaaccgatgcagcaggaggtttgcacactgccgagcaactttgctaactactattttcatttgtttccaggtcatgcctgccgtggttattcggcagcgcaaaccgttcaggaggagggacggggtgtttatatactttgaggacaatgccggggtaatagtaaacaacaagggcgaaatgaagggctcggccatcactggaccggtggccaaggaatgcgccgatctgtggccccgtattgcatccaatgcaagctctatagcctaaggagtttccttttcaataaacccacaacggaaaacagattgttttgaattcgaattgttggttcttttattgaattgctgcactgcttcgctaccggaggaggagaatgaggatcgtctctaggccttgggtgcctccgtacgtagagtgggcttgggtcgtgtcacttccatcgataccttgccgttggctcccttgaacaaggcgtagcacacctggaacggaagaccctccaaggcatcgccattgaatttggtgataatatcgccgcgctgcagtttgctgtctatctccgggtattgtccttgaatctgtcgagaaagtagttacttagggttgagccttcctaccactgtataccagtggtgtatgtgcactcaccaagtccgcgatggtacatccaatttcgttgggagaaagcgacaggcccagctccttgcctgcttttttcataaggtcaacgttaaacttttccagctccggaggatcagcgcggaagaccgttagggtgaccgctttctcgtatgtggtgtggaataactgatggaccttcagtgtcgtcatggatcccacgtggattggcgtaccatttatatcgcaaatgtggtcaaagatcttgaggcgcttgtcggctgccacttgtccctccggataaacgtgggtgattacacagccagtctgtcagggaaaagttgtttaaggtacttcttgcagaaacagaaagttcagatagcccaccgtgacatggttgttcttgccgccgcagacgatgacgcccattggcttcttttccaccttcaactcaatgagtatctttttgttcggcttgatctcggctgtggcgggttcctgtggcttttcctcctctttcttggcctctgtgagttatcgggatgaagatgtcagttttgaacttgcttggacgcaatacctaccctccttctttttctcttccgccgccttctcagcctttatcgcctcctcgctcttgagagtcaatagaatcatggtcactacgccctcggcacgtttaagcagtccagtagcctgaagtggatatgaaatggttttaaactaagtggttggagggcttcctgacgactcacatcatcgtagttggattccagtgttacatcctgattaacggccagcagcatgtcgcccactttcacgcccgccaactcggcattcgatccctctctcagatccgagatgaaaatgccacttcccacctcagcgtgcttgccatagatgaccatgatgcccaggaaaccctccttgcgcacctgcaccgtgcgcgccttgggaaactggtcgaagataaacttagtctggaatagaagggaaggacattttatcgcaggatccatccgaaaagaagtgaaaagtacggacctcatcagacgcggtggggaacttcttgatgggcttgacgcacatgccctcatcgttgggcttgcgtcgcgaggtgatcatcacgagcttatccccatccacgttcttgaacacggcggaagcgttcaagtggcagcgattcttcagcacattgccgttgacctcgacgatctcgtcgcccggtttgatgtccacgctacccaatgctccgttgggatccacaccggcaacaaagcaggccatcttctggcggtccttgtggccagcgagtgcgagtcccagtggcttgctggcgtccctctggacctcgatcctgcgcagatccttcatcatgttgtaccgcttgttgatcttagctgggaatggcattcacgtgctgtgtgactgacattttttaatggcttcaattgagtcttacccatcgtgtagccaaattcatcttcctgctccttgtcgcgatccttttcctgcttgttgagtttgcaattaccggcggatgctcgatcgatctaaggtacttataagttagtagagcgatgggtggcgaccttgggttaacccacctcataacccgcctccgtgcgaatgcgaccggtcatgtcccgggtgtcctcgtcatcctcgtcggcgtagttactatgcttctgacgcatcgaggccgtgaatgtggtattccgcttctgcatcgattgctgccggttcatgccagccattccctgaccctgaccctgaccttgccccattccctgacctccggacgcattgttgttggtggtctgctcctggttgaacttgttcttggcctgcatgtagccattgctccgcggatctgacttggcctgctgctcatcgctcttgtcgaaggtctgaatctccagttcgatcttgaagtccgcctccttgatgagatcgatgaccgcctgttcggtggagttgcgcacatcctttccgttgagcgagaggatccgatcgccaacctttaggcgaccacacagatgcgcgggactgtcgggcacaatgcccttgatgaagatgccggtggtcttggtgttgggcgaatccttcacctcgccgcgcactatgcagatgccgaaggacttcttgcccgtcttgtccagggtcaccatgtgaatgagctctgggaaaggattgtgcattccaaatgaaataaaaactatttacaacgtattgttaaagtacgactaagacaaatgtgaagctattactaataaatatttattggggtccttatcccacttggtatcctttcgcaaaataattttcaccaatattgtataatcgtttatataaatgttaaggttaagttcattacataaacatatttctcacaggattcttaagaatcaataaagtcaattgaattggcttttgttcaaattttgttttatttgattcataaaacacaaaacgagtattgagtgacctttggaaggtcaagttctttcgggactagctgcaaatttgattagcagttggtcatgaaaccactcaatggacactgaccacccgcggtgccctgtttgcccaggaactgaaccatcctcgctgcttgagatcgactgctccgtaatcctagccaaaaactcgcgactcactgaccggacattaagcgcaccgaattaagctcaaatgtaatatcgaatatttattgttatgggttttcacttaattattatttgtgaatattccgcgttggctgcgcccgatttgagtccattgaaaagtgcgcctaaactgattttacaattagcgggcgaacattcttgctaactgacttagtggccattctattttgagtatgattttcgtatcgattacactggtcagcagggttgatcttagagtaccagatgcatgtagttcatacatatatgctaagacactttcacaaactttccttctaaagaatgcttgagtaaaagaaaaattctactaataataatgaaaatgtttcgtatcttgagattacccattaaaatattaccttgcagtacagtgctatcgattcggaggaggtgcctccaatgaattgagtaactttcactgtctgttatgacaccactcacaaaacacccagctccccgaagacggccattatatgggttaccatcgcggatgtgaaggctaggggaaaatggatacccatgtacctttattggccctatcaagttattaatttgttggtacgatttggcccgtgctgaactcaacactccgccaggagaagcccaccaagtgttgaccagcaatgcccatcgattttatatttttctttcattgcacttacaactgaataacatatgtctcacacacttttacctgggcgagagcttctatatcggcactgcaaataacaacaatttgtgggggacatttttaaaacatataatatccttaataaaaaaacaataataaaatgcgcacaaaataccgaagaataaagagtaaataaatataaaatgtaaggtgacaatgatatgatattgaatatgaactgtatatattcagtatcaataatatagccccaaaaagtaggcaacaatttcaatgcgaattggtaaggattgctggggaacttctgaaccagacacaagcggtaatcaaataaaactttcaagatttttatctttcgagtggcaaataaatttaatttgtctgccgagcttaaattcataatcaagatttgcattttaatgcctttgtcggggggaaaggcggtatgaaaaaagga

SEQ ID NO: 6662 - DNA, 2290 bp, DROSOPHILA
aggcgcacttttcaatggactcaaatcgggcgcagccaacgcggaatattcacaaataataattaagtgaaaacccataacaataaatattcgatattacatttgagcttaattcggtgcgcttaatgtccggtcagtgagtcgcgagtttttggctaggattacggagcagtcgatctcaagcagcgaggatggttcagttcctgggcaaacagggcaccgcgggtgagctcattcacatggtgaccctggacaagacgggcaagaagtccttcggcatctgcatagtgcgcggcgaggtgaaggattcgcccaacaccaagaccaccggcatcttcatcaagggcattgtgcccgacagtcccgcgcatctgtgtggtcgcctaaaggttggcgatcggatcctctcgctcaacggaaaggatgtgcgcaactccaccgaacaggcggtcatcgatctcatcaaggaggcggacttcaagatcgaactggagattcagaccttcgacaagagcgatgagcagcaggccaagtcagatccgcggagcaatggctacatgcaggccaagaacaagttcaaccaggagcagaccaccaacaacaatgcgtccggaggtcagggaatggggcaaggtcagggtcagggtcagggaatggctggcatgaaccggcagcaatcgatgcagaagcggaataccacattcacggcctcgatgcgtcagaagcatagtaactacgccgacgaggatgacgaggacacccgggacatgaccggtcgcattcgcacggaggcgggttatgagatcgatcgagcatccgccggtaattgcaaactcaacaagcaggaaaaggatcgcgacaaggagcaggaagatgaatttggctacacgatggctaagatcaacaagcggtacaacatgatgaaggatctgcgcaggatcgaggtccagagggacgccagcaagccactgggactcgcactcgctggccacaaggaccgccagaagatggcctgctttgttgccggtgtggatcccaacggagcattgggtagcgtggacatcaaaccgggcgacgagatcgtcgaggtcaacggcaatgtgctgaagaatcgctgccacttgaacgcttccgccgtgttcaagaacgtggatggggataagctcgtgatgatcacctcgcgacgcaagcccaacgatgagggcatgtgcgtcaagcccatcaagaagttccccaccgcgtctgatgagactaagtttatcttcgaccagtttcccaaggcgcgcacggtgcaggtgcgcaaggagggtttcctgggcatcatggtcatctatggcaagcacgctgaggtgggaagtggcattttcatctcggatctgagagagggatcgaatgccgagttggcgggcgtgaaagtgggcgacatgctgctggccgttaatcaggatgtaacactggaatccaactacgatgatgctactggactgcttaaacgtgccgagggcgtagtgaccatgattctattgactctcaagagcgaggaggcgataaaggctgagaaggcggcggaagagaaaaagaaggaggaggccaagaaagaggaggaaaagccacaggaacccgccacagccgagatcaagccgaacaaaaagatactcattgagttgaaggtggaaaagaagccaatgggcgtcatcgtctgcggcggcaagaacaaccatgtcacgactggctgtgtaatcacccacgtttatccggagggacaagtggcagccgacaagcgcctcaagatctttgaccacatttgcgatataaatggtacgccaatccacgtgggatccatgacgacactgaaggtccatcagttattccacaccacatacgagaaagcggtcaccctaacggtcttccgcgctgatcctccggagctggaaaagtttaacgttgaccttatgaaaaaagcaggcaaggagctgggcctgtcgctttctcccaacgaaattggatgtaccatcgcggacttgattcaaggacaatacccggagatagacagcaaactgcagcgcggcgatattatcaccaaattcaatggcgatgccttggagggtcttccgttccaggtgtgctacgccttgttcaagggagccaacggcaaggtatcgatggaagtgacacgacccaagcccactctacgtacggaggcacccaaggcctagagacgatcctcattctcctcctccggtagcgaagcagtgcagcaattcaataaaagaaccaacaattcgaattc

SEQ ID NO: 6663 - protein, 674 aa, DROSOPHILA
MVQFLGKQGTAGELIHMVTLDKTGKKSFGICIVRGEVKDSPNTKTTGIFIKGIVPDSPAHLCGRLKVGDRILSLNGKDVRNSTEQAVIDLIKEADFKIELEIQTFDKSDEQQAKSDPRSNGYMQAKNKFNQEQTTNNNASGGQGMGQGQGQGQGMAGMNRQQSMQKRNTTFTASMRQKHSNYADEDDEDTRDMTGRIRTEAGYEIDRASAGNCKLNKQEKDRDKEQEDEFGYTMAKINKRYNMMKDLRRIEVQRDASKPLGLALAGHKDRQKMACFVAGVDPNGALGSVDIKPGDEIVEVNGNVLKNRCHLNASAVFKNVDGDKLVMITSRRKPNDEGMCVKPIKKFPTASDETKFIFDQFPKARTVQVRKEGFLGIMVIYGKHAEVGSGIFISDLREGSNAELAGVKVGDMLLAVNQDVTLESNYDDATGLLKRAEGVVTMILLTLKSEEAIKAEKAAEEKKKEEAKKEEEKPQEPATAEIKPNKKILIELKVEKKPMGVIVCGGKNNHVTTGCVITHVYPEGQVAADKRLKIFDHICDINGTPIHVGSMTTLKVHQLFHTTYEKAVTLTVFRADPPELEKFNVDLMKKAGKELGLSLSPNEIGCTIADLIQGQYPEIDSKLQRGDIITKFNGDALEGLPFQVCYALFKGANGKVSMEVTRPKPTLRTEAPKA

SEQ ID NO: 6664 - DNA, 3714 bp, DROSOPHILA
attgcatctacaatcatgcaaaagtcaatgaaaaccttctgctccgtaatgcagcagaataaagctacttacaaggtgccctcgaccgctgttgttgactcaatagttgtcggtgcccagggcgacataagaaatgcgttaattaatttacatttgagctctttaaagggagtttccagcatgccgaccaaacagctaaatgtcagtgtgtccgcaaaaggtcgtaagaagaaaatgcaaagtactttaaagtcaattggtagagatgaatcaattactctgatgcacgcacttggaagagtattaaatcctaagtgtaagtcccacgaaacattctctgtaaaaatactcattcaaatcttggatctcatcagttaatgaggacaaaactatgttacacagcccggaggaaataaccgaagcctttaatacagagcccaggaattttgtgaattttgtatatgccaactatctgccgcattttaaggaaatcgatgatgtcgtgaccgccataaatgacttgggcctatcagattgcatgctcaacgagtacagagatgataatttgtctgtgatgggcttaaacgttgccatacgaggagttatgatgtccaatacgtgccctgtcagcggatggatgcctgttcgaggacccaagcgaatcaatatacagccacaggcaactttggccgaacaaagactggtgggtgtgggctacgcgggcattgccaggacgctctacgccacggagtacagctcattagttaagttaatagcaggcaagcctgtggatactacttcaagccaaagcacagactcaaaacaagacttttagtaaatcaaaactatttatctgatgttaaaactaaagtagcaaggaagtttttaaaaaatgtccctaggaccaaatatgatatctaacaatcgcaaaacccagtttattatataaattaaatgtactgcgcatcccaccgtaagaaaatgaatagcggtagttattcgaattcatgttttaactctttatttatctacaaatcgatttttcattatacaaagttccattaaaatcaacacttcgaggcaacaccgctaaactatacaccatacagaccaacaaaaatacaattgggaggcgtcgtttgcagataataaagtaatgctaattctttctgatgaatgctttttgatgagctatttgatgattgaaaggaactcctcacaatttaggcgtccacagatgacttaaaaactaaacaaggattatgtccatttatcgccacattctaccacaattgagtcttttatttacacacggcggagtgacatactcttctattttattctatttgacaactgcatcggctggcctggatacatcgctggagttgtcgtcctcctccatttgatttccatctagcaggcgctgacgctcctcctcgttggcatgaccattcaggtggatcggtgatctagacctggagcgggtgcggctcctctcgtgccgctcggcatgcccattggctatgttcaggccggccacgcccatttcgtgaccatcgctgctggtcgaggaagtggtggacgtggtgctcgacgtggtgctgctgctgtcgctttcgctgtcctcgctggtggagtccatgggtgtgggttgtggctgctggggaggctgttgtctagcctgcagctcgcaagctgaactgggagtgggcgccaccgctgagggcggggaagctgcggccgctgctgctgccgctggtccagctgtcgcggaacacgtgcgcaagaggtgggtgcgcagaactggaataaaaggcacaagttataaattttcctggtttttcaaattattaaagacatcgcatacattgattctcacgtgatagttggcgaatcttatcatcctgcgctcgtaatttggctccaaactccttggatatgttctgggccttcgaatatcgatcttcgatttgcatgcactcctggatgagctcctgcttgctcatcgtctccaaacgttcgagccgcgctcgctcgtagacatcggagaactccttggaaaggaagagcacctgatcttcggtctgggagccaaaacagttgtcgtcggagtcatctttgtgcagctccgacatgtgttcctccattaggaagcggttcgtgttgtacggaacgagcaaggagcgcgaacgaaccagcttggttctgctattctgtcgttgattcccctccagcgttgctcctgcacccgttgacatatcgagtttccactgcggataatggttcttggtcttcttgggctgcatcttggatttttttccccgccgatgtttcctcttcggcattcccgagccgcctcctacagcgacaccgcctccgccactggcgccccctcctccgccgctatccaaaggtcgttgttgggagccactttctggaaagagcaagaggaccaaattcaaatttgaaccgccaaaatactcgaaaatgcaactctgcccactgcaggggcaaaggaaagaaaaaaacaatccaataagacagtcgccatttgtcgcttgcctttttcagcgctccccgagtgacgatttttaccattttttacagcttcagccatgttgccaacacaaatacttaatttattaagcacttaattaacactttaagctataactggagatttgttgccgatttgtaggtttgcgatttttatactaagcgaactaaaactcgattgaagtgtaaccaggtgctgacgccggagtcccacataaagttctccgcctaacgcgaccaaaaataccccaattgctatcacattgaataatattaggcgccaatttcaaaataaataagaaaatctccatattttaaagacaatctttctactttgttacccacaaggtaagttattgaaatattgtttctgaatcaaaagatttagttattattttagtttgttttactgaacattttgttgtaccaagtatttacttcaatctatgctttgagactgtcgtgaatccaatcgatgtaggacgccaccctggtgtagacatccggccagtcgggattggggcagggaacgggtccgaacgacaccagtccaccgagcagatagccatcgttcttgaacagcatcagtggtccaccagcgttgccgtagcactcctgggaattggtcaggccacagagcttcgaggcttggatgcgcaactgctggctggcgtacttcctttgacactcctcaatcgaactaatggtcacataaccttttcgcatcctttgcgaggaactagcctgccatccggccacctcggtgaccaggtcctccagctcgtccgctcgcagctgcttgttgggcaggcaaatgggttgcacaaagtcgttgagcttggcaggacttgccagtcggacgagggcaatgtcgttgatctgcgtcctgtcggtgcgattgtagagcggatgtggaagcaactcctcgatggctatgtcctggtagggaggcgcgcaatccgccactttactatcctcatggtactgacagtcgggattcgtgctagtgtcccattcacccaaccggacagcagtaatctgcagattgctagtcgccgcctgggccacacaatgggcagcagttagcacataccgatcactgataagcacaccgccacacgcatggatcttctcctggttgcctgcggagtaaaaaag

SEQ ID NO: 6665 - DNA, 1489 bp, DROSOPHILA
tataaaaatcgcaaacctacaaatcggcaacaaatctccagttatagcttaaagtgttaattaagtgcttaataaattaagtatttgtgttggcaacatggctgaagctgtaaaaaatgaaagtggctcccaacaacgacctttggatagcggcggaggagggggcgccagtggcggaggcggtgtcgctgtaggaggcggctcgggaatgccgaagaggaaacatcggcggggaaaaaaatccaagatgcagcccaagaagaccaagaaccattatccgcagtggaaactcgatatgtcaacgggtgcaggagcaacgctggaggggaatcaacgacagaatagcagaaccaagctggttcgttcgcgctccttgctcgttccgtacaacacgaaccgcttcctaatggaggaacacatgtcggagctgcacaaagatgactccgacgacaactgttttggctcccagaccgaagatcaggtgctcttcctttccaaggagttctccgatgtctacgagcgagcgcggctcgaacgtttggagacgatgagcaagcaggagctcatccaggagtgcatgcaaatcgaagatcgatattcgaaggcccagaacatatccaaggagtttggagccaaattacgagcgcaggatgataagattcgccaactatcacgtgagaatcaatttctgcgcacccacctcttgcgcacgtgttccgcgacagctggaccagcggcagcagcagcggccgcagcttccccgccctcagcggtggcgcccactcccagttcagcttgcgagctgcaggctagacaacagcctccccagcagccacaacccacacccatggactccaccagcgaggacagcgaaagcgacagcagcagcaccacgtcgagcaccacgtccaccacttcctcgaccagcagcgatggtcacgaaatgggcgtggccggcctgaacatagccaatgggcatgccgagcggcacgagaggagccgcacccgctccaggtctagatcaccgatccacctgaatggtcatgccaacgaggaggagcgtcagcgcctgctagatggaaatcaaatggaggaggacgacaactccagcgatgtatccaggccagccgatgcagttgtcaaatagaataaaatagaagagtatgtcactccgccgtgtgtaaataaaagactcaattgtggtagaatgtggcgataaatggacataatccttgtttagtttttaagtcatctgtggacgcctaaattgtgaggagttcctttcaatcatcaaatagctcatcaaaaagcattcatcagaaagaattagcattactttattatctgcaaacgacgcctcccaattgtatttttgttggtctgtatggtgtatagtttagcggtgttgcctcgaagtgttgattttaatggaactttgtataatgaaaaatcgatttgtagataaataaagagttaaaacatgaattcg

SEQ ID NO: 6666 - protein, 349 aa, DROSOPHILA
MAEAVKNESGSQQRPLDSGGGGGASGGGGVAVGGGSGMPKRKHRRGKKSKMQPKKTKNHYPQWKLDMSTGAGATLEGNQRQNSRTKLVRSRSLLVPYNTNRFLMEEHMSELHKDDSDDNCFGSQTEDQVLFLSKEFSDVYERARLERLETMSKQELIQECMQIEDRYSKAQNISKEFGAKLRAQDDKIRQLSRENQFLRTHLLRTCSATAGPAAAAAAAASPPSAVAPTPSSACELQARQQPPQQPQPTPMDSTSEDSESDSSSTTSSTTSTTSSTSSDGHEMGVAGLNIANGHAERHERSRTRSRSRSPIHLNGHANEEERQRLLDGNQMEEDDNSSDVSRPADAVVK

SEQ ID NO: 6667 - DNA, 5401 bp, DROSOPHILA
ctgctccaaggcgcaggattcagaaaggaactcgaacccggtggttcggagtggttcatgctgtgcatatttcggtaacagcaagccagaagcgagagcaagaagtttccaaaaagagaagaagaaacagagggtaccaagacccaaaaactgtaagcccgatttatacggcatggagtttttatgacgccgattgccactggcagccaacataaaatatgccaaaagggaggagcagcggaggtgccgagaaaaatgactttctttttactacatttgtttgaccgtaaacaagaattaatgagagtcataaaaccgtcaaacttaaatttcgaacaggcgcacagcaaagtcagcaggccgtgtacagtgggcgctctataaggcgaacaaatgttgaaactcaaactttttacctaatgcattaattgctactaacgaaaactatttgaaatattcgttcgataattcgcttatatgtttcttaagaacttaactataaggttgcctttatttggctttgtatcgagtaactactgtacatgagaaaagtgagatagacacccacacacacacacgcacaaccatgtgcgagcaatgtgctcggcaattaccgttgcccatggaacacggtaccaaaaaaagggagagaaaagcgttaaaaagggaagaaggaaagggagaagcggaagagaagtaactgacctgcgatcgggaaggtgaccttccccaggggcgccgactatacatatgtttgtatgtatgtacataggtgcagggtatacagaggtatatcactgtacatatattgtgtattcaggattgataagaatgcaggacaaaaggacctccgtccttggaaaagggtctgcgttcatctcaggctgtctggtttttttaggggtgtggaaaatttctcacacttatcagctgtcggaaagatttcaaaactaatgaagtcacatggcggcacattgcatgcaaggtaaacacgaatattgtttataaaattatacaaaactttattttctatgtattgttcagagacatttttgggaaacatcagttagttaaaacgtgttttaatcgttgcttagtggtaaacaatataactagcataagttgtttttgtatgaatgtgcgaaatacatgatataaattacaaatagtctacgtctcttttttatgcgatttatgggaataattttgcacaattttttggatttattcattcccatcgaaactaaaaactaacgacaaatacaattagtgataggtaggtaggggatgaaatgatttcacgggtacaattataaaatataattcttggagagacaacgccgatgtgttcggccagcaaatgaactcgttgcccactctctctctcggtgtccaccgctccgccgctcgctcccactgagatggtgacccagcgaaaggagctgacgggctccagtttagttcggttcctagtcttaccggaggaactcactcccagcggccggctcgcgagcaacttgtgctccgtgggcaaagatgccggagccagctcttggcagtagccgaaaactgctcaagggactccagcagattacgatatcttagggatgggtgatgcaggtaaagatagttggcaatgcgactacggtaactatacgcattttttaacgaacacgaaacgaacagaaaatgaaatacgctacaaatttaaaaatgaaaacaaattaaactaaactaggtaagtcagggtcttccagtccgccttggaccgcactatttcctctggctctggcccacaatcgagtccatcagcgcaccggtcagctccgttcgcagcgcgatcttctggaacttgctgccctggtacttgttgtagatggccttcagcttggcctgaggagcgtcccgggccagtttcgcgatcagccgggtaatcggacgcaagtgcgcggccgagtatcgcgagtagaaggtcagagtgggcgtccagtgacggtcgttgaatcctgtaccggcccggtggtttccattgagcaagtgcagcgacaggaacagtgaggcagctgcaatctaaaggcgccgcaaaaaatattacatatacctatgctaaataaaaggggatagtgtattgaaacccacctccgatggcctgtaagtggccatttcgtagtccacggaagctaactcgatgaagtacttggacatcgtatggtgctcgtcctcggcgccagcagccttcgagtagcgtcgaaggaagtgaatcggcagcggacgcgacagattacagtcgatggccttgaagatttgcagctccatctgtcggatctgccgggcagtgtaggtgtcgtccgtgatgaagacgaaatctccgattgccggcgggaacagctcctcgtacttggtggctatgaagagtgctgtcactcccaccaattgcaagtacgtgcgtttggtgtccttgaccacctgcaggtagcgatcaatgatagccaccgccagctggaaggtctctgcagccagatggaactgcaggtggacttcgttgatccaatcgatcagcacggctcgcatcttgtgggacacctccttctgtccggccaggtgatccttgtgaatgggctgctccagctccacctgatacaagtagtcgtagatgtcgtttacatattcggagaccagtaccaggttctccttgtcattggcatcaatgtcctcgattccagccaagcgcttgctggaaagggacatggtggtgggcatcgtagatgtggtcgtagtgactgcactgttgcccctaataaggggcatcctggtcgcatcctttttcacttccagtgagtccttcttggtttctggcagttccttcttggtctctgcctctttgcgggaaacagctactggttcccgtcgaattcctgaaactcccatcacgggtttggccaaagcggcacgcagtttggtcagcgacttcttcgacagattgctgtcctcgcgctttaaggtgggctcgttcacgttctcggaagaactggacttgactgtaactttggggattcaagatgaattggggtcagtatgatgcaagccattcaaaaattggaaatggtagatgatgatgattggtagatgattgctcttttgcttacctttagtgggttctacagtggtcttggtcggaacgcgattgcgcaccgaattcgaacgcaaaaacgccgacacgcccccctcgttgaccttgggcggaacggcgccattgccattgccattggtgctgcccagtggctgtttcttccagtggctgtccacccgagctttggcattgcgcagggcgtctgtgagcttgagatccttggagctgctcggtggagtaaccacatgtgattgcgaatggaatacttgatactggttcaaacacttactctttctgtgccgcatccttcgctgcgatgggacgacttatgccgcgattctgcaaatcgcccaaggccgcgcgttttgttgttgcctccatggaaggaaccgtcaatttcttcaattgcacttgcttgaagttctccgaagcgttctatcgaatattgtttaattagttttagaaaacaaatggagaagtgcaacaagtatagttgaatgcatatctgcactttgaaccctattctttaacatctttaattattgagcactgattttaattattttaaattgttaaagcaagatcagtttgttgcataataatgacttgatcatgaaatgcaccttttcaagggcggccattttgggaaaagcaccgcaagactgatcctcgatttatctcctctgtgatttggtgcgaaaaataggtgtggagagtactaattaacggtgcaagcaccgccggtagaaaattgcgccaaaatgtgagcaaggcaactgcaacaacgacaacaatgagcgcccgggacaaacggcactctttcttttccccctcccttcacacactcatcgcactatcgcagcgtcctctttgcccctctctacatgaccacgctgcaatggcgtctcgctgatgacgagcccactagtttgtgactttaccatgaccttttcgcggatgccacggtaatcttaatgttctagggatcaactcacctcatcgccacgcattttcagtgttgtgcccaccattttgattgcttcttttctatctgtacaaacacaattaacacgaagataggcagacgcttggctatcacttggtttggttgacttttgatcgcgtttctgtgaccgaacgcttgtttagctgttgaatttgttgtccgaatatatgattactaatagtttataatttacaagtcgagtgcgggattgtcaattctccgaaaacctgatcgagtttttgcacacgaagcgaggccaagctgccgtttgaatttgaaaatgggaatggggatggaagtaaactcgatgataaatgccgatgagtttgacgatatcgatttctggacttagttcccttttaagccgcagtggcgctcgagaataatcgatttattagagcagagcatgcaaaatagagatgcgatacgtgcgataattttcgatagttttagtgtgaccagtactggtgcacagcttatcgatgacagggctgaaacagtgctacccataaatttcaaatttaaatttaaaattagccgaaaaagaaaacgttacagtttgaaatttctgttagatattcaagctcaatccattttatacatattttaaaaatgaaaacttcatggattaaatttgatagttggttaaggttccccattttaataaagccatcgctttgactgccagtcgtcactcggttgcaccatccattgattgcatcaattaaaagttgatcacttcaattggctgtgttcggtttgtttttgtgcccccctgatttgcattcgctgatttaagatttcctgctgccacaggccgcagaacatcgaaactccgcggcggaaatgcagcataattcttgccactccgcagccttttttgctgatgatcagtgtcaagttttcgtctgctccatcattttcaagcacttgaccacaaaacaatcgccatcgcctcagaattttgcctctgtttttgtttagtaccccaaactctcctgttttttttttgtggccctttgctgcgtcttaacggttggcgcattcttcttctcttcttccggcgctctggctcattagcatatatttatgagtctgtttgcgctccaaaagtacttttgcgaactccggccaaaaagccgaacgagaatggagcgccagccgacgatcgcgagctcgagttttccgtgattttcacatttcattcgcaaaagtgccgccgtcgcgagtggttgcctcgctctcgccgcctctttctgcgcttc

SEQ ID NO: 6668 - DNA, 2606 bp, DROSOPHILA
gcagcttggcctcgcttcgtgtgcaaaaactcgatcaggttttcggagaattgacaatcccgcactcgacttgtaaattataaactattagtaatcatatattcggacaacaaattcaacagctaaacaagcgttcggtcacagaaacgcgatcaaaagtcaaccaaaccaagtgatagccaagcgtctgcctatcttcgtgttaattgtgtttgtacagatagaaaagaagcaatcaaaatggtgggcacaacactgaaaatgcgtggcgatgagaacgcttcggagaacttcaagcaagtgcaattgaagaaattgacggttccttccatggaggcaacaacaaaacgcgcggccttgggcgatttgcagaatcgcggcataagtcgtcccatcgcagcgaaggatgcggcacagaaagactccaaggatctcaagctcacagacgccctgcgcaatgccaaagctcgggtggacagccactggaagaaacagccactgggcagcaccaatggcaatggcaatggcgccgttccgcccaaggtcaacgaggggggcgtgtcggcgtttttgcgttcgaattcggtgcgcaatcgcgttccgaccaagaccactgtagaacccactaaagttacagtcaagtccagttcttccgagaacgtgaacgagcccaccttaaagcgcgaggacagcaatctgtcgaagaagtcgctgaccaaactgcgtgccgctttggccaaacccgtgatgggagtttcaggaattcgacgggaaccagtagctgtttcccgcaaagaggcagagaccaagaaggaactgccagaaaccaagaaggactcactggaagtgaaaaaggatgcgaccaggatgccccttattaggggcaacagtgcagtcactacgaccacatctacgatgcccaccaccatgtccctttccagcaagcgcttggctggaatcgaggacattgatgccaatgacaaggagaacctggtactggtctccgaatatgtaaacgacatctacgactacttgtatcaggtggagctggagcagcccattcacaaggatcacctggccggacagaaggaggtgtcccacaagatgcgagccgtgctgatcgattggatcaacgaagtccacctgcagttccatctggctgcagagaccttccagctggcggtggctatcattgatcgctacctgcaggtggtcaaggacaccaaacgcacgtacttgcaattggtgggagtgacagcactcttcatagccaccaagtacgaggagctgttcccgccggcaatcggagatttcgtcttcatcacggacgacacctacactgcccggcagatccgacagatggagctgcaaatcttcaaggccatcgactgtaatctgtcgcgtccgctgccgattcacttccttcgacgctactcgaaggctgctggcgccgaggacgagcaccatacgatgtccaagtacttcatcgagttagcttccgtggactacgaaatggccacttacaggccatcggagattgcagctgcctcactgttcctgtcgctgcacttgctcaatggaaaccaccgggccggtacaggattcaacgaccgtcactggacgcccactctgaccttctactcgcgatactcggccgcgcacttgcgtccgattacccggctgatcgcgaaactggcccgggacgctcctcaggccaagctgaaggccatctacaacaagtaccagggcagcaagttccagaagatcgcgctgcgaacggagctgaccggtgcgctgatggactcgattgtgggccagagccagaggaaatagtgcggtccaaggcggactggaagaccctgacttacctagtttagtttaatttgttttcatttttaaatttgtagcgtatttcattttctgttcgtttcgtgttcgttaaaaaatgcgtatagttaccgtagtcgcattgccaactatctttacctgcatcacccatccctaagatatcgtaatctgctggagtcccttgagcagttttcggctactgccaagagctggctccggcatctttgcccacggagcacaagttgctcgcgagccggccgctgggagtgagttcctccggtaagactaggaaccgaactaaactggagcccgtcagctcctttcgctgggtcaccatctcagtgggagcgagcggcggagcggtggacaccgagagagagagtgggcaacgagttcatttgctggccgaacacatcggcgttgtctctccaagaattatattttataattgtacccgtgaaatcatttcatcccctacctacctatcactaattgtatttgtcgttagtttttagtttcgatgggaatgaataaatccaaaaaattgtgcaaaattattcccataaatcgcataaaaaagagacgtagactatttgtaatttatatcatgtatttcgcacattcatacaaaaacaacttatgctagttatattgtttaccactaagcaacgattaaaacacgttttaactaactgatgtttcccaaaaatgtctctgaacaatacatagaaaataaagttttgtataattttataaac

SEQ ID NO: 6669 - protein, 530 aa, DROSOPHILA
MVGTTLKMRGDENASENFKQVQLKKLTVPSMEATTKRAALGDLQNRGISRPIAAKDAAQKDSKDLKLTDALRNAKARVDSHWKKQPLGSTNGNGNGAVPPKVNEGGVSAFLRSNSVRNRVPTKTTVEPTKVTVKSSSSENVNEPTLKREDSNLSKKSLTKLRAALAKPVMGVSGIRREPVAVSRKEAETKKELPETKKDSLEVKKDATRMPLIRGNSAVTTTTSTMPTTMSLSSKRLAGIEDIDANDKENLVLVSEYVNDIYDYLYQVELEQPIHKDHLAGQKEVSHKMRAVLIDWINEVHLQFHLAAETFQLAVAIIDRYLQVVKDTKRTYLQLVGVTALFIATKYEELFPPAIGDFVFITDDTYTARQIRQMELQIFKAIDCNLSRPLPIHFLRRYSKAAGAEDEHHTMSKYFIELASVDYEMATYRPSEIAAASLFLSLHLLNGNHRAGTGFNDRHWTPTLTFYSRYSAAHLRPITRLIAKLARDAPQAKLKAIYNKYQGSKFQKIALRTELTGALMDSIVGQSQRK

SEQ ID NO: 6670 - DNA, 3336 bp, DROSOPHILA
ggatatcgggcttgaccatgagcatagcatgaaatatgtattggaaaatgaaaggatgagagggtgtatgctgaaaatctcatccttaccaagttttaaatgtgtaattatagttcattgattgtttagacatgttatagcaaagcaaagttcttaaatattatagtaccacatagtgatcagcattttattcatggcatcagtacaatgaatttcttaaatttttccaaaacaagcctgtgtgtgaaagtaagaaaatatgttagcctgtattcttcgccgttttgtgattctatggctatgctcttggtctgtctaaatagccaccctgcgtggaattgacttaagttttagttaagttacgatttaatttcatctggcactgactatgactacgactgcgtcgtctttgatattcattcctttaccaatgccccactagttagacgtaaggcgttgcttaactcatgtgctaagtatgtatgtatctcaatggttaatgtttaagcgctgcatgtgaagttttattttagcacctaacgatagctacgtatctgtatctatactataatctacggtaatcccctgtatttatgtacatgtatgtttatatgcaatatgcttttgtaaataaaaaccaaagaagttaaattgtcacaacaaatgcgccggctcgaattaattaaaataaaaagtgttgtatagctggggatattgaaaacgtaattaaaagagccattcagtagcgaaatcagtttaaattgtctcaatgttgcaaggaatatgttacatcccatatgtaagaacaatatcaaatgtgtatagaaccgaagttatgttaaaatatatgtttaactcaattgaaatgagaaaatgtgtttataatacctctagaaggaataggggataaccgagatctacaaaattaaataattcaatttcattatgcgaagaatgttgtcagttcatgaactttaaaagaaaagtcatttaaaatattgctaggaactaaaaaagtatcaattttatttaaacaaagtttcacatgtactgaaaaaaaaacatataaatcataactagactttgcgcttgcgcttcgccttggtagctccttgaggagtcgacgtggcctgggcctccattatggaaagatccggtgtggaggctccctttccagccaccagtttcttgaccgccttgactttcggcctggctgccttgggctgagccagagttccaatggactttcgcgactttttagtctttcccgcctcggatgaatccgcttgtagcttgactttggttttggccggcttctttcccgcttcaggaatcgctgtctgggatgtttccagcatggcctgcgcggcagcggatgaagctgctttagatgctggcggattatccttggttccatcctcgggcttcttcttttttacagcctttgtgtaaatagcggtttattattatcaatttatcaaggaagctaattcttaaaaaatctattgaattgttagattagaataaaccacgtacttgttttgttttccgctcggttggtttactggatttttccttggaggccttcttttccttcatcttcgccttggcctctttcttttgaatcttctcctttaaaactttctcaactttggctttcttttccttctccttctgtttctttgccttcattttctccacagcctttgaggagttcttctgcttatcggtgagtttaaaggatcgcttaaccatcaccacttcgccgttggcttcggccaattttaaagctcgatggaggaggcgggcggttttcttcggatccttccactcctgaccattgtcctttaggtatgtcattatggcctgaaccgatgagcccgatcggctcgccaacttcccgatggccataagagctagggatatgagcgtaccctttggttttgggaccatcgacttggggttgtcagaatcggggggcaccagtttcgacccatcatcaggcggcggagtgggatagggattgcgatcagctccgagattatctgtctcgacctcgtcaccgtcctgccgatcctcctcctcatcctcctccatctcctcctcatcttcctccgggagctcctcttcttcgcccatattggagtcttcggattcgggatgatcatttggcatttcctcctcgctctcatcatccgagccatcattgcgttcaaccggctttagtttcatgttattagttggaaattaaattgaacaaaaattagaaatacaactcaacaacttttaagacacgaaaaaaggttaacaaaacggtaatcgaaaactcgcagtaacaatgatactttgcaatgactgttaatgcacagaaaacgggatcaaaagttatatcgcaaagctttttaagtcgattttgtaagtaccgtttattattcagataattataagtatacattattgaaatgtttgaagcgtttttaaccagaaatttgataaataaaacaataaatatgtatcatatttattaaataaataatatattaagtaatacaatagcaaatagttcagtttaaataacgcgattttttgtgaaacttatcgattatttattgaattagcagtgttattccatatggtaacactgctaaagaagaagaggagttaattctaaaaatgagcgtacggaaggtaaacaatttgaaatttatgtttttaaactgaatactaaagaactaatgcttagaaaacttgggtaagatgtgccttcagcgagatgaacttgaccaccagtcctgctccttcggaatccacgcctgcgaagcgcacaagaagtgcaagcaatgtgagcagctccagagtatcgaggtcgagaactccaagcataaatacaaagccaatacagattccggacgtggactcagtcgatcttactgccatggatgatgaccaggatgcggacatcactgtgccaccgccagaagtcaaagaaaactggatggaaagctttgagccagccaccagcgacgatttggcggtgcatccaaagaaggtcggagaactacgcgattggctgcgtcactgcgaagcggtgcgcaagaagttcccggctcaaatgtgtctacttaccgggcccactggtgctggcaaaaccaccacgttgcgagtcctggccaaggagttcggctaccagctgcaggagtggatcaatcctatcgattgtgaggtggtcaacaccttgggtgatcaaacgactggcgcctcctatgtgggctcccatctggaggcctttaaaagctttctgctccgtgcctcgcgatacaaatccttgctggactc

SEQ ID NO: 6671 - DNA, 1242 bp, DROSOPHILA
ttactgcgagttttcgattaccgttttgttaaccttttttcgtgtcttaaaagttgttgagttgtatttctaatttttgttcaatttaatttccaactaataacatgaaactaaagccggttgaacgcaatgatggctcggatgatgagagcgaggaggaaatgccaaatgatcatcccgaatccgaagactccaatatgggcgaagaagaggagctcccggaggaagatgaggaggagatggaggaggatgaggaggaggatcggcaggacggtgacgaggtcgagacagataatctcggagctgatcgcaatccctatcccactccgccgcctgatgatgggtcgaaactggtgccccccgattctgacaaccccaagtcgatggtcccaaaaccaaagggtacgctcatatccctagctcttatggccatcgggaagttggcgagccgatcgggctcatcggttcaggccataatgacatacctaaaggacaatggtcaggagtggaaggatccgaagaaaaccgcccgcctcctccatcgagctttaaaattggccgaagccaacggcgaagtggtgatggttaagcgatcctttaaactcaccgataagcagaagaactcctcaaaggctgtggagaaaatgaaggcaaagaaacagaaggagaaggaaaagaaagccaaagttgagaaagttttaaaggagaagattcaaaagaaagaggccaaggcgaagatgaaggaaaagaaggcctccaaggaaaaatccagtaaaccaaccgagcggaaaacaaaacaagctgtaaaaaagaagaagcccgaggatggaaccaaggataatccgccagcatctaaagcagcttcatccgctgccgcgcaggccatgctggaaacatcccagacagcgattcctgaagcgggaaagaagccggccaaaaccaaagtcaagctacaagcggattcatccgaggcgggaaagactaaaaagtcgcgaaagtccattggaactctggctcagcccaaggcagccaggccgaaagtcaaggcggtcaagaaactggtggctggaaagggagcctccacaccggatctttccataatggaggcccaggccacgtcgactcctcaaggagctaccaaggcgaagcgcaagcgcaaagtctagttatgatttatatgtttttttttcagtacatgtgaaactttgtttaaataaaattgatacttttttagttcctagc

SEQ ID NO: 6672 - protein, 322 aa, DROSOPHILA
MGEEEELPEEDEEEMEEDEEEDRQDGDEVETDNLGADRNPYPTPPPDDGSKLVPPDSDNPKSMVPKPKGTLISLALMAIGKLASRSGSSVQAIMTYLKDNGQEWKDPKKTARLLHRALKLAEANGEVVMVKRSFKLTDKQKNSSKAVEKMKAKKQKEKEKKAKVEKVLKEKIQKKEAKAKMKEKKASKEKSSKPTERKTKQAVKKKKPEDGTKDNPPASKAASSAAAQAMLETSQTAIPEAGKKPAKTKVKLQADSSEAGKTKKSRKSIGTLAQPKAARPKVKAVKKLVAGKGASTPDLSIMEAQATSTPQGATKAKRKRKV

SEQ ID NO: 6673 - DNA, 4768 bp, DROSOPHILA
tggtagatgcccttgatgttgtccggcacagtgtcgttggtggtgtggatcaccgtctgatcgagatcgacaagcaggaccagcttcctatccgccagcaggcggcgggtgtcgtcgtgcccgagcttctgggccagcttctgggtgaccttaagatcgggcatggtgtgcaccattggcaccgaggcctcggaggtctgtccctgcgggttaaatgtttaattattctatatgccccttgaggtgggtggcaatgtgcactcacattctcgttctgacgcaagtcggctccgcagtccgcgcacatgtccttgatgaccgtggtgtgtatgcactcggacagctccagaatggcatccctaaagaacaggctcggttagtgtgtatacggctgcataattgcattcccccacgcccaatcgccgcccgattgcaacccccaaactcaccccttcgtaagaagctccccttccttgcgaaggcgcttcttcaccactccggcgcgctgggacttgtacctctggatggcacagtccccgcccggctttcccgcgtccttcgcgtccttcgcgtccacgcccacgggctggtaaagaaacaagatttgggccgccgacacgaattgtccctcgcgaacccgccatttattgattaccgctctcgcctcgttctctcccagcgcagctctcaaaacaatgatgccgccaccgctggtgttgttgttgctgttgccgctggcgctgttcttggctccgcttcctccgccgccatcgtcgccttcggcagctccagatgcggccacgccccctggcgcgcggctgggcgtcgcgccctcctcgtccggtatgttctgcatcgcaaggcttacgtttttatatacaaacgatttgtttaaatcccagtgccttgttgtgtttgcaatttgtgtgaatattgcgcggaattcgcataagagcgcggacaacttttgtaactgctctcaaacagctgactgagcgcgaaaggcggaaagtactgatgggggtttcacttcgatttggttagttaatgtgcgtaattaaccattaattggtaattcaatttattttactcgtttcttttagttttgagttaaaatacaggatattcgtccaaagatatcgcagaatcatttgaatcagctgcttttgaccgttaaccaacactgtttaatcggcggcaaactagttcagtcgtattttgtttattaacttccaaaatgagtgataaaaccaaggaagacctgaagcgcagtgccccggaggaggagaatgagccccaggaggaatctgtgtcatccgaaaaagaggcggaaggcgaggaagacgcctggattggacccatgccttcagagcagagcgctcccgcgcccgccaagaaaaagaagggttattattaagaattagatttcatttaactataactaatcaataaatagtcctgccctatgaacacatctacctggaaaacctgcccaatgctgagagctacgagaggagctacatgcaccgcgatgtgatcactcatttggtgtgcacgaagacggatttcgtagtgaccgccagtctggatggacacatcaaattctggaagaagggcgagctgggcatcgagttcgtcaagcactttcgcagccacctaggtgggttcttgatccacataacgtgtatttcttcgtttaaccaagtgtttgttgcagtacccatcaaatcactgaccaccaacgacagcggcacgctgctctgctcggcggccacggatcagacagccaaggtcttcgatgttgtcaacttcgacatgatcaacatcattcgattgggctacacaccgcagtgcagtgagtggataaatgggccgggagatgccgtacaagcactggccatgtaagtaccttatcaatatctggagattaatgattctgattgctcctcctccagctcggattcagagagtagccgcatacacatctacgacgggcaaggaggcggagaagcccttcacaccttggagaaacttcactcggcgcccgtggtggcgatgtgcttgaatgtggccatggagaccgtcatttctgtcgatcgcaatggcattctcgaatactggcaaaactcgaagtacgactacaagtttccacagcgtctggtgaattttgactccaagctagacacaagtatagatcgatgattaagctgagtgaacctagactcatctaaatattaaccttttaggcctctttgagtttgccaaacagaagacccaagtcacgggtttagccgccacgccggatggaaagcgttttgccgccatttccacagatcgtaaggtccgcgtctttcagttcaacacgggcaagttgatccgggtattcgatgaagctctatctacatacacccaaatgcagcagacgaagcacgccctgcccaacatggagtttggcagaaggtaaactagaataaaatagttattatttattggtttaaagatatgaattccagaatggcggctgagcgggatctggagaagactgcccagaatgcaacccttaatattttgttcgacagcactggcaacttcttgctctacccaacgatgttgggcatcaaggtgatcaatgtggtaacgaatcgctgcgtcacaattctaggaaaaaccgacaacatacggcccctccaggtggccttgtttcaaggaagaattaagcgccaaaaagctgctataacaatggagcaagaggccagtgaaaacccagcactccagaatatccttaacgatccaacagccttttgcactgcttacaagttagttcataccgttttgaattatatctatgctgtattataatgtccattctactactcttattagaaaaagtcgcttctatttgtacagccgaagactgccctcggatctgcaggatgtcgaccgcgatattttcaacgagaagccctcgaaggaggacattatcgccgtgccggaagcttcaggtattttggtttggcttatcccattaacctttcttaactaacccaaaacatgtttctattgcacgccaacaatattttaagacgaaggttattcctatcagatatttcaagaacaattcattacaaaatgttccttctattctagtcgtgcaacgcatctacgagaacgtggtgctccacaccacgaaaggcgatatccacatgaggctgttcttcaaggaggttccaaagacggttgagaacttctgtgttcatgcgaaaaatgggtattatatatacgtcaactgttgagaactgtcccattgcaatcacattattttgtcaggtactacaatggacacatattccatcgcgtgatcaagggcttcatggtgcagactggcgatcccacgggaacgggcacgggcggcaaatccatttggggaagcgatttcaaagacgagttcgtgccgagcctgaaacacgatcggccctacacggtcagcatggctaacgcgggtccaaacacgaatggaagccagttctttatcacagtcctgcccacggtaaggatgaatgcagcggtgattagtttactttactggattgactaagtaccaatctctaattgcagccctggctcgacaacaagcacacggtgttcggaagagtttaccgcggcatggaggtggttctcaacatttgcaattccaaggcgaatcccaagacggacaagccctacgacgacattaaaattatttcgatacacttaagtaattgagcagagggctaaaataaaactttcagcgacactggttttcaaatcttcggagaaccgccaatgcgccgcaaagaattttggtatttttttttaactcggtttttttggtgttttcccagcccggcacactaaacagctgattcgtttcttgcattcggtgttccttttgtttcgatagtgcaattaatataaattgggacaactgcaaatctaatagtattattagaaccggaattagttgtgcaccttctagtattagagacttattaacataaccaacctgtgcctaccggaaatatagaggtacttctcgcaaattatgcgggttcttgcaagataatacgataccatttgtttatggctgagtaaaaaaaaaacaaagaactccaggctgacgagtcatttgtgcgtatcggcactgaatctgctccagattcgaaaactaggtttatttacatttgcatgcaaaggtatattgtcttcgatatgtgaattgtagtatacgtacatagttgcctttatttccagacatgagctaggccaaatataaccgctcgccatgtccaatatggatccaagtgatgtccgcagtaccgcccagctcatcctggccaacgctcggcagggaaatagcgcttacaacatgcagtatgatatgtgtgagtatagcaatgattaaatgatcccgcccaagccataacgatctcccaccgacttcagcacgggcacattccataaacctgattacggaggacttcttggccggttatatgcaggatggcaggatgtccgtggttcgaaggtttttctgcctcttcgtcacattcgacttggtcttcgtttcgctgctgtggctcatttgcattgtggtaggggatggaggcattccaatgagattacgatgctatttaccatgcatttctgttcccagatcaatggagacaatatattcactgccttccacaaacaaatcgtggagtacaccatctacaaatcgctctttgat

SEQ ID NO: 6674 - DNA, 2103 bp, DROSOPHILA
aaaggcggaaagtactgatgggggtttcacttcgatttgttttgagttaaaatacaggatattcgtccaaagatatcgcagaatcatttgaatcagctgcttttgaccgttaaccaacactgtttaatcggcggcaaactagttcagtcgtattttgtttattaacttccaaaatgagtgataaaaccaaggaagacctgaagcgcagtgccccggaggaggagaatgagccccaggaggaatctgtgtcatccgaaaaagaggcggaaggcgaggaagacgcctggattggacccatgccttcagagcagagcgctcccgcgcccgccaagaaaaagaaggtcctgccctatgaacacatctacctggaaaacctgcccaatgctgagagctacgagaggagctacatgcaccgcgatgtgatcactcatttggtgtgcacgaagacggatttcgtagtgaccgccagtctggatggacacatcaaattctggaagaagggcgagctgggcatcgagttcgtcaagcactttcgcagccacctagtacccatcaaatcactgaccaccaacgacagcggcacgctgctctgctcggcggccacggatcagacagccaaggtcttcgatgttgtcaacttcgacatgatcaacatcattcgattgggctacacaccgcagtgcagtgagtggataaatgggccgggagatgccgtacaagcactggccatctcggattcagagagtagccgcatacacatctacgacgggcaaggaggcggagaagcccttcacaccttggagaaacttcactcggcgcccgtggtggcgatgtgcttgaatgtggccatggagaccgtcatttctgtcgatcgcaatggcattctcgaatactggcaaaactcgaagtacgactacaagtttccacagcgtctggtgaattttgactccaagctagacacaagcctctttgagtttgccaaacagaagacccaagtcacgggtttagccgccacgccggatggaaagcgttttgccgccatttccacagatcgtaaggtccgcgtctttcagttcaacacgggcaagttgatccgggtattcgatgaagctctatctacatacacccaaatgcagcagacgaagcacgccctgcccaacatggagtttggcagaagatatgaattccagaatggcggctgagcgggatctggagaagactgcccagaatgcaacccttaatattttgttcgacagcactggcaacttcttgctctacccaacgatgttgggcatcaaggtgatcaatgtggtaacgaatcgctgcgtcacaattctaggaaaaaccgacaacatacggcccctccaggtggccttgtttcaaggaagaattaagcgccaaaaagctgctataacaatggagcaagaggccagtgaaaacccagcactccagaatatccttaacgatccaacagccttttgcactgcttacaaaaaaagtcgcttctatttgtacagccgaagactgccctcggatctgcaggatgtcgaccgcgatattttcaacgagaagccctcgaaggaggacattatcgccgtgccggaagcttcagtcgtgcaacgcatctacgagaacgtggtgctccacaccacgaaaggcgatatccacatgaggctgttcttcaaggaggttccaaagacggttgagaacttctgtgttcatgcgaaaaatgggtactacaatggacacatattccatcgcgtgatcaagggcttcatggtgcagactggcgatcccacgggaacgggcacgggcggcaaatccatttggggaagcgatttcaaagacgagttcgtgccgagcctgaaacacgatcggccctacacggtcagcatggctaacgcgggtccaaacacgaatggaagccagttctttatcacagtcctgcccacgtggctcgacaacaagcacacggtgttcggaagagtttaccgcggcatggaggtggttctcaacatttgcaattccaaggcgaatcccaagacggacaagccctacgacgacattaaaattatttcgatacacttaagtaattgagcagag

SEQ ID NO: 6675 - protein, 342 aa, DROSOPHILA
MSDKTKEDLKRSAPEEENEPQEESVSSEKEAEGEEDAWIGPMPSEQSAPAPAKKKKVLPYEHIYLENLPNAESYERSYMHRDVITHLVCTKTDFVVTASLDGHIKFWKKGELGIEFVKHFRSHLVPIKSLTTNDSGTLLCSAATDQTAKVFDVVNFDMINIIRLGYTPQCSEWINGPGDAVQALAISDSESSRIHIYDGQGGGEALHTLEKLHSAPVVAMCLNVAMETVISVDRNGILEYWQNSKYDYKFPQRLVNFDSKLDTSLFEFAKQKTQVTGLAATPDGKRFAAISTDRKVRVFQFNTGKLIRVFDEALSTYTQMQQTKHALPNMEFGRRYEFQNGG

SEQ ID NO: 6676 - DNA, 13629 bp, DROSOPHILA
tgcgagaatcaggtgagcgccggcctttttatatgacgcccgccgcctccaagaagagcttttggagagcttctcgctgcgctgctctctcgcgctgttaaaagttaaccgtagcacgatgcccttcccctacagagggtacttcgaattcggtccgccgcttgggctgacatcctcgaccttacctcgtagacctgattgataagccgctgtttaccggcgatctactcacggatctacgatttcatttgatcattcacaatctacctgaaatccattacttgtacttttcgcttattaagcttaaaagtgattggttattgatcaattagattgaatggtttttaatatttatagcacctattaaaacatatgtgggttcaatgaaaatatgtataaatattattgctagtgtcaaaaaggaaaattcttatttaattaaccgaattgaattagttattatttcaaaaaggtcctagtttaagcagactgcgtaaaattttttcagcagcagggtgtttttaattcggatttccaaagccactgttattggtgtaaacttctgttattgttgctggactctgtgcggcgcttaaattcgcattaacagcgataagtggtcagctgttgtgtgcgtgacggagatgtagaaattttgatttgcccgccatagtcggaccactttttcgtcgattattaatcgtctggcgagatcactagcgcgatagagtgggcggcattatcaattatggaaaggtacgccgaagtcgggtcaataaagccagccagcacgggtcagaatgttcggatcgtagtgattcatcgtggaaatcatgcgagtaccacgcgagtaaaactggaaacacgagcgaacttctccgatcgtttataagccaattactttgtgagaaatgcctcgcgatagtatacatttggaaaattatcttgtattagacaatgttctgattagtgaagttcgaccgtactgaatgcgttcattattcttaaacaatcaatgcgcgattgctacgtgtattgataggattagggtatatgtacattaagttctacaggataattcatcagcataatcgtacgaactacttcccttccactagggacgcttccgcaggacgcgctcgatgatctgtagagtgtgcggctccttgaggaaggtcctgtgtgtaccctccaccacatgcatgtcgatctgggcactgcaaatctgcaaggattggagggaaatggtcattaaataatgctatagataggttttataggcacttacctccttgaggccatagtcctgggccataatcgcattgtgctcggccgacttgatcaagaccacatcgctgtggagctgcttggcgcccttgtagctctcagaaagtagcagcttctgtttgaacatgcaggcggccttcttgatctgtgacaatgttcaaataatatggtaggttaggtctataaaaacaatataatgcaacaatatgtttttaagtgcctcacgctaattgcgaagaatacggaccataataatacactaactatttgtccggcacttttagaaggcactttttctcgtctgttaaaaagtacacacttgtaataaatactacttgaaattataaacacacacataagtgtaagcaaatgcatcaacttagtctacaagtactatagttaagccagtacttaatcatcaatcaaatagatagatgttcaacaaatgcttacgcttttatggtggtttggaaatctaattgacacatatattattaagcaatattgtaattagaatcgctagagacccaccacttctctggtttgctgcgtgtaaccagccagagtgtctgctagtttgtcgagcttggagggccatgtctggactccatcgaggagttgcagtagctgtaaggatcaatatatttataagaatggtttataggatcaagcacaacaaggaacatggaaccacctggttgtaatccacgtcggcgagcagagctccaaagtaggccaacgtcatggactgctgccggttgaggtcgtccgtctgcttcttggcctcctggacatagccgctggccatggtgggcgctccgtccagcatgatgaccttgaccccgaagcggcgctgctccagcgccacagcaatggcgtgggcgagcaggcagccgtaggagtagcctacgatgtggtacggtccgaggggctggagcttctggatctggcgcagatagtaggcggcacaggcctcgatggagtccaggggcacttgctccgtgcactgcagcccgtaggcggggcaggtgagcgaggcggccagcgcctccacggctattgtgaatccctcgatgggagccaagaagaacacagccggatcctcgctggccacgggcgcctttgaccgaaggcgcaccatcacctcctggggtaatacttccttggcgaataccttgcgcgtctcatcgctctggggctggacctccacgcaggcctcctccttgatccttgatagggtggaagaggctgagggcgatgagactgaagcggagggcggttcctgggcgtctatctggcgcagggcgctaaaggttagctggcggatctcctgggcgctcagcaccaggtcaaagtgacgctccaacgtctgcttgatctctgtgctcatcagcgagtccatgccaagatcgaagagggtggtcttatcggagacactctttacatccctcagtcccatgatattcgcgatcgtggctatcaagctcagccggttggcctgctccgtcttgcgtttttccgccaccaccatggaggccatgacgggatggggctgctgcagaaataggtccagagtctccagacagctgatcatccgctgcggcagagtgccgcccacaactgtttcgttgttgcccatgtgctcgatgatcagtccggtgtccccaattgctccccattgaatcgctgtgcccggataaccatattcctgccgctgctcgcatatcctttccatcgtggagttcgccagtccatagttggtctgtcccatgtttcccctgccgcaggacaagctggagaagcacacgaagtactccagtgcaggacaaatttcccgggagatcttgtccaagtgtatggtggccagtagcttcggtgcacttaccttttcaaagttcttcgggctttgatcttcgatcagtccatcccgtagtacagccgcgaggttaaagatacctccaaccagggccagcttattactaacctctaggagtctctggcagccaacagcggtggtcacatcgttggtatcgatctgaacctgaactccacggtcgtgccagcgacgaatcatcagggcctggtacccgctcttcaccccagagcgagagctcagaaccagaaagcgggctcctctggaaactagccagttggccagctccagaccgaatcccccaagtccccccaccaagatgtagctcttctctgggtgcatgtaggagcgcggtatggcctgaatttgcctaagtcgcgggagagccgcctgctgttcctcctccaaacgtaccttgatcaccaccttgccaatatgtttgccggacgccatgaaacggaacgccttctcgatctcctgctctgcaaagactgtggtaggcagcggctgcactgctccactcttgataccctccgccaccaacttggcaaccattagctgcatctcctcctccccctccatcacgctgtccagaaggattccgtggaaggaggtgttcttgaggaacaccgacatccctagcggagtgttgttgctcaagtcaaacttgccgatctccaggaagcggccattcaaagccagacagcgaatggaggcttgcagcttctcctcggagagagagttcagcacaagttccactccatttccgtgggtttcgctcatgatcaattgctcgaaagaggtgtctcgcgaattgccaatattcttagctttcagcttggggaatcgcttcagcaggaactcccgcttctccttgctgcccacagtggtgaagacagtcagtccgtgagccaaagccaccgaaatggccgcctgaccaactcctccagagccggcgtggatgaggatcctttcaccctccttcatttggcccctgaccaccaaagcgtaataaacggtggcataaacacagggaacggtcgaagcctgctccatggtccacttagatgggacttcccagaggagattcctgttggccaagcagttggtggccaaagatttggcagtaaccattgccattacacgacggccgcacgaatccctgccagcgaattccagaccaaggacacagtcctggtaggccagatccccaggcagagcatccactcccagtttaccggaggccaacatcacatcccggaaattgagcggagcatagtaaacggtgcagggctccaattgcgactggatgggactggaacgaggactctcgatccagcgaagtgatgagagatcccccttgaccagggtgttcacatacgcctgctccactggcagcatgggcggccgggattccatcttcaggtgacggtagctaccccagcttccatttctgtagacattgacgaccagatccttggccaactgtgcggcgtagaagggatcgtccagggagaactggggcacaccttcatccagaataaggtatagccgtaggaaatgccctccagcttccctcttcaggcagttcatcaagcccaaagctcctgaattgggttcaccctgggccaccaagtagaggtttttctcttcagcttgggcctttgcaatagagttttttagctcgttgacccacttgaactgtttattggtgaggtgaagtgtcagggcttggctggattgcaccttcgatagttttctgactaggacaagcactcgatctgtaccgaagaactgctccaaaactgaaaccagcttaagtttgttcaacttctcctttcctataatgttatacctgctggctgcttcctccaggagcaggaatcccgaatcggacttcagactatccaagcagtgctgcagatccttgacagagttctgggctagcatattcacagagtacacgaaatggcattgctgctccaccgcaccagctttgatatccttgactatcacccgaataccgtgctccttgagctgctcacccagttcggattcattggaggagctggtaaccaccgccatgtcgcccaccagaatcggttccctttcgatcagctcgagaagctggacggcactcagcgcatccaaagtggaccgggatccagccagttccacgcccttgagctttacagctccaccgctgttctcgatgatcaattgaatggccaccgctagagctgtgctccttgacttttcctgctcctcccgctgacccaagtgctgggaatgaggccagaatctatagcgctccaagctgggtggagattggccaccagaacgcctttgggtctgggcggtcttcatcttgtgtatctccactccaccgcacttgactacggaaatgttgcgatgccagttgacagttaacttctgttggtgcttctttgccagctccaggtgcttgagaggatctatcagtgccctctctattcccgtgggcacgtacagttctcggatatcattgctcaggatgcgaaactgcagcatggtgtccataaaactgatccaattgtcagcccactgcagctgacccgtcaccgccgaaatatccgactccaaaatgccctggaaaacaccagtgtagtcgtagcccctaagtcttagctccttgtaaatgtccttggtgctcagcttgttggagccggcgattcccggtagagatgacagctgaagctgctcctgctgcacattgctcaccagacggatcttgcccgatgtcaccaggcttgtgccttcacagatttcaaaggagctgctgcccggaaagaagttgagtgttagttttaccacagtgcccacgctaaggatcgtggcccgatggaagaccacatcctcgaatagcacgggcgtgcgcaagtagtccaatccctgctgttgggccagactcatccaggccagggtcatgtagccggttgcggggaacaagactctgccgtcgatcgtgtgccccgctagatagacgttttcctccttgcccaaatctagctccacactaagctgtcccgcctgtctgccgcccttgaacttggggtagttccacttctgtgtgtgatcccagcccactaaggagcccagcatgggagtgccacgggaaacgggataggggatggaaggggagatcttcaggatctgcggctgccctccggcagcgtagagtctgcccaactggctcagcaagaactcaaagttattggcatgacctcgctgcatcagactcacatagctaatctgcggacttaaggatcggagaatcgccctgaagagtccatggggtgcgatctccacgatgagagcgttttggggaatccgcttgacagcttgatgaaagagcacgggggatatgaggttgtttataaagtagccagccgatgccaggtggtttttctccgagtcccactccgcttctttcacactagtactaagccatcgaatactcttcttcttgggctccgtgatcagtcgctccagacttctacgcagcatgggagccgctccttcaatgtacggactgtggaaagcatagcctccagagccaacctctctcacgaaaattccctttgccgtgaggtcctctatcatcgcgtccatggatgacggtggcccggagaccgtgcaattgtcatcactgttgtgacacaccggatagcaatcctttgggatctgtgatccgatctgctcccagctcaaacctacagcagccatctttccgcgcggcaagtccggagtgtccaggacgctcctgccgcgccaataggcggccagaactgtttgctccgccgttagacatccgtccatgtaggctgcccccagctcaccagccgaatggccaatgattccatctggtcgtatgtccagcacccggagaagatctgtcaacgccacctgcacggcggacacggagacaaaggagtagagcatattgtcaaaggttcgctccgtggaacgggtaagcacgtctataagatcaaagtccacctgggccagaacctaaaaaagattaagagagaaaaacaatcgtatgcatatcgtatatacaaatctataaaagtattaaaaatgagaaacgacatttgaaatctgtgcaaaagttaaagagatgtcttacatatacaaattgataggttagcttctaaataaatagtattttatgtataataagctgcaatattagcgataaggttggcactacgtaacaaaagctattatattttcaaggttacatgggtgtctacgtagaattaaaccagttgttgttggtctagccgaactaaaatatttttttttttattttcattaatacggcttacattaggtttgtccaatgtgtgtccaacacacattgtccctataaaaaagttgaatttatgacacaaattataatcacattacgtattttcttcgaaagtgcaataaacaattttagtcatggtgcaagcgaagtgtaatctttatttggcgtcgagcaaaatatattacaatataataatgaaagaagagaattaaaaagaatacgaatgggatattttggttttgaaatgcatcatttatggccccaaaggcaaatgccatcggggctctaagcaaaaattgtgtttagactcattagagtgttcctctccacggaaatctttagtaaaaggcgaaagatttattcgacaattgaagagaaaccagagtaacctttcacgcccagccaaggatccctagattcgttctgtgatagaactttttgggaattctaggggacgagaaatcgaaaaggtacgaccctaaggtaggcaatgctaatggaagagggttggcacttcaggtaagaaactcgattggaatactgaaggctcttttttgtccgatcgatttaatctcataaaccattaaggaatatactattttatataataaagcgaattacgatgtactaaaaaaaattgaaattcaataatgaactcacctcggcgcagtgctgtatggagttccggaaaacctccagctgcatgagatccttagccatcctggcccattgactgcccatgccggcgtagacgaaccagatgggtcgctcctcctcctcgtagggcagcacctcctccttaacgcatccgctggtaccgagaacagcgtatcccctgaacggatgcaggggaataggatgtgagtggatgtcattgatgagggtcagcagctcctgatcgtgcctctgctcggtggcaactttcagcaactgattcactgcatcctccgtgcggccagaacaggtaactagactcagggactgttcggcctccccagccttcgggcatgccttaggctctttggctttagtgtgcgactttagtaccacatgggcattggctcctccaaagccgaaggagttcagacccacaatgccaccctgccagggaagattgcgatccaccaccttaagcttaccctcgaccagagccggaaccgaaggattgggcgtgcgatagtgcagattcttcggaataatgccctcctccatggcgatgatcatcttggccagggcactcactcccgaggctggctccgcgtgacccatgttcgacttcactgagccaataagcagcggagtggatcgcgaggggcgacagaagaagttgctcagcatgttggcttcctggtcatcgcccaccggtgtgccgctgccgtgtgcctccacgtagaccacctcgtccggattgaggccgatctcgctgtaggtctcctccagcagggcctgctgcatgcggccgtctgggaaggttacgccctgctccttgaatccgtccgtattggtccgaacatttaggatgctggcgtacacccgcttggcctccttacgcctctggagcagcacaacggcgcaggtgtccgcccgggcatagccgttggccgccgcatcgaaggtcttgcaggagccgtcgtggctcacgatgcccagcctgaggaactggagggcaaagatgggctttaggatgagattcacgcccgcaaccagggcgtaatcacagcgacccgcccgcatgtccgcgaaggcgtggttaagggccaccagcgagctggagcatgcggtgtccacgataaagctgggccccttgaagtcgaacgtgtaggagatgcgattggcgaacatggcacgcgcacagcccgtcaggcagtagccgttgatactgctcggctccatgttggggatctcgtgctccgtctccacaaaggacaggcctatgtagacgcccgtccgactgccgcgcagctgtacgggattgatgcccgcatcgatgatcgcctcgtgggtcagctccagcagcatccgcatgcaggggtccatcagctccgcctgcttctggtggacgctaaagaacttgtcgtcgaacttctccagatcggagtccttcattttggccatacgctcggggagtccatagatgccttttagtgttgatgcaagtttttacattacaatcatatttaaagtagatggtttcatattcatttctaacggcccggcggcatttcgcggccaggcactaaaaaaattgcctcggataatgtgctcatcactccgctccattgcgtaagctctcgctccacaactgaagcggcgatcgagacatgatgatccccgacactcgatggggattctacgttggcttgccataaccagttgagaattacttgtgcgcctgaaggaaaacgagggcgctctgaaagatgatcgcgaaagcgaaccaagaggggtggatgtttgctatgagtcagccacttgcgccgctcgaacggcttgctttcaaacgagggggggggggagacccaagcgatagtgttattccttgcttggccaattgagcagtcgatcgaaaatatattgttctctttcaatttcttataggcattaggataactagttctattgaaaaactgtacaaatcagcccactattaatctattatcaaatattgtcgtgggattaagtataattagctctgtttattagatttacgaaacaatccatcatttagctgtgcgatctgggtttttgatcaagttatgcttagaaaacagctcggaaaagatgttaaaccgatttttgtatataaataatcaatattttgtctataactatccaaaaaatgatgaacgagtggagtatcatagctccctgaattcgtaatgaaatttactatcgatctgtattcaagccttgaaattttaaaattttgacatttttcgtaaaatttgatgatggtaccccttatcaaaaatgcgaaaattagtcaaaaaatggattttcgaaaattaacaaaaaagtgatatgggtggttagattagttaattagctgtacaaaacagtaattccctcagctttgcgaccttttttggccagattttgatgaagagaccctttgaatatatggtatttttgccataagtttgcattttgtgtctactcccccaaaaatttcataaattaatgtgatatatgcttggtacttgcctgcctcccaacggcgcggctcatctgtgaccatgtcgatgccgttgagcaggttgtacttgaactcctcgatgttgctgctctccggcagcttcccggaaagtcccgagatcacaatgtccgcatcctcaccagcggccgattccccctgggctttcttcctgctcggcatttcggcgttttttctttgttctggctcagtctgtatgagggcccaaatatacaaggatctagaaatatcacaaaagaaccctgggtaattactcataaatatccacaatctatatatcctatagcatccataattaaaaggaatacttttaagcatacaaaaatccatttagaagttaataatttatagaaaatgtagcataagttgaactacaaatttaaccttgaatatattttagaaatttcaacaagtcgattcaacttaatcggactcttggtatcagcatgtaaacaatatttccatcacattctcacgaaagcaagaaattcgtcaccttagagtaaaaaaaacactgttagctgataaagctattggtttatgattttgtcgattttttcgaaatgggtacaaacaaattattctatctatctattctataatatggatgggagtgtgagtttgtggaatttcagtggcctgcacttcatttgactatcatttcagaggcgatctactgaagtgcatagataaggtgcaccattagaaagtgctcaatcggcaaatcatgagtaatatgctcgatatcgcagcgattcagaccacttgatttaatgaatattgtcggcctgctgataaggaaccactgcaccggagtcacctttccttccccatcaacactacgggcacggatcgtacgattccaccactcagcagaatccaacctgaagcagcaggcagggagcagggagctgggtgcgggtcactgggttccctgttgccaagttacgggagtcggctctcgagatagtcgtccagctctcgactgcgtgcactgcaacgggtcgggatcgcggacgtggacgcagaggggcagagatccgataagcttttgatagaatattcccccaaaatggggattcaacattccaatcagcgaaggcgacgcgtgccagaactcacacgatggacacaatgtactcaatgttcgctttgatgggttcaaaggtgaccggaatacagattcaaagcgttttgacaagtaattgcgataatagtggcagaattttttatgatcttcttctcactttttataaatgtttcttgccacattttatatgtttaaggattcgcaatatcctaggagttcgattttttggtaatccatgggtttttgtgcatttttacaggctttgatggtttcaaaatatttcgagtccttatttcacaaaaaataaatccaaaggacacatatatatggtttaatatattctcctgttagcattcacaattcattggcattttgcgattagggagccacgttcggttaattaaaatactacaccattctcattagacacttgactaaattctttgaattaaagataagtaggctgactatttggaacttcagtttcgtggattcgattgtatggcgtgttatcctggctgtgtcaaatacgtcttggttttaacaattcgcttttctcggaaaataaatctagttcgcattttagaacacgccatttctttggtacacttcacttgactcacatttcgtatgccactaattcggatcgtatcgtttttggacggcaccttattcacttgggttcactgatcgcgtatccttttcgaatgtgccgtgcgttttgcgggacaaccaggatgtcagctgggctagtaggtccttctagttgggtgtggttgtatatccttttggtgggcacgtatagatccgacttgttgcgcagacagactgaacaagggctgcactcgacggattccttatatatatccggtttgcggggtccggggacggcggtggccacccgatggcgcattttaatttccccgtaaccatagcatatagaaaacccgatctcattatggcaaccaggcgcgctgaattattcatttctatgcaaaacgcgcctctaacttcgaccaaatgaaatagaaaatgcgtcgacgagcaggacaggtgtatccatttggttttcatttttccgtgcccctgccctggtaattagtccaagtgtgcgccatcgcagccgactacgcctagttaacccagttgctccacagcccgcccgtctggttcaataacacgccgcggttgcaagccattcgcaattgtattatttattggacagaacagatttcatagccatggtttctcttctagttttgcttctttggcgctgccccaggagtcttcttgggcttttttaggcgtccgcctgaccgcttcttggccgccaacttggttgccgtggtcgtcgccatccgctgcttggtcagctggcgtcccaagcggagagggatcctgttcctgacaggcaccttagtcttggatttacttctgcggtacctgatgggcatgcggaccgtcttggtcatcgagaggatgcccatgttgacgcccaactccagggcaaactccaccgcacgcttgaggctcccgaaggctctgacgtgctcctcgagcataacgtccttgatgtgtttaaccacgtcgtccacagaagagcctaaaaattttgaatgattttatgcaataatatacgagtacatacttccaaagttattagctccataagtcacttacacatttgcgtctcgcgacttagcatgtccataatatacggcagcaacgtaggtttatgtttatccattataaattttggtttactacttgtagtctcagaaaatgaatgtttgtgtgccgatccaaataga

SEQ ID NO: 6677 - DNA, 7590 bp, DROSOPHILA
tcggatctatacgtgcccaccaaaaggatatacaaccacacccaactagaaggacctactagcccagctgacatcctggttgtcccgcaaaacgcacggcacattcgaaaaggatacgcgatcagtgaacccaagtgaataaggtgccgtccaaaaacgatacgatccgaattagtggcatacgaaatatccttgtatatttgggccctcatacagactgagccagaacaaagaaaaaacgccgaaatgccgagcaggaagaaagcccagggggaatcggccgctggtgaggatgcggacattgtgatctcgggactttccgggaagctgccggagagcagcaacatcgaggagttcaagtacaacctgctcaacggcatcgacatggtcacagatgagccgcgccgttgggaggcaggcatctatggactccccgagcgtatggccaaaatgaaggactccgatctggagaagttcgacgacaagttctttagcgtccaccagaagcaggcggagctgatggacccctgcatgcggatgctgctggagctgacccacgaggcgatcatcgatgcgggcatcaatcccgtacagctgcgcggcagtcggacgggcgtctacataggcctgtcctttgtggagacggagcacgagatccccaacatggagccgagcagtatcaacggctactgcctgacgggctgtgcgcgtgccatgttcgccaatcgcatctcctacacgttcgacttcaaggggcccagctttatcgtggacaccgcatgctccagctcgctggtggcccttaaccacgccttcgcggacatgcgggcgggtcgctgtgattacgccctggttgcgggcgtgaatctcatcctaaagcccatctttgccctccagttcctcaggctgggcatcgtgagccacgacggctcctgcaagaccttcgatgcggcggccaacggctatgcccgggcggacacctgcgccgttgtgctgctccagaggcgtaaggaggccaagcgggtgtacgccagcatcctaaatgttcggaccaatacggacggattcaaggagcagggcgtaaccttcccagacggccgcatgcagcaggccctgctggaggagacctacagcgagatcggcctcaatccggacgaggtggtctacgtggaggcacacggcagcggcacaccggtgggcgatgaccaggaagccaacatgctgagcaacttcttctgtcgcccctcgcgatccactccgctgcttattggctcagtgaagtcgaacatgggtcacgcggagccagcctcgggagtgagtgccctggccaagatgatcatcgccatggaggagggcattattccgaagaatctgcactatcgcacgcccaatccttcggttccggctctggtcgagggtaagcttaaggtggtggatcgcaatcttccctggcagggtggcattgtgggtctgaactccttcggctttggaggagccaatgcccatgtggtactaaagtcgcacactaaagccaaagagcctaaggcatgcccgaaggctggggaggccgaacagtccctgagtctagttacctgttctggccgcacggaggatgcagtgaatcagttgctgaaagttgccaccgagcagaggcacgatcaggagctgctgaccctcatcaatgacatccactcacatcctattcccctgcatccgttcaggggatacgctgttctcggtaccagcggatgcgttaaggaggaggtgctgccctacgaggaggaggagcgacccatctggttcgtctacgccggcatgggcagtcaatgggccaggatggctaaggatctcatgcagctggaggttttccggaactccatacagcactgcgccgaggttctggcccaggtggactttgatcttatagacgtgcttacccgttccacggagcgaacctttgacaatatgctctactcctttgtctccgtgtccgccgtgcaggtggcgttgacagatcttctccgggtgctggacatacgaccagatggaatcattggccattcggctggtgagctgggggcagcctacatggacggatgtctaacggcggagcaaacagttctggccgcctattggcgcggcaggagcgtcctggacactccggacttgccgcgcggaaagatggctgctgtaggtttgagctgggagcagatcggatcacagatcccaaaggattgctatccggtgtgtcacaacagtgatgacaattgcacggtctccgggccaccgtcatccatggacgcgatgatagaggacctcacggcaaagggaattttcgtgagagaggttggctctggaggctatgctttccacagtccgtacattgaaggagcggctcccatgctgcgtagaagtctggagcgactgatcacggagcccaagaagaagagtattcgatggcttagtactagtgtgaaagaagcggagtgggactcggagaaaaaccacctggcatcggctggctactttataaacaacctcatatcccccgtgctctttcatcaagctgtcaagcggattccccaaaacgctctcatcgtggagatcgcaccccatggactcttcagggcgattctccgatccttaagtccgcagattagctatgtgagtctgatgcagcgaggtcatgccaataactttgagttcttgctgagccagttgggcagactctacgctgccggagggcagccgcagatcctgaagatctccccttccatcccctatcccgtttcccgtggcactcccatgctgggctccttagtgggctgggatcacacacagaagtggaactaccccaagttcaagggcggcagacaggcgggacagcttagtgtggagctagatttgggcaaggaggaaaacgtctatctagcggggcacacgatcgacggcagagtcttgttccccgcaaccggctacatgaccctggcctggatgagtctggcccaacagcagggattggactacttgcgcacgcccgtgctattcgaggatgtggtcttccatcgggccacgatccttagcgtgggcactgtggtaaaactaacactcaacttctttccgggcagcagctcctttgaaatctgtgaaggcacaagcctggtgacatcgggcaagatccgtctggtgagcaatgtgcagcaggagcagcttcagctgtcatctctaccgggaatcgccggctccaacaagctgagcaccaaggacatttacaaggagctaagacttaggggctacgactacactggtgttttccagggcattttggagtcggatatttcggcggtgacgggtcagctgcagtgggctgacaattggatcagttttatggacaccatgctgcagtttcgcatcctgagcaatgatatccgagaactgtacgtgcccacgggaatagagagggcactgatagatcctctcaagcacctggagctggcaaagaagcaccaacagaagttaactgtcaactggcatcgcaacatttccgtagtcaagtgcggtggagtggagatacacaagatgaagaccgcccagacccaaaggcgttctggtggccaatctccacccagcttggagcgctatagattctggcctcattcccagcacttgggtcagcgggaggagcaggaaaagtcaaggagcacagctctagcggtggccattcaattgatcatcgagaacagcggtggagctgtaaagctcaagggcgtggaactggctggatcccggtccactttggatgcgctgagtgccgtccagcttctcgagctgatcgaaagggaaccgattctggtgggcgacatggcggtggttaccagctcctccaatgaatccgaactgggtgagcagctcaaggagcacggtattcgggtgatagtcaaggatatcaaagctggtgcggtggagcagcaatgccatttcgtgtactctgtgaatatgctagcccagaactctgtcaaggatctgcagcactgcttggatagtctgaagtccgattcgggattcctgctcctggaggaagcagccagcaggtataacattataggaaaggagaagttgaacaaacttaagctggtttcagttttggagcagttcttcggtacagatcgagtgcttgtcctagtcagaaaactatcgaaggtgcaatccagccaagccctgacacttcacctcaccaataaacagttcaagtgggtcaacgagctaaaaaactctattgcaaaggcccaagctgaagagaaaaacctctacttggtggcccagggtgaacccaattcaggagctttgggcttgatgaactgcctgaagagggaagctggagggcatttcctacggctataccttattctggatgaaggtgtgccccagttctccctggacgatcccttctacgccgcacagttggccaaggatctggtcgtcaatgtctacagaaatggaagctggggtagctaccgtcacctgaagatggaatcccggccgcccatgctgccagtggagcaggcgtatgtgaacaccctggtcaagggggatctctcatcacttcgctggatcgagagtcctcgttccagtcccatccagtcgcaattggagccctgcaccgtttactatgctccgctcaatttccgggatgtgatgttggcctccggtaaactgggagtggatgctctgcctggggatctggcctaccaggactgtgtccttggtctggaattcgctggcagggattcgtgcggccgtcgtgtaatggcaatggttactgccaaatctttggccaccaactgcttggccaacaggaatctcctctgggaagtcccatctaagtggaccatggagcaggcttcgaccgttccctgtgtttatgccaccgtttattacgctttggtggtcaggggccaaatgaaggagggtgaaaggatcctcatccacgccggctctggaggagttggtcaggcggccatttcggtggctttggctcacggactgactgtcttcaccactgtgggcagcaaggagaagcgggagttcctgctgaagcgattccccaagctgaaagctaagaatattggcaattcgcgagacacctctttcgagcaattgatcatgagcgaaacccacggaaatggagtggaacttgtgctgaactctctctccgaggagaagctgcaagcctccattcgctgtctggctttgaatggccgcttcctggagatcggcaagtttgacttgagcaacaacactccgctagggatgtcggtgttcctcaagaacacctccttccacggaatccttctggacagcgtgatggagggggaggaggagatgcagctaatggttgccaagttggtggcggagggtatcaagagtggagcagtgcagccgctgcctaccacagtctttgcagagcaggagatcgagaaggcgttccgtttcatggcgtccggcaaacatattggcaaggtggtgatcaaggtacgtttggaggaggaacagcaggcggctctcccgcgacttaggcaaattcaggccataccgcgctcctacatgcacccagagaagagctacatcttggtggggggacttgggggattcggtctggagctggccaactggctagtttccagaggagcccgctttctggttctgagctctcgctctggggtgaagagcgggtaccaggccctgatgattcgtcgctggcacgaccgtggagttcaggttcagatcgataccaacgatgtgaccaccgctgttggctgccagagactcctagaggttagtaataagctggccctggttggaggtatctttaacctcgcggctgtactacgggatggactgatcgaagatcaaagcccgaagaactttgaaaaggtaagtgcaccgaagctactggccaccatacacttggacaagatctcccgggaaatttgtcctgcactggagtacttcgtgtgcttctccagcttgtcctgcggcaggggaaacatgggacagaccaactatggactggcgaactccacgatggaaaggatatgcgagcagcggcaggaatatggttatccgggcacagcgattcaatggggagcaattggggacaccggactgatcatcgagcacatgggcaacaacgaaacagttgtgggcggcactctgccgcagcggatgatcagctgtctggagactctggacctatttctgcagcagccccatcccgtcatggcctccatggtggtggcggaaaaacgcaagacggagcaggccaaccggctgagcttgatagccacgatcgcgaatatcatgggactgagggatgtaaagagtgtctccgataagaccaccctcttcgatcttggcatggactcgctgatgagcacagagatcaagcagacgttggagcgtcactttgacctggtgctgagcgcccaggagatccgccagctaacctttagcgccctgcgccagatagacgcccaggaaccgccctccgcttcagtctcatcgccctcagcctcttccaccctatcaaggatcaaggaggaggcctgcgtggaggtccagccccagagcgatgagacgcgcaaggtattcgccaaggaagtattaccccaggaggtgatggtgcgccttcggtcaaaggcgcccgtggccagcgaggatccggctgtgttcttcttggctcccatcgagggattcacaatagccgtggaggcgctggccgcctcgctcacctgccccgcctacgggctgcagtgcacggagcaagtgcccctggactccatcgaggcctgtgccgcctactatctgcgccagatccagaagctccagcccctcggaccgtaccacatcgtaggctactcctacggctgcctgctcgcccacgccattgctgtggcgctggagcagcgccgcttcggggtcaaggtcatcatgctggacggagcgcccaccatggccagcggctatgtccaggaggccaagaagcagacggacgacctcaaccggcagcagtccatgacgttggcctactttggagctctgctcgccgacgtggattacaaccagctactgcaactcctcgatggagtccagacatggccctccaagctcgacaaactagcagacactctggctggttacacgcagcaaaccagagaagtgatcaagaaggccgcctgcatgttcaaacagaagctgctactttctgagagctacaagggcgccaagcagctccacagcgatgtggtcttgatcaagtcggccgagcacaatgcgattatggcccaggactatggcctcaaggagatttgcagtgcccagatcgacatgcatgtggtggagggtacacacaggaccttcctcaaggagccgcacactctacagatcatcgagcgcgtcctgcggaagcgtccctagtggaagggaagtagttcgtacgattatgctgatgaattatcctgtagaacttaatgtacatataccctaatcctatcaatacacgtagcaatcgcgcattgattgtttaagaat

SEQ ID NO: 6678 - protein, 2409 aa, DROSOPHILA
MPSRKKAQGESAAGEDADIVISGLSGKLPESSNIEEFKYNLLNGIDMVTDEPRRWEAGIYGLPERMAKMKDSDLEKFDDKFFSVHQKQAELMDPCMRMLLELTHEAIIDAGINPVQLRGSRTGVYIGLSFVETEHEIPNMEPSSINGYCLTGCARAMFANRISYTFDFKGPSFIVDTACSSSLVALNHAFADMRAGRCDYALVAGVNLILKPIFALQFLRLGIVSHDGSCKTFDAAANGYARADTCAVVLLQRRKEAKRVYASILNVRTNTDGFKEQGVTFPDGRMQQALLEETYSEIGLNPDEVVYVEAHGSGTPVGDDQEANMLSNFFCRPSRSTPLLIGSVKSNMGHAEPASGVSALAKMIIAMEEGIIPKNLHYRTPNPSVPALVEGKLKVVDRNLPWQGGIVGLNSFGFGGANAHVVLKSHTKAKEPKACPKAGEAEQSLSLVTCSGRTEDAVNQLLKVATEQRHDQELLTLINDIHSHPIPLHPFRGYAVLGTSGCVKEEVLPYEEEERPIWFVYAGMGSQWARMAKDLMQLEVFRNSIQHCAEVLAQVDFDLIDVLTRSTERTFDNMLYSFVSVSAVQVALTDLLRVLDIRPDGIIGHSAGELGAAYMDGCLTAEQTVLAAYWRGRSVLDTPDLPRGKMAAVGLSWEQIGSQIPKDCYPVCHNSDDNCTVSGPPSSMDAMIEDLTAKGIFVREVGSGGYAFHSPYIEGAAPMLRRSLERLITEPKKKSIRWLSTSVKEAEWDSEKNHLASAGYFINNLISPVLFHQAVKRIPQNALIVEIAPHGLFRAILRSLSPQISYVSLMQRGHANNFEFLLSQLGRLYAAGGQPQILKISPSIPYPVSRGTPMLGSLVGWDHTQKWNYPKFKGGRQAGQLSVELDLGKEENVYLAGHTIDGRVLFPATGYMTLAWMSLAQQQGLDYLRTPVLFEDVVFHRATILSVGTVVKLTLNFFPGSSSFEICEGTSLVTSGKIRLVSNVQQEQLQLSSLPGIAGSNKLSTKDIYKELRLRGYDYTGVFQGILESDISAVTGQLQWADNWISFMDTMLQFRILSNDIRELYVPTGIERALIDPLKHLELAKKHQQKLTVNWHRNISVVKCGGVEIHKMKTAQTQRRSGGQSPPSLERYRFWPHSQHLGQREEQEKSRSTALAVAIQLIIENSGGAVKLKGVELAGSRSTLDALSAVQLLELIEREPILVGDMAVVTSSSNESELGEQLKEHGIRVIVKDIKAGAVEQQCHFVYSVNMLAQNSVKDLQHCLDSLKSDSGFLLLEEAASRYNIIGKEKLNKLKLVSVLEQFFGTDRVLVLVRKLSKVQSSQALTLHLTNKQFKWVNELKNSIAKAQAEEKNLYLVAQGEPNSGALGLMNCLKREAGGHFLRLYLILDEGVPQFSLDDPFYAAQLAKDLVVNVYRNGSWGSYRHLKMESRPPMLPVEQAYVNTLVKGDLSSLRWIESPRSSPIQSQLEPCTVYYAPLNFRDVMLASGKLGVDALPGDLAYQDCVLGLEFAGRDSCGRRVMAMVTAKSLATNCLANRNLLWEVPSKWTMEQASTVPCVYATVYYALVVRGQMKEGERILIHAGSGGVGQAAISVALAHGLTVFTTVGSKEKREFLLKRFPKLKAKNIGNSRDTSFEQLIMSETHGNGVELVLNSLSEEKLQASIRCLALNGRFLEIGKFDLSNNTPLGMSVFLKNTSFHGILLDSVMEGEEEMQLMVAKLVAEGIKSGAVQPLPTTVFAEQEIEKAFRFMASGKHIGKVVIKVRLEEEQQAALPRLRQIQAIPRSYMHPEKSYILVGGLGGFGLELANWLVSRGARFLVLSSRSGVKSGYQALMIRRWHDRGVQVQIDTNDVTTAVGCQRLLEVSNKLALVGGIFNLAAVLRDGLIEDQSPKNFEKVSAPKLLATIHLDKISREICPALEYFVCFSSLSCGRGNMGQTNYGLANSTMERICEQRQEYGYPGTAIQWGAIGDTGLIIEHMGNNETVVGGTLPQRMISCLETLDLFLQQPHPVMASMVVAEKRKTEQANRLSLIATIANIMGLRDVKSVSDKTTLFDLGMDSLMSTEIKQTLERHFDLVLSAQEIRQLTFSALRQIDAQEPPSASVSSPSASSTLSRIKEEACVEVQPQSDETRKVFAKEVLPQEVMVRLRSKAPVASEDPAVFFLAPIEGFTIAVEALAASLTCPAYGLQCTEQVPLDSIEACAAYYLRQIQKLQPLGPYHIVGYSYGCLLAHAIAVALEQRRFGVKVIMLDGAPTMASGYVQEAKKQTDDLNRQQSMTLAYFGALLADVDYNQLLQLLDGVQTWPSKLDKLADTLAGYTQQTREVIKKAACMFKQKLLLSESYKGAKQLHSDVVLIKSAEHNAIMAQDYGLKEICSAQIDMHVVEGTHRTFLKEPHTLQIIERVLRKRP

SEQ ID NO: 6679 - DNA, 2328 bp, DROSOPHILA
atgtcaaggcaatgaaaattcatttaaatccaaagaagagtgtataactaagtccgtggagtaatatcttttctaaaatatctttagaataaagattgtatgattccaatctgtattgggtgttttctatttttaagattttaaaagacctctcgacctcattaatatgactgtgaaatcctaaattgttcacacttaacggaaaactgtatgcgatatgaatatgagtataaaatacgcgacgcggttcgcttaggcttcaaagttttgttgactaagtcagttaaaggttcccaatatctttcgccatgaagctgctgattcttctttttgttttcatcgctcttgcaagcaattctttggctctgaaaaatggtaaacttaaattaccttgtttcatagttgatcgtcccaatttaactatttaatgttttatgtttgtagaaatctgtggattacccgctgccgctaatggtaattgcttggcattgttttctcgctggtcttatgatgctcaatataacgtatgctttaattttatctacggcggatgtcagggcaacgaaaattcatttgaatcccaggaagagtgtataaataagtgcgtggagtaatatctctacgaagatatctgtatctatgatctgaatgtatgcgtacgaaacacaagaaacatttagttagccttacaaatcatcatttaagagcaagaaactttctgaaacgaggggaaggcacaatctaagcttgattttttaatctagcccgaagtacataatgcttcactatttaatgtacaaatagatttacaagactaacatctgcacttacatgtatgtgccagttcttagctatctgcctactttctatataaggctggcggacatgcaagataagccatagccatattcttcccgatttctgcgtatatgtacacctctataaaacgctggcgagacaaagtctggcccaccatagttcaactgaagttttgtcgaaaatgaagtatatcggctttgtcgccatcgcctttttgctgagtctgtccggcagtcgtttatgggtgcatgccaagccgggtgagtaggaatatgattgctccagaccgtgctaaactatggatgattcccgatcgtgtagagatgtgccagcagccctcttcgatggtgggcatggcgcaggatggagctgcctgcatggcttttatgccggcctggacctatgatgcctccaaaaacgcctgcaccgagttcattttcggtggctgcggtggaaactccaatcagttctctaccaagagtgaatgcgaaaaggcctgcaaggactaaagaaatacgaaatcacatcttcacatcttgggcaaaacccacagcctaaaacaaaacaatcttgtaacttaaaagccaaaacaaacagtcggcaatctggtttcgcaaaatggcaaacaaaataaaaaccatactcaacaatatcaaggtttgttgtttttgtcagtgctcaagagacctgaccctcgtcgattgataaccgatccggtttgtgcctatagtatataaaacgaccaacatctcggatcggtcaacagttcggtttgagatttcagtaaagcaagcccaagcaaaatcaatatgaaatacctagtcgtttttgcactcatctgctgtcttgtggcatcagcatttgcgactttgaaaaaccgtaagtaataacggagaaagcgatcaaatttatagctactaggctttactagcatgaggtacagaatggtctcgctgtgttgtgctaaaaatggtgcttcaatttgaacttgcagcaatctgtggcgaggagtttggcgtcaagggtacttgccgttccctgcaacccatgtggacctatcgcccagatacgaacgagtgcttcaccttcaattactccggctgccacggaaacaataatctattccacaaaaagttggagtgcgaagaaaaatgcaaaatataagtgcccatttggttgtgaataaagttggaagttcggttttgttatcctaatgtgatcatctttattgttttctttatgaactcgtttaatatttattaatattggtttggcggttactatacttagttttcgattcagtgtcataggctaggctatatgtgttcgattcgtcgttagctatatctatatgctgtagtttataggtatgtatatatattgcattagattttgtatatatgttcatatgcatttgcgtgttaattaatattgttaatcattggagttgtcctcggctgttgctgattatgttgggttcaatcgggggttatcttttcgcaatctaac

SEQ ID NO: 6680 - DNA, 267 bp, DROSOPHILA
atgaagtatatcggctttgtcgccatcgcctttttgctgagtctgtccggcagtcgtttatgggtgcatgccaagccggagatgtgccagcagccctcttcgatggtgggcatggcgcaggatggagctgcctgcatggcttttatgccggcctggacctatgatgcctccaaaaacgcctgcaccgagttcattttcggtggctgcggtggaaactccaatcagttctctaccaagagtgaatgcgaaaaggcctgcaaggactaa

SEQ ID NO: 6681 - protein, 88 aa, DROSOPHILA
MKYIGFVAIAFLLSLSGSRLWVHAKPEMCQQPSSMVGMAQDGAACMAFMPAWTYDASKNACTEFIFGGCGGNSNQFSTKSECEKACKD

SEQ ID NO: 6682 - DNA, 9648 bp, DROSOPHILA
ggggtccaatgctcgatgcattgccttcctgcacgccctgcgccaggttgtccacgactttgagacgcccgccaagaaggagtttggtcgcagcctggacgccgccgtgaagcaccacgtagaccacctgcacaagtgccgaccgctggccgtgtccgtgtccaatgcgtacaaacaattcaagaaccaactgacacagctgccggcggatgttcccgaaacggaggtaagaatcaaaatatatttttttaactcaattggtaacatgcatttgctcaacagtcgaaggagctgctcgtccacttcatcgatacttacattgaaaatcaaatcggcaaggcggcccaagcgatcagcggttttctgcaggaaaagatcaccgatggcgacgtgctgctgaccttcgcctgttcctccctcattcagttcatctgcgaggaggccaagcggcgccaggtggccttccgcgtgattgtcgtcgattcgcgacccggatgcgaaggccaggagctgctgcgccgactgcacgccaccggaatcccgtgcacctacgtgctgatcaacgccgtgggctatgtgatggcggaggccacgaaggtgctgctgggagcacacgccctgctggccaacggatacgtgatggcgcgaacgggcaccgcccaggtggccctggtggccaatgcccacaacgtgccggtgctcgtgtgctgcgagacgcacaagttcagcgagcgcttccagacggacgccatcgtctacaacgagctgagcgatcccaaccaactggtgcgcggcgacaagtgccagctaagcaactgggcggccaagggaaagctgttgccgctcaacctgagctacgacattactccgccggagctggtgagtgccgtggtcaccgaggtggccatcctgccctgcaccagtgttcccgtcatactccgcatcaagccagacattggctactaatcagacttcatcgatcgctcagtagaactcgcagttgttgaataaataagttttattacactttgatcaaatcgacaaacaagattgatgcgtagttcataatttacgggtatgctagtggaatatgcttgatgccagggaccgctgctgcgaaggagggctaggcccaagtgtctgtacatccggcagaccgccgagttcctcggaaattataaatattttgatcaagagcaagtctgcgctctgacatgcaattgtactttccgtgcgggtggggctgggattagcaaatatgtagctctagattctaataacaaaatacagttttgtgcccggcttatagactaggacgatgcctggaagccaatcgctggtggattgatttggttttgctcttttgatttccatttgcaacaacttgaatgagcttctacaagcagctaagtctacaaatgcaacaataaatacacacaataaatttaatagcgtttccatatcgattgcacaccctagctccgctccattcctcgatcctgcctgccttgcctctacgggctttgcttttgcatttgccggaagcagccccggcacaccggcaccggctttccactgtcgtgtcctggcagagccacgttcttgtctatgcagcgctcgcagaagatgtccccgcagcgccagcagtgagtctattcgaggattggatcatcatcagtggcaggcttgcttaagtacgcggagttacccacctttttgctgaactgatcgaagggcgtggagcaggagcaggtggttacgttgcgcatgggcttccagtctacggccacggagttgatctcctcgggcagcgcctgcggcggactggattgttccgcgctcagcgacagactggcgaaggacatgttgctggccttcagcggatgatcgtcgtcggcggcagacagttcgctaagcttcttatcgtagttgtatctgcaataagcggatggattataaagcatactatagcataataactaatatctatcatacgcacttgttgtcattgatctcgttgctggagagctccttgttcactttgccaggggcgctggtggcgtcttgcagtttcttggccgacttggaaatgtagttcttgaagctggctatgcgcttggtcagatgctgcacgtggtcctccagcgagttgcagtgctccttgctatcgagcagcacgtcgcccagtggctcccgcggatgaatgccgctctcgaagcgactgtacatgccgcgccagaacctgtgtgagaagcgcatagtttatataggatttggctcattccagaaagtcctcacttgatgcactgcggtgccaggttggccttaatggcctcgtctacatttggtttgtacagcgggttgatatactcgttcaggtgattggccatatagccccacagcgagaaggtgcgctcggccagctttaggtccaagcgatccttctcgcagttgcccacgaaggtgccgaattgacatgagtgcacatggtcgtgcaggatgagcaggaaccgctcgttgaactcgaaggcctcgctgcgctgcgacattagctgccaggtacagtccaggaactgtgtgaagatcggcgacacctcgcgggcatccgtctggatgtgaccgcagcgctcgctgaacttgtgcccgaatgccagccagtccttctcgattagcgcctggaagcccttgatggttcggtagtaggggttcagcatcagctgcgccagtgaacagacctgggccgtgcggtcccagccgtcggagcagtggaccaccaccgagacgcccttgtccacggcgttggcgatgaagctgcagggtgacacacacagaatgttaacaactcagtccacaatgccattgggagattctcctgtctgttggctcacctcgacgtgtccaatatggagcgaatgtgcttcagccagccggatgactccagggcatttatgaaggcgctcatcgtgggcgacttctgttcgcaggcctcaagcaccttttgcagactggcacgctggacgtggatgttctcaatgccgaggaagtggaatttgatgttctcgtagaaggcctcgttctcgtatcccttgccggcggctctgtttgccatggcattaatctgcaaatggcgtaaatggattatttgcatttatgctcgcctcgggagattcccctgtcacactcacccgcggtcgcgtgtccaccacatacatgtagtccgtgttggaattcgtcttgcgtatggcctccagcatctgctcatcctccagacagcgggcactgaatccggacaggggctgactgcagcggcagatggaagcctgcagtggttcccagttatgtaagtttgctgataatatgagttatgtatatcttcgcctaaccttgttgttgtgcagataggtgagcactggcagccgccccttggagcggaatcgcgagctgctgatgagcatcagcgtggtggcctccttgggcacgtaaatctgacgcggataggtgtcgcacagctcgtacttctcgttcatggagcacagcgtccaggcctcgttgggcaccagcatgtgcttgaactccgcctccagtttaaagtaatcccagccagcgttcttggggaaatcatccttgttcggctggtagttgaagcagtacaatttgttgatggacactgttcgcgggataggaatgtaggcttgtgaatggcggccgcattgttgtgtttggtggattcttacccggctggaagagtttcagcagcgaagtgtagacatcgtggcactcggagtccttgggaatgacgaaagttacggagaggaaggtcttgcagcggatgagtagcggagatcctgtcgtgctcaagggaagcttctcaatgctggccacgtgcatgtgcaggatctgaagagagcgcaaagcgtaaatacaagtatataacgtccggtgtggttaataaatctgcagagaatgggttgcgttggcttatttcccccagctactcggatgattgctgcttatggtttgctgccctttgtgagcgaaacatccaagaagccagcttgcgaccgtgacttcgcccaaggctgctcttatgcaacgcgggcaaaagcaaaacttcactccccccttggacacgggagctacgtgcccgaacagaactgctttcgccactaaataattgatgcgccccagtggcgggcaataaaaagaagcggagctagacaggggagggaagaagcaaccggattatgaggaactaagcaaccagttttcaatggcgcacaaaatcgatagttgcctgctcttttcgccccctcacggcggctctcgtgctctgatcctaagtgttttcacttttaattaaccactttgcgcggcccccgcaagtgcgactcatccggaatcccgacacttacgctcctgggccacttgtggcactcgaatgcgccaacttgctccggggagtgcataattaatacaatttgggcgaggcaattaaaatgcaatgcttgcctgcttccggccagcaacctcgttacgtatacgcagtgggcaacttacacggttggaataattaaacgcatttagtggcactcgcatgtgcagggatttgagcaacaaatccggcggtgtgtccaaaggatatgagcttgtcgggcacttattgtgcaatataacgctaagccagggctttttcgcgactattcaccaggccgcttattgtcactatatcctttcaatttcgctgcgaaaatcgcattcgccaacacaacgaacgagccttaagctgcaacagcttttcaaacaattcccagtgaatttaaagcaaagcagcaaggaaatatgctcacaattaacgtacacaaaagctgaacgaattcaattcgtatgtgtgcaatggggcgtatacgcaacacgcttgtgcaaacattcttttgtgtgcgccagattgcgattgcaggaggcgaattaaattacctgttaggtaaataagaatcttaaagcgcaggaaacatgctgcaaactcgttaaaggaaacttttccccactcaaccgctgtcttcctcctctcgagaaaggaaaggtgcagagcacctaagacatcagtcggctggctgccagaggggctctaaactttttgacagctgcgaggtcggtgctaaaccgaaaagaaacccatttgagcacgttcgcaggcagcggacttagttgccagcacagtggtgactcacataagcgttttgcgtggcccacaaacgcaaatccacatttgccactccagccgacaaagttgttagcaaaggggacgcgaattttagtcgggagctagcgtattgatgatgtcattatgggccacttacccaggtctccttgttgctgtcgggctccacgaatatcagatgggtggccgttagatagagtgtgccaaccgtgggatttttggtattgtagcgatctatcatccgcacattttccacctgcaaaaacaaaaacagagacagagagaatggaaatgattacaattgggtttaaattcgctatttcatttcagctgcgcccccggctgacgtcagcggaatccatatagttttgtggaaacccactcgtacgtacacattgcatacgagaaagaataaactgcatgagtacgaagaaaggagcaaactttttcaatcaactttcagcgaatacccggctgaagtgaatggaaacttcatcaaagattcatcaaagccgaggatatgtcaactttaaagcaccacctaaatataggcaccacaatatgtgccccttgcggttagttgtttggcatccatttaacaaaaccgtcggccgaccagcggcacattaattcctttgatggtcctgcaggccggattccccaaaccaacccatgccgccgcttccccatctgcgccggcttttattgcccaggaggtctatacatattccatttccctagagccgttcatcatcggactaatttcctttcatgtcacttagattgaggcccttgtttgagccgggtccattgtcgagatagataaggttagttaattgtctgatttagccagtgcgagttcattaccctcgcccagcgggcaggcaaattaaagcgtggatttaagataaacaaatttgcctaactaatcatttgtataaatgaaccttcataagctttcagattcagaaactgtagcatatataagcataatgcatagcacgagtatttgattagatttataatggttaagttgcacatgcagaagctcaatcagtttgttggcaacatggcgcatacttgatgcacgattatcaaacgaactgagccataaaacttaattatattttgaatttcgaaattatcagatacacacaaataaagacaaacgaactgcattaattcaatctgcgtatagtgcacatggggagttggtgccattgtccattggtaatcaacatgggtaaccttgacaattgccaagtccggtggcctgctcttgatgtacgagtgcaatttgccagccgatggcagttgcatctgcgactttgatggaaaacccattccattaattgacccagctccgcacccgagtatcccgctgacaatgcaacaatctgtcagacttgtgggtgccccgaggagtgattgtggtgacgcacttggcgcccggatgcagacctgctcctcgttcccacacatgacccacataggaaacgggtttcgggaagaaggggaagtcagcttttggcaggcccccgaacatactgcctgtgtgctgatttgcatattttccggccagtggccagtagccggtggccatgggtgagatgggaaaattagcacgatttgctcgccatgatttgcatgggaaactggggagcaggatgttggtctgttgggcgggtttaccttcttgagcacactgttgccgttgtagaagaccggagcctcgttgaactcctcctcgatccaggagaccaccttttcggagacgaagggcggcactggcacgccccacagcctcttattgccgtccggcggctcctccgtctccggcgagatgttgtcgaagctcagccgcagcgcggaggtcggggacaattggcgctcgatctcgttgaacttgttcatgaatcgggtgatgtccattgcgggagactggcgggccgctttattgattttgaatcagcagcagcaatcgtgtgctggcaactcaaatggaatcaatccaagtttgtatgggtggaatggcctgggactttcacttttcgcctgcctaacgagcgcgaaactcgcgctattcactggcgacttgctgtgcctttttgtgcgattttaccccacggatatgagtgtgtgtggtttgcttggggcagcgcgaagtgcttccgtcaaacgatggaatggaactcagttgcctgcgacgaatgcgcgcgcttaaaagcgagctacgattttgtgttggggaaatttgtcaagggaaattctctctctctcttgcgaagagaagacaaattgagcagtttgttacatggaaataccctgtaaggattgggatcttactaaacaaaatcaagatatttaactgcatgattaaatataaatgataatgtaataagatactgcttctaatttaagttacaaaaacattttagagaaaagcagcattacctatacgagttttttaaattgactaataacttcttctattaagtttacattacttaaaataggtatttgaatttgaaagaatatttattatccaacttagaatgcaaatatttcatatttcaaggagtttctaatgatttatgtaagaatttaagataggtaatttcagtttcgttacattcaagggcagatctaagctgcaaataagtttccaaacttgcattgataagtaacccaattcggagatgcgggaatcccatcaacttcggccacaacacgaacccagttaaataggccacgtcgaagggcagaaatgtatgtagccttccattttggacgctgagagaaccttccactgatttggatggacgacttttcacggttaaaaattgtggctgagtgggtggattctgggtgattttgggatgggaagagagcgcggctcgaaacttatttactttgcattctatgcgcatgttttggttccgcattaatggacgtggatttctgggagtgcttccacctttccgggggcggagcaccccacctgtgtgggcggagtagccggtagttttcccacggaaagggcgcaggtggagcacccttaccatcgatttccgaatggccagcccccgcgatggatgactcacagcgccttcgcggcagcccagccaggtgctccacggtggtcgccgaggtatgaccctggctgcattgcaccctatcgcattgattaagctgataactaaccttggcgagctttatttcgtccattgtttacgttttgattgggttttcctgttgcctcacgtgaaaacgagccacaaagtcactgtgcactgattcgcccagcggttcacaagctcacgcaagggagcctcgttaatttggtagaactgcactcgtgtttgcttttttattgcattttttttgtaattattcccgaataataataaattcttcgaggcgattgtacgaactagggatgtgctccagtcgataggatccaccccctaagctatcggccgtcgacggctatcggcggccactctttgcgaccgtctggcagccttggcaaattcaaaagttgtgcgcaaaaatgcatttaatgtacgttaaagttgaaacacatacaagtaacaaggaacgcgatggctatcaaaaattgactaacattgacggtaggcggttggttctagccattcaagtgcacttcaggcgtgggcggagagggtgtaaatgcggtgagtggtcgtcgtgttcatttacgcaatcctacgtatttcgtccagacgcccttgctgtcgaaatagggcttgttacgggaacagatgatggcctccctgaagacatcggcataggaagcgggcatggtcgtgtgcttataaagattgaagaggaactcgtatatctgcaaggattctcattggtattttgcaggtaattgtaaccagagtgtttcaaaccttagcctcctgatccttccaaaagacgtgatcgcacaggtactgcaagctctccgggaacagtgccaggcgctgcttgtcgtccgtggccaccacatcgacgctgcccaacagcacggcacagcccgagagcacatccacggctaggatgaagatgtccagcaggtagagcgccctgttcaccttctccttgttggaggcctcggccaagagcatttggatctccaagaacatctccgctatccagttgctggagtgctcatcgctctcgaaagcgtacagagtggctgccaagtggcggtagaagaaaggccgctcctccgctcgtttctcgtaggcatctattatgggcgtaagccacttgagaggatttggaagcttctcgttgtacaaaaccaagtagcaccgaatgatggtcgcctttttcagcttgcccaccggcgtctcccaccaattggctggcgtcgttagaccatcaattgcattcggatgcagtgtggccaccacttc

SEQ ID NO: 6683 - DNA, 2786 bp, DROSOPHILA
gtacaatcgcctcgaagaatttattattattcgggaataattacaaaaaaaatgcaataaaaaagcaaacacgagtgcagttctaccaaattaacgaggctcccttgcgtgagcttgtgaaccgctgggcgaatcagtgcacagtgactttgtggctcgttttcacgtgaggcaacaggaaaacccaatcaaaacgtaaacaatggacgaaataaagctcgccaaggtggaaaatgtgcggatgatagatcgctacaataccaaaaatcccacggttggcacactctatctaacggccacccatctgatattcgtggagcccgacagcaacaaggagacctggatcctgcacatgcacgtggccagcattgagaagcttcccttgagcacgacaggatctccgctactcatccgctgcaagaccttcctctccgtaactttcgtcattcccaaggactccgagtgccacgatgtctacacttcgctgctgaaactcttccagccggtgtccatcaacaaattgtactgcttcaactaccagccgaacaaggatgatttccccaagaacgctggctgggattactttaaactggaggcggagttcaagcacatgctggtgcccaacgaggcctggacgctgtgctccatgaacgagaagtacgagctgtgcgacacctatccgcgtcagatttacgtgcccaaggaggccaccacgctgatgctcatcagcagctcgcgattccgctccaaggggcggctgccagtgctcacctatctgcacaacaacaaggcttccatctgccgctgcagtcagcccctgtccggattcagtgcccgctgtctggaggatgagcagatgctggaggccatacgcaagacgaattccaacacggactacatgtatgtggtggacacgcgaccgcggattaatgccatggcaaacagagccgccggcaagggatacgagaacgaggccttctacgagaacatcaaattccacttcctcggcattgagaacatccacgtccagcgtgccagtctgcaaaaggtgcttgaggcctgcgaacagaagtcgcccacgatgagcgccttcataaatgccctggagtcatccggctggctgaagcacattcgctccatattggacacgtcgagcttcatcgccaacgccgtggacaagggcgtctcggtggtggtccactgctccgacggctgggaccgcacggcccaggtctgttcactggcgcagctgatgctgaacccctactaccgaaccatcaagggcttccaggcgctaatcgagaaggactggctggcattcgggcacaagttcagcgagcgctgcggtcacatccagacggatgcccgcgaggtgtcgccgatcttcacacagttcctggactgtacctggcagctaatgtcgcagcgcagcgaggccttcgagttcaacgagcggttcctgctcatcctgcacgaccatgtgcactcatgtcaattcggcaccttcgtgggcaactgcgagaaggatcgcttggacctaaagctggccgagcgcaccttctcgctgtggggctatatggccaatcacctgaacgagtatatcaacccgctgtacaaaccaaatgtagacgaggccattaaggccaacctggcaccgcagtgcatcaagttctggcgcggcatgtacagtcgcttcgagagcggcattcatccgcgggagccactgggcgacgtgctgctcgatagcaaggagcactgcaactcgctggaggaccacgtgcagcatctgaccaagcgcatagccagcttcaagaactacatttccaagtcggccaagaaactgcaagacgccaccagcgcccctggcaaagtgaacaaggagctctccagcaacgagatcaatgacaacaaatacaactacgataagaagcttagcgaactgtctgccgccgacgacgatcatccgctgaaggccagcaacatgtccttcgccagtctgtcgctgagcgcggaacaatccagtccgccgcaggcgctgcccgaggagatcaactccgtggccgtagactggaagcccatgcgcaacgtaaccacctgctcctgctccacgcccttcgatcagttcagcaaaaagactcactgctggcgctgcggggacatcttctgcgagcgctgcatagacaagaacgtggctctgccaggacacgacagtggaaagccggtgccggtgtgccggggctgcttccggcaaatgcaaaagcaaagcccgtagaggcaaggcaggcaggatcgaggaatggagcggagctagggtgtgcaatcgatatggaaacgctattaaatttattgtgtgtatttattgttgcatttgtagacttagctgcttgtagaagctcattcaagttgttgcaaatggaaatcaaaagagcaaaaccaaatcaatccaccagcgattggcttccaggcatcgtcctagtctataagccgggcacaaaactgtattttgttattagaatctagagctacatatttgctaatcccagccccacccgcacggaaagtacaattgcatgtcagagcgcagacttgctcttgatcaaaatatttataatttccgaggaactcggcggtctgccggatgtacagacacttgggcctagccctccttcgcagcagcggtccctggcatcaagcatattccactagcatacccgtaaattatgaactacgcatcaatcttgtttgtcgatttgatcaaagtgtaataaaacttatttattcaacaa

SEQ ID NO: 6684 - protein, 676 aa, DROSOPHILA
MIDRYNTKNPTVGTLYLTATHLIFVEPDSNKETWILHMHVASIEKLPLSTTGSPLLIRCKTFLSVTFVIPKDSECHDVYTSLLKLFQPVSINKLYCFNYQPNKDDFPKNAGWDYFKLEAEFKHMLVPNEAWTLCSMNEKYELCDTYPRQIYVPKEATTLMLISSSRFRSKGRLPVLTYLHNNKASICRCSQPLSGFSARCLEDEQMLEAIRKTNSNTDYMYVVDTRPRINAMANRAAGKGYENEAFYENIKFHFLGIENIHVQRASLQKVLEACEQKSPTMSAFINALESSGWLKHIRSILDTSSFIANAVDKGVSVVVHCSDGWDRTAQVCSLAQLMLNPYYRTIKGFQALIEKDWLAFGHKFSERCGHIQTDAREVSPIFTQFLDCTWQLMSQRSEAFEFNERFLLILHDHVHSCQFGTFVGNCEKDRLDLKLAERTFSLWGYMANHLNEYINPLYKPNVDEAIKANLAPQCIKFWRGMYSRFESGIHPREPLGDVLLDSKEHCNSLEDHVQHLTKRIASFKNYISKSAKKLQDATSAPGKVNKELSSNEINDNKYNYDKKLSELSAADDDHPLKASNMSFASLSLSAEQSSPPQALPEEINSVAVDWKPMRNVTTCSCSTPFDQFSKKTHCWRCGDIFCERCIDKNVALPGHDSGKPVPVCRGCFRQMQKQSP

SEQ ID NO: 6685 - DNA, 6959 bp, DROSOPHILA
aacttcggccacaacacgaacccagttaaataggccacgtcgaagggcagaaatgtatgtagccttccattttggacgctgagagaaccttccactgatttggatggacgacttttcacggttaaaaattgtggctgagtgggtggattctgggtgattttgggatgggaagagagcgcggctcgaaacttatttactttgcattctatgcgcatgttttggttccgcattaatggacgtggatttctgggagtgcttccacctttccgggggcggagcaccccacctgtgtgggcggagtagccggtagttttcccacggaaagggcgcaggtggagcacccttaccatcgatttccgaatggccagcccccgcgatggatgactcacagcgccttcgcggcagcccagccaggtgctccacggtggtcgccgaggtatgaccctggctgcattgcaccctatcgcattgattaagctgataactaaccttggcgagctttatttcgtccattgtttacgttttgattgggttttcctgttgcctcacgtgaaaacgagccacaaagtcactgtgcactgattcgcccagcggttcacaagctcacgcaagggagcctcgttaatttggtagaactgcactcgtgtttgcttttttattgcattttttttgtaattattcccgaataataataaattcttcgaggcgattgtacgaactagggatgtgctccagtcgataggatccaccccctaagctatcggccgtcgacggctatcggcggccactctttgcgaccgtctggcagccttggcaaattcaaaagttgtgcgcaaaaatgcatttaatgtacgttaaagttgaaacacatacaagtaacaaggaacgcgatggctatcaaaaattgactaacattgacggtaggcggttggttctagccattcaagtgcacttcaggcgtgggcggagagggtgtaaatgcggtgagtggtcgtcgtgttcatttacgcaatcctacgtatttcgtccagacgcccttgctgtcgaaatagggcttgttacgggaacagatgatggcctccctgaagacatcggcataggaagcgggcatggtcgtgtgcttataaagattgaagaggaactcgtatatctgcaaggattctcattggtattttgcaggtaattgtaaccagagtgtttcaaaccttagcctcctgatccttccaaaagacgtgatcgcacaggtactgcaagctctccgggaacagtgccaggcgctgcttgtcgtccgtggccaccacatcgacgctgcccaacagcacggcacagcccgagagcacatccacggctaggatgaagatgtccagcaggtagagcgccctgttcaccttctccttgttggaggcctcggccaagagcatttggatctccaagaacatctccgctatccagttgctggagtgctcatcgctctcgaaagcgtacagagtggctgccaagtggcggtagaagaaaggccgctcctccgctcgtttctcgtaggcatctattatgggcgtaagccacttgagaggatttggaagcttctcgttgtacaaaaccaagtagcaccgaatgatggtcgcctttttcagcttgcccaccggcgtctcccaccaattggctggcgtcgttagaccatcaattgcattcggatgcagtgtggccaccacttccgtgtagcgttcgaagagccttgagtccagattcatcgagtccatgtaacgctcaacaatcagggtgaaaacatccagcacctctggtatgtcgcaattgccggtgaagatgtacttgacgctttccaaaaacttttcgaacaaacatcctggaaagaaactaaagcttcggggaattgctcattaatatacaagcggattgggacacaccttcaacaaagtcatttatctgcgattccttaaagcagtagacagccaccttctcggcaaaattcttcagaatctggaggctcacactgttcgcaatctctggcagcaatgagaagagcagcaacagatcctcctcgaagcaattgggctcaaaatcgatgaggaagttctccaggaggcgcttggcggttcccgagttgacggcctgattcttggcaattatgatgcaatattttcgcgcatcgaaggacaagtggaagaaactggtgaggcaactccagtccagcggcggaattggcttgggaaaatttttggacagcgatcgcagagcgaaagttacggcatacggttccgggacgtagtctccaaagcgcgcctggctcaccagatagttggtcacagcgcggagcggactagtggcaaacaagcccaccagtttccgtggctccggtttgccctcgggcaggcggtagactccgctgcggaaagcgttaatctcactgtctatgtgatgggaaatcaagtctgccgcggcatctccgcactccgggcgtatcttctgcagtagctgcacccacacctcaccgggcacagtctcctgctgcagatccacaacttcgcgacctccggcacctccagctcccactcctccaccaacgatttcaaagcgaaattgtgctggaatgtggcgtaagttcaaggtaactcccggctcgtagtttctaagggcaaccagggcgtttcgcacctgggcagcatccgtgcccggccgactaatggcttgccacaggtgctccagcgcgtcgtccgccaacttctcgtactccagggtgggcgtcttcagcattggtacgaggccaaagagcctgtacagcgatttaagcgtctgcggacgcatctcgttgcggaatttactgcccagcgcctgccaggtggaagcaatgttcacggtgtgactatcacacaaggagtatatggcatccagggccagggatgtggccagatcccccgcctcatcggaggaatgattgagggtgttgctaagatgcgggagcagctccgtgccatgtaaagtgggtctgtaaatgagtaatagtcgattagaaattaattttggatagaagttatttcaaagctacttctcctgacagatctcccgcatggcatggttgcgtgctatctgcagctcccagcgcttgtcattgtccggcagtggttgggcaatctgcttcagcaggaagggataggtgcgcctctccactcgccataggcgcacataaaggtccacgcagaatgtgccgttctcggtggaaagatttcgaatggtgttcagtatcatgggaacattgtccttcaaacaatacattgaataaaaagttgtagaggattagatgtgccacatcttaccttgcacacggcaaagctggccagtcctctgagcagctccagctgcagctccggattgttctcgtgggcgagcttgaagatgtacgtcatgaggaagtcgtaggcgatgccctcgttgacctttacgatttgcagtatgacctcgtagatcttgaaccagcaatccacgggcggcttcttcgacaagaatagcgcgcgcaggaagaggtgcaggcgctggcagaataccgtgttggccttgacattcagggcgtccacaaaagcgaatacatcctggttgtcggaggcgtcgaaggactccaccagtgtggccaagtcgaaggcgatcgcaatgtccgggtgataattgcgcatgtgagcgggcttcaattgcttggtggagatcacttctgcctcctggtcggatctctcagggtccaacaccttctcgactatctgatgggccaaggccaagccttctgcgggtatgaatgcagtctgagacatccactgaataattccgtccagacacatgttcagaatgtattcatggccacagcgctcctgcaccaccacgaacacgatgatgcgcagcagatccgccaggtaaaaaggggacaggacgtgcaagacgtcggcaagaagaaccaggagcacatggtagtggtccttcgtttgctcccgcgtggcatggagcactcggagcaggcactgcaggcttgggcgcggatcgatgccatagttggccagctgcttgatgagacacgcttgatagatgcccaaatcgatggactgtgcgtggtcctctcgctgcaaaaagtggtcgatggcctcaatgaccaaaatgctggtgcacagacaggtgttcgcgttgttgaacttgctccacgccaacagctcctgcatcagagcacgcgcctccggttgctttccactcagattgagcagacaggtccaaatgggcttcacatcgtgcagagtttggggattgcaaagcacgtagagaaagaccggtctcaggtactctatgctgtagtcccgaatgctgagaatgtagttaagatatttgattacggcttcaactgtccagtatctcatttagtctcaccttttgtcgtagtgctgacaaatgccaatgatcttgttcgccacgtcgtgcatgttggcactagagtgctggagcagcgagattagcggatgctgctgcgtcttcaggccatacgtacactgataggactcctgacccttgagcgacgacgtcctgcgctttaggcttaagagctgcatacccaagatgctctccgtgatgatggcaaagtgcattggactggaagcaaagggattattaagttcttgtctaagttagccacttcaaataggagtgacactttgaggcgtttacaatccccgcaatgattaagatggaacgactgtaacgactgtcgattagcgctcacttccggagtagcagctgcaaatcagcactcaaggacggaagcctcttttgcggcggcggaggtggagtgaatcgctttgcgtttgacgaggtaattacaattcacgctctggccacaagtcgcccgggttcggcctctaattgcaggccaattaatatgcaatcctttttgcctgcacttgcaactcgaccggactggcggcttatcaaggttaattccggtattacatgaccgcctgtgcgtccttcgccgctccgcaaacatttcaggttcaatgccgcagacttttagtggctctgcatacatcaaatatttgccagtcaaggctgcaggatatgataggtgggtgtagcgctgcgtggcgggaaatggctaatagtttttacggagccccaggcataatcgctgttgatccacgagattgacgactgcggattgcggccaagcggaaaccgagtcaatgccaaacaactgggattttggatcagctccgggtcataattcatttgcgcatttgctacatgacgtgccaagtgctgggcaattaatttggggcacgcgtccagcggaaatgcgagggattgcgtgcgtcgacggccggaaggagggtcaacaatgttggaggcaggtggcacttggtggcaggcgttaaatggcgcgttaattaactgcctgcactggggaatccacgctgtttgagcttcagcttgaggcaaactctggctggctaatttatgcaccttagtgggcaattttgcaattggaatcgctgcgctccacttaggctgatagaccagcacgccactcgtcctgctgttccacctcctgcctgctgcagaactccgtaagttcaaaggtgcgccatgtatgtgggtcgtgggcgggttctctggccagatagccgttccgttgtcctcaccccgcgttcgccagcatggagagcaggctgttctgcactccgttggcctccaggacgccctcgtccaccaggcgcaccagcgtctgacagctcatcaggctgagttgcatgtggtcgtgcttgcactgcgccttcaggaactcgatttccttgatttggtgctcgggcagctgcttctcccggctctccaccaccttgttgtagatcttctccagacaggaggccagtttgaccaccgagctgtgcggctttatgctggcaaagtcatccatggtgctgaaatagcaaacacaactagaagttagttggcgttttttcgaggctctgcgatttatggtttgtttgggttctaggatttgctggccaagcggtgcgcggcttgtgtcctttctgctgctcggctgccactcgaatggagtggaaaatccgaagcagtttgaacattgccgcgttttccggcgctttccacccccgccacctacattttccgtgtttaccgctttctttaaatcggttcgtgttggctcatttcatgcgaggtctgcggattgtggcagctcagttggttgcttgttttacactctagtggctgttttagcaagggaaattcgaagaatgcgtgcaaaatgaaaagccggtcgcgaattgttttccttttgttgatagaggtcagctgttagagtggccagccattgacttgggcttttgcagggtggcagcgctgtgtgctgcaacggtttcactgagttgaatttccaaatttgaattcctatcttaaagatatcttacataaattatttttttaaattattgtaataaaaagattaaaagtggtggatgtagggaaagaaatcttaagcccgcgtagcatcagcgttggagttagtttgatttcaaatttaagatcaattttaaactaatataccaattaatattaatttattaggacttttatttagttcttcagtactttggaagagttattactaaagtttctttttcgtttgccctgtacctgcagatcttcgcttgatgtatgtaacatggagtaaggctgaaggctggcaacaacccggttggcagcgctgttgagcagcaacatgattgtcggaaatcgaagttatcgacaatcagtcatcgaaggaacgatcgcaaggcagcagtggagtggaagtcagcgttgcagtcagtcgagttctcagcagcagtcgttcggtcacaaactaagaatactttatataattaccgcatttagaattaaactaataatta

SEQ ID NO: 6686 - DNA, 4143 bp, DROSOPHILA
atggatgactttgccagcataaagccgcacagctcggtggtcaaactggcctcctgtctggagaagatctacaacaaggtggtggagagccgggagaagcagctgcccgagcaccaaatcaaggaaatcgagttcctgaaggcgcagtgcaagcacgaccacatgcaactcagcctgatgagctgtcagacgctggtgcgcctggtggacgagggcgtcctggaggccaacggagtgcagaacagcctgctctccatgctggcgaacgcgggttctgcagcaggcaggaggtggaacagcaggacgagtggcgtgctggtctatcagcctaagtggagcgcagcgattccaattgcaaaattgcccactaaggtgcataaattagccagccagagtttgcctcaagctgaagctcaaacagcgtggattccccagtgcaggcagttaattaacgcgccatttaacgcctgccaccaagtgccacctgcctccaacattgttgaccctccttccggccgtcgacgcacgcaatccctcgcatttccgctggacgcgtgccccaaattaattgcccagcacttggcacgtcatgtagcaaatgcgcaaatgaattatgacccggagctgatccaaaatcccagttgtttggcattgactcggtttccgcttggccgcaatccgcagtcgtcaatctcgtggatcaacagcgattatgcctggggctcccgattcactccacctccgccgccgcaaaagaggcttccgtccttgagtgctgatttgcagctgctactccggaatccaatgcactttgccatcatcacggagagcatcttgggtatgcagctcttaagcctaaagcgcaggacgtcgtcgctcaagggtcaggagtcctatcagtgtacgtatggcctgaagacgcagcagcatccgctaatctcgctgctccagcactctagtgccaacatgcacgacgtggcgaacaagatcattggcatttgtcagcactacgacaaaagcattcgggactacagcatagagtacctgagaccggtctttctctacgtgctttgcaatccccaaactctgcacgatgtgaagcccatttggacctgtctgctcaatctgagtggaaagcaaccggaggcgcgtgctctgatgcaggagctgttggcgtggagcaagttcaacaacgcgaacacctgtctgtgcaccagcattttggtcattgaggccatcgaccactttttgcagcgagaggaccacgcacagtccatcgatttgggcatctatcaagcgtgtctcatcaagcagctggccaactatggcatcgatccgcgcccaagcctgcagtgcctgctccgagtgctccatgccacgcgggagcaaacgaaggaccactaccatgtgctcctggttcttcttgccgacgtcttgcacgtcctgtcccctttttacctggcggatctgctgcgcatcatcgtgttcgtggtggtgcaggagcgctgtggccatgaatacattctgaacatgtgtctggacggaattattcagtggatgtctcagactgcattcatacccgcagaaggcttggccttggcccatcagatagtcgagaaggtgttggaccctgagagatccgaccaggaggcagaagtgatctccaccaagcaattgaagcccgctcacatgcgcaattatcacccggacattgcgatcgccttcgacttggccacactggtggagtccttcgacgcctccgacaaccaggatgtattcgcttttgtggacgccctgaatgtcaaggccaacacggtattctgccagcgcctgcacctcttcctgcgcgcgctattcttgtcgaagaagccgcccgtggattgctggttcaagatctacgaggtcatactgcaaatcgtaaaggtcaacgagggcatcgcctacgacttcctcatgacgtacatcttcaagctcgcccacgagaacaatccggagctgcagctggagctgctcagaggactggccagctttgccgtgtgcaaggacaatgttcccatgatactgaacaccattcgaaatctttccaccgagaacggcacattctgcgtggacctttatgtgcgcctatggcgagtggagaggcgcacctatcccttcctgctgaagcagattgcccaaccactgccggacaatgacaagcgctgggagctgcagatagcacgcaaccatgccatgcgggagatctgtcaggagaaacccactttacatggcacggagctgctcccgcatcttagcaacaccctcaatcattcctccgatgaggcgggggatctggccacatccctggccctggatgccatatactccttgtgtgatagtcacaccgtgaacattgcttccacctggcaggcgctgggcagtaaattccgcaacgagatgcgtccgcagacgcttaaatcgctgtacaggctctttggcctcgtaccaatgctgaagacgcccaccctggagtacgagaagttggcggacgacgcgctggagcacctgtggcaagccattagtcggccgggcacggatgctgcccaggtgcgaaacgccctggttgcccttagaaactacgagccgggagttaccttgaacttacgccacattccagcacaatttcgctttgaaatcgttggtggaggagtgggagctggaggtgccggaggtcgcgaagttgtggatctgcagcaggagactgtgcccggtgaggtgtgggtgcagctactgcagaagatacgcccggagtgcggagatgccgcggcagacttgatttcccatcacatagacagtgagattaacgctttccgcagcggagtctaccgcctgcccgagggcaaaccggagccacggaaactggtgggcttgtttgccactagtccgctccgcgctgtgaccaactatctggtgagccaggcgcgctttggagactacgtcccggaaccgtatgccgtaactttcgctctgcgatcgctgtccaaaaattttcccaagccaattccgccgctggactggagttgcctcaccagtttcttccacttgtccttcgatgcgcgaaaatattgcatcataattgccaagaatcaggccgtcaactcgggaaccgccaagcgcctcctggagaacttcctcatcgattttgagcccaattgcttcgaggaggatctgttgctgctcttctcattgctgccagagattgcgaacagtgtgagcctccagattctgaagaattttgccgagaaggtggctgtctactgctttaaggaatcgcagataaatgactttgttgaaggatgtttgttcgaaaagtttttggaaagcgtcaagtacatcttcaccggcaattgcgacataccagaggtgctggatgttttcaccctgattgttgagcgttacatggactcgatgaatctggactcaaggctcttcgaacgctacacggaagtggtggccacactgcatccgaatgcaattgatggtctaacgacgccagccaattggtgggagacgccggtgggcaagctgaaaaaggcgaccatcattcggtgctacttggttttgtacaacgagaagcttccaaatcctctcaagtggcttacgcccataatagatgcctacgagaaacgagcggaggagcggcctttcttctaccgccacttggcagccactctgtacgctttcgagagcgatgagcactccagcaactggatagcggagatgttcttggagatccaaatgctcttggccgaggcctccaacaaggagaaggtgaacagggcgctctacctgctggacatcttcatcctagccgtggatgtgctctcgggctgtgccgtgctgttgggcagcgtcgatgtggtggccacggacgacaagcagcgcctggcactgttcccggagagcttgcagtacctgtgcgatcacgtcttttggaaggatcaggaggctaagatatacgagttcctcttcaatctttataagcacacgaccatgcccgcttcctatgccgatgtcttcagggaggccatcatctgttcccgtaacaagccctatttcgacagcaagggcgtctggacgaaatacgtaggattgcgtaaatga

SEQ ID NO: 6687 - protein, 1326 aa, DROSOPHILA
MQLSLMSCQTLVRLVDEGVLEANGVQNSLLSMLANAGSAAGRRWNSRTSGVLVYQPKWSAAIPIAKLPTKVHKLASQSLPQAEAQTAWIPQCRQLINAPFNACHQVPPASNIVDPPSGRRRTQSLAFPLDACPKLIAQHLARHVANAQMNYDPELIQNPSCLALTRFPLGRNPQSSISWINSDYAWGSRFTPPPPPQKRLPSLSADLQLLLRNPMHFAIITESILGMQLLSLKRRTSSLKGQESYQCTYGLKTQQHPLISLLQHSSANMHDVANKIIGICQHYDKSIRDYSIEYLRPVFLYVLCNPQTLHDVKPIWTCLLNLSGKQPEARALMQELLAWSKFNNANTCLCTSILVIEAIDHFLQREDHAQSIDLGIYQACLIKQLANYGIDPRPSLQCLLRVLHATREQTKDHYHVLLVLLADVLHVLSPFYLADLLRIIVFVVVQERCGHEYILNMCLDGIIQWMSQTAFIPAEGLALAHQIVEKVLDPERSDQEAEVISTKQLKPAHMRNYHPDIAIAFDLATLVESFDASDNQDVFAFVDALNVKANTVFCQRLHLFLRALFLSKKPPVDCWFKIYEVILQIVKVNEGIAYDFLMTYIFKLAHENNPELQLELLRGLASFAVCKDNVPMILNTIRNLSTENGTFCVDLYVRLWRVERRTYPFLLKQIAQPLPDNDKRWELQIARNHAMREICQEKPTLHGTELLPHLSNTLNHSSDEAGDLATSLALDAIYSLCDSHTVNIASTWQALGSKFRNEMRPQTLKSLYRLFGLVPMLKTPTLEYEKLADDALEHLWQAISRPGTDAAQVRNALVALRNYEPGVTLNLRHIPAQFRFEIVGGGVGAGGAGGREVVDLQQETVPGEVWVQLLQKIRPECGDAAADLISHHIDSEINAFRSGVYRLPEGKPEPRKLVGLFATSPLRAVTNYLVSQARFGDYVPEPYAVTFALRSLSKNFPKPIPPLDWSCLTSFFHLSFDARKYCIIIAKNQAVNSGTAKRLLENFLIDFEPNCFEEDLLLLFSLLPEIANSVSLQILKNFAEKVAVYCFKESQINDFVEGCLFEKFLESVKYIFTGNCDIPEVLDVFTLIVERYMDSMNLDSRLFERYTEVVATLHPNAIDGLTTPANWWETPVGKLKKATIIRCYLVLYNEKLPNPLKWLTPIIDAYEKRAEERPFFYRHLAATLYAFESDEHSSNWIAEMFLEIQMLLAEASNKEKVNRALYLLDIFILAVDVLSGCAVLLGSVDVVATDDKQRLALFPESLQYLCDHVFWKDQEAKIYEFLFNLYKHTTMPASYADVFREAIICSRNKPYFDSKGVWTKYVGLRK

SEQ ID NO: 6688 - DNA, 5883 bp, DROSOPHILA
atagaagggttgtatatcgactgttaaagttaattagaacttaaatatttgagctctcggaaatatttgaagatgtatttatttatttaattttactgaaaagagtacatatacgtacacttaaacgttcgccataagcactctatcaaaattacatacatttaatcaatctgacaactcagttgtaaacagctgttttaaaaaccccgcaacagttgtttacatttagttgtgaaactaaaatattgccgaacatgtccacctttgtggttaaattacttcaacgctctcagctctcacatagtcaaatagacgtaaagccgtttatttatgtccgaagcaaatggatggacgacgacgtggagtttgacatcctgaccacttctgacaatcaaaactaccggtcaattgtaaaatacgatgagtttcgaagtggagccagtgaattggaacaggcctacgatgctttctttgcggagtgcaaaagtgccgtaactacgcacatgggactccaaggatttgattatgaaatatccatggaagatgtcgaaaaaccagcgttcaaagtgtacaaatgcgaaggatacgaaacgctgtacttggatgttccgcttagaaaagtctccaactgctaccagatgctggatgcagccatcgaagctggtcagcagaagccacaagcagctccagccaccgaatccgacgcccagacaaccgcatccctggctgaatatgaaaagtatgtgagggacagcaagctgaaggaggaggaacttctcaagaaattcctgctgcttttgaacagcaaaaaggcccacatccgggatttagagagtcagttggaaaaacgatccgggaaagtatcaagagcaaagaataatcaaaggattttttctgatgacgaggacgatgcctacggagcagctactcaagtcatgaatatagataacgactcagattaagccccttagtaatataaatatttaaacaaagacgaaatcggtatgtgcttgaaatgtatttccattttgttttagtttttcttttcgattttgtaaaataaattagctttataatgtatgtataaataaacaacaaatagacttgtaacgtaatacattaaattaccatcaatgtgtagacgtggcttacaattagaccaacaaaagatcgcttgtttttttggaatataatcaatagttatcgttgctgtttttgtaaaaaataaaagcattttacataaagtgttactatgtatctgctatcaaatagacgttacggataagtatgttagggtgtgtataacatttgaaagagtaaacaattagagccgatgatggtgctggcggagatcactcagagcgcgagcagatcctcttcggcgcccggtttctttggtgtctttcgtaagctatcggctcctgccgatcctgtcgtggcactggcggcggagttcgatgcactgatcgttggaagattctcggcggcagcggctctctcctctaggaatttgtcaaactccgagctggtcagctcctcaattccctcgatgtgctgtgtggtggaaacaaatgactcattagtcatattaagtactcgaaaatggatgacagaagctaagaagcaaaggaatagtatgtaaatcgagaaactgaagccgagtgcatggtaagatgagcttagaaaaagacaaaatgctattcgaatggctacttactgagctgcccaaccacgcctccatctcgtcgatctcattctctttcgtcgactgtgtgtgggcgccaaccgaacaacaaaacgaaacgaaaaccaaacgcaatttgcatagaacaaaaaagaaccaaaacatattttcaaatttagacacatagtgtaaatcaatggcgaaaacgaggtcaaaaggtaagggaacaaatcgaacgccattagttagaccggctgtccggcggctagttactcactttacttaccaccggcggttcgccggctgagcgctgtgcctgctgcggttgatttggtttgtaaggcgaggcggtggcagtcacactcccagcagcagcgtccaccgagggaatgtcccgcagcaagtccgatttactaaaaaaagaattattgttaatacttgatgagctcgattggaaagcactctttactgactggttgccatcggtgcgcgactgtgccagcatatcgaattcatcggcaggtcgtgcgctcctctgcaccccaatgggtgctccaccacccaggctgatctgtcccaaactctgtggcagttgggcttcctcgctgctttcgattagatcgatcagcagttggtcactttgcggcgtattgctcacggcggtagttgtgggcggaggtggtagcgtagccaccgtggtggctcctgctccagctgctcccacaccgggcaggcccatggctgcgcccagcacagccgagggcgaggtaacaccagcaccctggccctgcgaacgatttttctcgtaacgctggtggcgcaagaacacattgttcagctcgtcattgatgcgcaggaactccgcggtgagctcgtcgtcctggacacgtccaatcagatccacgatgcgagactgcatctccttgcaggtcgaggtgagctcattgagcagggcatagtcatcgggcgactcctggccgggcttcagaacactgagcatctcgctgaggatggacatattgttgctaacgatctccagttcggagcgcagcttagccgcttgctcgggagtcaaatgcaaaggacctgtgctgggtggagctgcggctgcagctgcggcggcagcagcggcagccatgtgttgaggcgagattgtgtgctgctgagcggccaccagctgagggggcatctcgggaacactctaaaaggcatatgaaagcatttattatggttaaagtaaagaggattcctcagcgactcaccctctgtggcgtgtaaatgggtgccatggcatccagatcgttggctggaaactcgatgcccttgtttttcaattccatgtacatctgggtgacgccgttgagatccggttggttcttaaacgcatccgcccagatttgtatcagactgagaaccttctcctgcatggcggctggtggatcgttcttgggcccaatcagcttgaccagctcgttgatgaagtccttctgggccaccaggacatggaaggccttgccgcagttcttcacgcatgtctccaggacggtcagcgtgtacatcaccacctggttgtttttgccggcgttctgggagaggcgtttgcgaatggcacgcatagcatcgcgtgcagtgtcggaggattcgttgatcatgtcgcagatctccatgttggcggcccagttctccgaggccaggttggcatcggtggcggcctctgaaaggtgagaaggtaagtattagttgacaccttaagatctttttaaatctatcgttcttccagaaaaaaaaactgcaacaatatttcatgtaatataaatacaaaaacaaaaaaggtatccctattttttttttttaaatttgtatcttatttctgaaaacgctcgttacattttaattataataatatatttaattataattccaagtaaattgtgcggtttttgatccgaaagatgtaattatttttttcgttttctgtgtgaaaacccaagtaaacaatttgcattcctttgtttgtttttatgggcggctgaaactgtgttttttaacaggtgggcgagcattatctttcgtttataatttaggatctaccaagtgcaatgacttgctcgaattaaaaatgcacaaagcaatttgtttaaatccaaaacgaaaccattgcgcaaagtgtatttctcagatatcagatatcgtaacactgatatccaacagatataggagatatgggaaaagctaaccaaccgcaatacaataacaaaatgtgagctcataaaaaaagcgaagcaacaaattagtacggcactaatacatatgcacgattgcacgtaaatgtgtgtatctgtgtttgttgtgtgtgcagcggcaaatggaaattatggcgaaaatgcgagccaaaggggaacacgaaataaattaacacatttttttatgtaacccagcggccagcggcaacgatgactaattgcgattactaagggcgcaaaacaggtggccgccaggagggggtgaagggaaaacaggcaatcaaacaataaaagagcgcatcaataacaatactctttgtgtgcgtgccaaaaggtgagcaatttcataaagcataccaacaaacatttatctgatttgtcacacctgcctgttggaaccgcatactcatataagggttaatcttatcagaggcccaccgttgttgccaccgcctttcaaatcaaatcagaccgctttgccatagtaatggtctggcaacaacaaatgagtatcgctacatggaaatgtgcgcgtgtgtgtgagagaccaacaacaaaacaagaaaacaagcaaacgcacgaagaaagttgtgaaaattcaattttccaatggcccagtctgattgggactgccttgaagcgtcctctaatcagataactatcaatgtaaatgcgtaaatatcaacgcatatgcgttgtatttgtggaaaatattacgctttaaccacatatacacacacccccgcttccggtgggtgttttttttacgctggaggggggagggtggtttactcacctatgcgctggccaactggagtggagaaaacatttcccaaggcgccaacgttgaaaaatgaagccatcgtggagaagtttcttattaatgctcgccgttgggttgcagtgcggttaaaattgttctttatttactttttgttcacctggatgaaatgtttatgcacttgtctacagcagagtgaccatggctggcctcagcgaaaaatacccacaaagaaatgcattacaataagtgggtaaataggaataggtttttttccagggctgcagcattttatttcattttatttaaaagaattatccacagtttttgagataatgacatagttatacccgttactcgtagagtaaaagggtttattagattcgttgaaaagtatgtaacaggcagaccatataaagtatatatattcttgatcaggatcagtagccgagtcgatctggcgatgtccgcctgtctgtacgtttgaacgtcgagatctcaggaactatttaagctagaatgtttagattaagcgtgcagattccagagacatagacgcagcccaagattgttgacccatgtttccatgaccactccaacgcccacattagattgttcttagttttattgttcaccttgcaccttgcaccttttggattgtaatcacacccacatctttaaacaattttaattttttctcattttattcgcaatccgactagctgagtaacgggtacctcatagtcatggttgttcacagagcgtgttatgtatctcaaaaactttgtaatttcaaagagttatttcacaattcattccacagatttcgtggataatgaattttcgattgttcaaccttgcacctgtctcaaaaatgagctttccgtcagcggtccttctgacggtaccgctggcggtcccactgatggttccgctgatggtcccgttgatagccccacggacggtccccttgacggttccgctgacggtcccttcgatggttccgctgccggtcgtgctgacggccccgtcgacggtccggctgatggtcccttcgacggtcccgctgagggttccgctgaggatcccgctgagagtcccactgaatggcattggaacgaactcgttgatgaccaatccaatgacggtcgcgctgacggtcccgctgacggtag

SEQ ID NO: 6689 - DNA, 2081 bp, DROSOPHILA
aaacatttcatccaggtgaacaaaaagtaaataaagaacaattttaaccgcactgcaacccaacggcgagcattaataagaaacttctccacgatggcttcatttttcaacgttggcgccttgggaaatgttttctccactccagttggccagcgcatagaggccgccaccgatgccaacctggcctcggagaactgggccgccaacatggagatctgcgacatgatcaacgaatcctccgacactgcacgcgatgctatgcgtgccattcgcaaacgcctctcccagaacgccggcaaaaacaaccaggtggtgatgtacacgctgaccgtcctggagacatgcgtgaagaactgcggcaaggccttccatgtcctggtggcccagaaggacttcatcaacgagctggtcaagctgattgggcccaagaacgatccaccagccgccatgcaggagaaggttctcagtctgatacaaatctgggcggatgcgtttaagaaccaaccggatctcaacggcgtcacccagatgtacatggaattgaaaaacaagggcatcgagtttccagccaacgatctggatgccatggcacccatttacacgccacagaggagtgttcccgagatgccccctcagctggtggccgctcagcagcacacaatctcgcctcaacacatggctgccgctgctgccgccgcagctgcagccgcagctccacccagcacaggtcctttgcatttgactcccgagcaagcggctaagctgcgctccgaactggagatcgttagcaacaatatgtccatcctcagcgagatgctcagtgttctgaagcccggccaggagtcgcccgatgactatgccctgctcaatgagctcacctcgacctgcaaggagatgcagtctcgcatcgtggatctgattggacgtgtccaggacgacgagctcaccgcggagttcctgcgcatcaatgacgagctgaacaatgtgttcttgcgccaccagcgttacgagaaaaatcgttcgcagggccagggtgctggtgttacctcgccctcggctgtgctgggcgcagccatgggcctgcccggtgtgggagcagctggagcaggagccaccacggtggctacgctaccacctccgcccacaactaccgccgtgagcaatacgccgcaaagtgaccaactgctgatcgatctaatcgaaagcagcgaggaagcccaactgccacagagtttgggacagatcagcctgggtggtggagcacccattggggtgcagaggagcgcacgacctgccgatgaattcgatatgctggcacagtcgcgcaccgatggcaaccagtcagtaaagagtgctttccaatcgagctcatcaagtattaacaataattctttttttagtaaatcggacttgctgcgggacattccctcggtggacgctgctgctgggagtgtgactgccaccgcctcgccttacaaaccaaatcaaccgcagcaggcacagcgctcagccggcgaaccgccggtgcacatcgagggaattgaggagctgaccagctcggagtttgacaaattcctagaggagagagccgctgccgccgagaatcttccaacgatcagtgcatcgaactccgccgccagtgccacgacaggatcggcaggagccgatagcttacgaaagacaccaaagaaaccgggcgccgaagaggatctgctcgcgctctgagtgatctccgccagcaccatcatcggctctaattgtttactctttcaaatgttatacacaccctaacatacttatccgtaacgtctatttgatagcagatacatagtaacactttatgtaaaatgcttttattttttacaaaaacagcaacgataactattgattatattccaaaaaaacaagcgatcttttgttggtctaattgtaagccacgtctacacattgatggtaatttaatgtattacgttacaagtctatttgttgtttatttatacatacattataaagctaatttattttacaaaatcgaaaagaaaaactaaaacaaaatggaaatacatttcaagcacataccg

SEQ ID NO: 6690 - protein, 543 aa, DROSOPHILA
MASFFNVGALGNVFSTPVGQRIEAATDANLASENWAANMEICDMINESSDTARDAMRAIRKRLSQNAGKNNQVVMYTLTVLETCVKNCGKAFHVLVAQKDFINELVKLIGPKNDPPAAMQEKVLSLIQIWADAFKNQPDLNGVTQMYMELKNKGIEFPANDLDAMAPIYTPQRSVPEMPPQLVAAQQHTISPQHMAAAAAAAAAAAAPPSTGPLHLTPEQAAKLRSELEIVSNNMSILSEMLSVLKPGQESPDDYALLNELTSTCKEMQSRIVDLIGRVQDDELTAEFLRINDELNNVFLRHQRYEKNRSQGQGAGVTSPSAVLGAAMGLPGVGAAGAGATTVATLPPPPTTTAVSNTPQSDQLLIDLIESSEEAQLPQSLGQISLGGGAPIGVQRSARPADEFDMLAQSRTDGNQSVKSAFQSSSSSINNNSFFSKSDLLRDIPSVDAAAGSVTATASPYKPNQPQQAQRSAGEPPVHIEGIEELTSSEFDKFLEERAAAAENLPTISASNSAASATTGSAGADSLRKTPKKPGAEEDLLAL

SEQ ID NO: 6691 - DNA, 3415 bp, DROSOPHILA
tcgccagggtcatccagcccatttcgaccacaatcgcagtcgcaatcaccgttcacctggccgtggctatcgatgggggcaggtgctaagcccgaggtcgccacacaaatccgcatttaatggcgaacccaaggacattttcgcggcttgccaattctgtcttattgaatctgcttggaaagtaaggacctcttataagaaacacttagacttggtaaaaaaatatatacaaggaaaataaactcttcaaactctttaaagcaaaactttaattagtagctattttataatcagctttcacagctgcaactgcttagtaaacccttagtaaaaactctatattgtttgcaatttaagtaactaaagaaaacttcgttcactttctcctctgagaattttcctcaattattgccaaaatgtttggccactcgacagctgccgcccagactaaatttttgtgtcctttttcgcagcgaaaatattttggaggagagcgggtcctccgttgcactaatgacacaaatcggcctaaataacaagttgctggcatttggtcaacaagtggagattggagcgaatggggcgagctgcgttgccaactcagcagacagtttttccttcaatttccagccaaaaccacacaccacccacggccctaatgaggcgcaatgatggggaacatggctatctgggagctggtcgcgaaaaggaaattaaaatgcatccccagctgtgccagtgggcgatccggtgggcgtggcagacggttcaacacttgatttaatcattttgatccggggcaaactcaaatcggcttaatttagttttaaagtcagtcagttgtaataaagttagtggcatttggccgcgaggaagaggaaatcagttgaatttgctaagaaaggatcaattttctgtcgctttcgtataataaaaatttaaaacaatatactctcgagaattacttcaaaatgacagattgaaataattttaatgacaggccttaacatcacattcttattgaagctcattttctcacagtacatatttaaaggaaatgtctatcagactgaacgatgacgcgatgcggcagttccgggtggccaaggtgttcccggagacaaagcaccacacgcttgcaatggagttctcctcggacggactgcgcctgctggtctgcgaccactccgccctctcgatcttcagcagcactcgacaggtgcaggtctgcaaggtgcctatgcaccactacctgcccgacgtggcctgcttcgtccagcaggacactcgcgtcctgcactccacctcaaaggtaagaaactttaaaggggaacggtggggccaagatacacagagtgaatggttagaagagacacggcttcgaaagaggcattatttttaaaaatggttttggtgcataaaatgacatttcttatatatttcaattttaaatttatacatatttaaatttaccatcgacagcatgactacaccatccgatgcctggaccttaatacccgccactgcgttcgagttttcggtggccatgcaaagactatcaataggctggcctcccagcctggaggcgagaatgtgttcatcagtgccgggcgggatgatcaggtttacatgtgggacattcgggtcaaaactcacacacaccgcataaagaatctgcgacggccactatgcgcttttgatcctgagggcttgttcctggccaccagttcgggcacggagggcatccagatccgcgatgtgaggatgatgggcggtgagccgagccgaaagttcgtataccaggtgaacgccaaggccaattggacacagttgcagttcgctcccaacgggaagagcctgctgctgagcacggatcactcctggtgcttcagtgtctcggccattgatggtacctaccaacagtcctttactggctattcgaataagttaaggctgccgttggatgccacttacacgccggactcgcagttcatcctttcgggagcggataagggcaggattcacatttggcgcgctgccgatggatttcctgtggcagtgcttaagggcaacaatatgggtcctgttcgatgcatgcgcttcaatccgagagccaccatgttcgtgagcagcgactcacgaatcgtgttctggatgcccatggcgaatggagtttacgattgggtgaaacgcctgaagcccggcgaaactatctcctttacggacgaaactgtacaggaggaggctgtcaaggctcctaggacgattcctatgcccaagcccaaaattgaaacggtatggaaaataaagagactgaacagaaagagagcttgcacaggagatgaaatagttgatctcaccaatgccctacacaataatgactccatggaagatggcgaaatagccgaagactaaaatgtgtaccgatcttttggtagaataaaggcacgggttgttcatcagctggctgctggccaaaagtttgcagaccaactcgcagctgggtatcacccaaacttcctggccagtccttatgcttttgagacacaaattgttgagttttgccagcaaattgcacagctggctgcgttcgactccgaaaaggagttcctggtgtggtgtgcaaacttttggccaagtttcggctgtgtgtatatgttctcctgcagctttctgacaagcgtttcatttagtttctgcggtcataaagagttcccccctcttttaatattaatgaaatcttttgccgaaaagccccaaaagaaaaaaaaacaaacattttgccgctcgagtttgtgaagttgtaactccaattgaacatgtggatggatgctcctaaactttcttgggcgttatgaagttttgaatgcaccaactaaggacctcagtcaaatgcaagtcgtacttaagttggcctaatatgtggctaaaactacacacgtgttggtttattcaggaggatataacatatttgaggtcaattcgtataagctgtgagtaaggtggtgccattcgaatatattaaattccagatggctgccgatgtgaatttcaaaatgaataggcctttcgtaccttaattacttttttaattctgcagcattgtttagctgatgaaatcttcagtgtttgatcaaagtttggccgtaagtgtgcaactgccagacactcgaaaagtcaacaagctagctaaatgcactcctgctgaaggagtttcgtttcgggtgttgcagcagggaaaacagcaaacaggacaatggcaacggcagtcgagaagctctcattatgctaattaagtgccaaagttgggagcagcaactgaaactgaaactaggcaaacataaattaacgcatgcgacaaatgtgcgggaagaaggattaagttggagcctgggagcccgtgcacccactgcaa

SEQ ID NO: 6692 - DNA, 1245 bp, DROSOPHILA
gccttaacatcacattcttattgaagctcattttctcacagtacatatttaaaggaaatgtctatcagactgaacgatgacgcgatgcggcagttccgggtggccaaggtgttcccggagacaaagcaccacacgcttgcaatggagttctcctcggacggactgcgcctgctggtctgcgaccactccgccctctcgatcttcagcagcactcgacaggtgcaggtctgcaaggtgcctatgcaccactacctgcccgacgtggcctgcttcgtccagcaggacactcgcgtcctgcactccacctcaaagcatgactacaccatccgatgcctggaccttaatacccgccactgcgttcgagttttcggtggccatgcaaagactatcaataggctggcctcccagcctggaggcgagaatgtgttcatcagtgccgggcgggatgatcaggtttacatgtgggacattcgggtcaaaactcacacacaccgcataaagaatctgcgacggccactatgcgcttttgatcctgagggcttgttcctggccaccagttcgggcacggagggcatccagatccgcgatgtgaggatgatgggcggtgagccgagccgaaagttcgtataccaggtgaacgccaaggccaattggacacagttgcagttcgctcccaacgggaagagcctgctgctgagcacggatcactcctggtgcttcagtgtctcggccattgatggtacctaccaacagtcctttactggctattcgaataagttaaggctgccgttggatgccacttacacgccggactcgcagttcatcctttcgggagcggataagggcaggattcacatttggcgcgctgccgatggatttcctgtggcagtgcttaagggcaacaatatgggtcctgttcgatgcatgcgcttcaatccgagagccaccatgttcgtgagcagcgactcacgaatcgtgttctggatgcccatggcgaatggagtttacgattgggtgaaacgcctgaagcccggcgaaactatctcctttacggacgaaactgtacaggaggaggctgtcaaggctcctaggacgattcctatgcccaagcccaaaattgaaacggtatggaaaataaagagactgaacagaaagagagcttgcacaggagatgaaatagttgatctcaccaatgccctacacaataatgactccatggaagatggcgaaatagccgaagactaa

SEQ ID NO: 6693 - protein, 386 aa, DROSOPHILA
MRQFRVAKVFPETKHHTLAMEFSSDGLRLLVCDHSALSIFSSTRQVQVCKVPMHHYLPDVACFVQQDTRVLHSTSKHDYTIRCLDLNTRHCVRVFGGHAKTINRLASQPGGENVFISAGRDDQVYMWDIRVKTHTHRIKNLRRPLCAFDPEGLFLATSSGTEGIQIRDVRMMGGEPSRKFVYQVNAKANWTQLQFAPNGKSLLLSTDHSWCFSVSAIDGTYQQSFTGYSNKLRLPLDATYTPDSQFILSGADKGRIHIWRAADGFPVAVLKGNNMGPVRCMRFNPRATMFVSSDSRIVFWMPMANGVYDWVKRLKPGETISFTDETVQEEAVKAPRTIPMPKPKIETVWKIKRLNRKRACTGDEIVDLTNALHNNDSMEDGEIAED

SEQ ID NO: 6694 - DNA, 4870 bp, DROSOPHILA
ctgcaggatgtcgaccgcgatattttcaacgagaagccctcgaaggaggacattatcgccgtgccggaagcttcaggtattttggtttggcttatcccattaacctttcttaactaacccaaaacatgtttctattgcacgccaacaatattttaagacgaaggttattcctatcagatatttcaagaacaattcattacaaaatgttccttctattctagtcgtgcaacgcatctacgagaacgtggtgctccacaccacgaaaggcgatatccacatgaggctgttcttcaaggaggttccaaagacggttgagaacttctgtgttcatgcgaaaaatgggtattatatatacgtcaactgttgagaactgtcccattgcaatcacattattttgtcaggtactacaatggacacatattccatcgcgtgatcaagggcttcatggtgcagactggcgatcccacgggaacgggcacgggcggcaaatccatttggggaagcgatttcaaagacgagttcgtgccgagcctgaaacacgatcggccctacacggtcagcatggctaacgcgggtccaaacacgaatggaagccagttctttatcacagtcctgcccacggtaaggatgaatgcagcggtgattagtttactttactggattgactaagtaccaatctctaattgcagccctggctcgacaacaagcacacggtgttcggaagagtttaccgcggcatggaggtggttctcaacatttgcaattccaaggcgaatcccaagacggacaagccctacgacgacattaaaattatttcgatacacttaagtaattgagcagagggctaaaataaaactttcagcgacactggttttcaaatcttcggagaaccgccaatgcgccgcaaagaattttggtatttttttttaactcggtttttttggtgttttcccagcccggcacactaaacagctgattcgtttcttgcattcggtgttccttttgtttcgatagtgcaattaatataaattgggacaactgcaaatctaatagtattattagaaccggaattagttgtgcaccttctagtattagagacttattaacataaccaacctgtgcctaccggaaatatagaggtacttctcgcaaattatgcgggttcttgcaagataatacgataccatttgtttatggctgagtaaaaaaaaaacaaagaactccaggctgacgagtcatttgtgcgtatcggcactgaatctgctccagattcgaaaactaggtttatttacatttgcatgcaaaggtatattgtcttcgatatgtgaattgtagtatacgtacatagttgcctttatttccagacatgagctaggccaaatataaccgctcgccatgtccaatatggatccaagtgatgtccgcagtaccgcccagctcatcctggccaacgctcggcagggaaatagcgcttacaacatgcagtatgatatgtgtgagtatagcaatgattaaatgatcccgcccaagccataacgatctcccaccgacttcagcacgggcacattccataaacctgattacggaggacttcttggccggttatatgcaggatggcaggatgtccgtggttcgaaggtttttctgcctcttcgtcacattcgacttggtcttcgtttcgctgctgtggctcatttgcattgtggtaggggatggaggcattccaatgagattacgatgctatttaccatgcatttctgttcccagatcaatggagacaatatattcactgccttccacaaacaaatcgtggagtacaccatctacaaatcgctctttgatgttgtggcagtcgctatctgccgatttttggtgctcatatttttctacgccatattgtacatcaatcactggtccatcatagcggtatagttttgctttccaattatagaattccttttatatctaattatttctgcagctctctacaagtgggtcttgcttgttcctcatctcgaaggtgtttgtgttcgatgtaagcctgagaaaccagccaccttaatgtactcttagataatttcgtgtgaatctttcagtggctggattcaaagcagcaggtatttgaggtaatcctcataataacctcgttcatactggcttggggagaagcctggttcctggactgtagggtgattcctcaagagcgacatgcccaacactatttccggagtaagttacgcagacagatccccatatcatattcattgattttcgcatttaagctatgacttcaaatgatcgcacacccatggaacagcctgccattttgattgagcaagaacggcctccgcaaagtgtaaccgatttttattcactcatggacacggctcgtcattccgacgaggaggatgagttggtatgttattcatgaatgcgcatttttaagtctgtccagaataagaaagtgaatctagtggaaatataaaatgaagcacaattgattttgtcaccatatctccaaagagtctgatccaatgacatcggtagttctgggagtttttcccgcatttctaagattttttattcgttcactttacaggatgatgagtacacacaaatgggattggattgccttcgaaaggcctacgagatcatcgagtcaagtgactggaaggtggaaaaagttaaccagaaaggcgacaccatacacagcactcagcgcgacaagattggaaagatctacaagttgacggtaagggtaaagcaatgatcagggaatatttcttcttatacgtaaacttcacaggcccgcatcaagtatcctgcaaaggctctgatggaagatctgttctatcgcattgaagactgtcccaagtggaatcctgctcttttggagtccaagatagtacgcgtgagtgggcacacaacatgacgatttaaaactcctgattatattgagtgtttcgcacagaaaatcaactcctacaccgatattacctatcaggtatccgtgggcggaggaggtggcatggtgaagagccgcgacttcgtgaacttgcggtcttgtaggctcttttacaatggtcaaatctgcgatgacgatgagacggctcagctcagcagcgatgatgggaacagcagtctaaatcggtcttgcgagggtagtgttagtaccatttccgatggtgactcaaacaccccactgctgcccagtagcgtgtctagttgcaaggcaacgtttcccacttcatccaagggagccgctatgccttttgacaccctgggcaacagcttgggcgccaagagcctaggtcccatcgtgaactttgacgaggagccaccgccattggatcaggacgagttcgaggatgctaaggacaaggtcgacggcgaagcgaataacatgacgaaaccaaatgtacccagcgtgggaaaaaccaaggacagggtttgggtcacttcggcggttagtgtgcaatatgctgccgttccaccttcacccaaatacacaaggttggtttcgggactataagattggatgaaagtacacaattacagtcggttgactcttcaattttcagagggcagaacattgtcagtgggtttgcgtttcgtgaaatcgttggaaaatcggatagctgcattgtggagtgggtgctttgcctagacctaaaaggctatattcctcgctatgtcctggatgcagtaagtgccgttcaacacctacttgtttcttgtttattggataattgtttcgatggtgattttcaggccctcacctcgtccatgaccgactacattagcaatctgcgcaagcatgtcaacgaactgaggcagaaggggcgtggtcgagcccccaggacccactaggaaatcagtaatccgtattttaatttaaatcccattgtatctcaagcgagtgctgttcgcagcaaggtatctaatagaatatttcaataatttgaagcaggagagcgagttcagtgctgtaagtttattgagtattttatgtatatgtatggcataagttctatgtacctatatgcacggcttacattataaattttatacatgacttttttaacgtccggcatttccacattcagtcgcacgagcaggcacagcatctgcccacctgtcgctggtgtgttagtcgtaggctcgagatcagttcttggaggcggagtcgcagggcgtggtcctatttgctgtcgttctggggaaaccacatgggacacgcctccatggccacctcgcaaacggcgctcattttggcgctgtcgtagtctggaaggggatattggtggaggctttaacgggatacggattttcgacttacctaggctgttgcgtttgccgaagatgctgccgttgaacggaggcttcctgtaggctgcctcactggagcccaaaagtatggctgcgaccaggatcgtgaccaggagcagagtgagtgtgaatcgaagagccatcttgcagttttcggtgagcgttgtgggcagtgaaaggaaggaaggtctgagctgtgttagaaaccggatgattctgtgacaaaacaaggcgaatccctgacttttatactcgccaaccgagcagaaggatgctgcgcgcctaatcgagttaccgcgagataattgaaaaccagattgcttggggagtttttcgagtgagaccataaaatgtaattatattccacttatgtacatagctgagttatgcttaacctaggctggatttcataatgcaggagggctcacgtcttggcattccagtcgagcaccttgttgaactccttctcgccgaatccgatggctgccgactgctccaaacagatggtctggcgcttcaggttgtcgatcatgtagagctg

SEQ ID NO: 6695 - DNA, 2089 bp, DROSOPHILA
ttttgtttcgatagtgcaattaatataaattgggacaactgcaaatctaatagtattattagaaccggaattagttgtgcaccttctagtattagagacttattaacataaccaacctgtgcctaccggaaatatagaggtacttctcgcaaattatgcgggttcttgcaagataatacgataccatttgtttatggctgagtaaaaaaaaaacaaagaactccaggctgacgagtcatttgtgcgtatcggcactgaatctgctccagattcgaaaactaggtttatttacatttgcatgcaaagacatgagctaggccaaatataaccgctcgccatgtccaatatggatccaagtgatgtccgcagtaccgcccagctcatcctggccaacgctcggcagggaaatagcgcttacaacatgcagtatgatatgtcacgggcacattccataaacctgattacggaggacttcttggccggttatatgcaggatggcaggatgtccgtggttcgaaggtttttctgcctcttcgtcacattcgacttggtcttcgtttcgctgctgtggctcatttgcattgtgatcaatggagacaatatattcactgccttccacaaacaaatcgtggagtacaccatctacaaatcgctctttgatgttgtggcagtcgctatctgccgatttttggtgctcatatttttctacgccatattgtacatcaatcactggtccatcatagcgctctctacaagtgggtcttgcttgttcctcatctcgaaggtgtttgtgttcgattggctggattcaaagcagcaggtatttgaggtaatcctcataataacctcgttcatactggcttggggagaagcctggttcctggactgtagggtgattcctcaagagcgacatgcccaacactatttccggactatgacttcaaatgatcgcacacccatggaacagcctgccattttgattgagcaagaacggcctccgcaaagtgtaaccgatttttattcactcatggacacggctcgtcattccgacgaggaggatgagttggatgatgagtacacacaaatgggattggattgccttcgaaaggcctacgagatcatcgagtcaagtgactggaaggtggaaaaagttaaccagaaaggcgacaccatacacagcactcagcgcgacaagattggaaagatctacaagttgacggcccgcatcaagtatcctgcaaaggctctgatggaagatctgttctatcgcattgaagactgtcccaagtggaatcctgctcttttggagtccaagatagtacgcaaaatcaactcctacaccgatattacctatcaggtatccgtgggcggaggaggtggcatggtgaagagccgcgacttcgtgaacttgcggtcttgtaggctcttttacaatggtcaaatctgcgatgacgatgagacggctcagctcagcagcgatgatgggaacagcagtctaaatcggtcttgcgagggtagtgttagtaccatttccgatggtgactcaaacaccccactgctgcccagtagcgtgtctagttgcaaggcaacgtttcccacttcatccaagggagccgctatgccttttgacaccctgggcaacagcttgggcgccaagagcctaggtcccatcgtgaactttgacgaggagccaccgccattggatcaggacgagttcgaggatgctaaggacaaggtcgacggcgaagcgaataacatgacgaaaccaaatgtacccagcgtgggaaaaaccaaggacagggtttgggtcacttcggcggttagtgtgcaatatgctgccgttccaccttcacccaaatacacaagagggcagaacattgtcagtgggtttgcgtttcgtgaaatcgttggaaaatcggatagctgcattgtggagtgggtgctttgcctagacctaaaaggctatattcctcgctatgtcctggatgcagccctcacctcgtccatgaccgactacattagcaatctgcgcaagcatgtcaacgaactgaggcagaaggggcgtggtcgagcccccaggacccactag

SEQ ID NO: 6696 - protein, 580 aa, DROSOPHILA
MDPSDVRSTAQLILANARQGNSAYNMQYDMSRAHSINLITEDFLAGYMQDGRMSVVRRFFCLFVTFDLVFVSLLWLICIVINGDNIFTAFHKQIVEYTIYKSLFDVVAVAICRFLVLIFFYAILYINHWSIIALSTSGSCLFLISKVFVFDWLDSKQQVFEVILIITSFILAWGEAWFLDCRVIPQERHAQHYFRTMTSNDRTPMEQPAILIEQERPPQSVTDFYSLMDTARHSDEEDELDDEYTQMGLDCLRKAYEIIESSDWKVEKVNQKGDTIHSTQRDKIGKIYKLTARIKYPAKALMEDLFYRIEDCPKWNPALLESKIVRKINSYTDITYQVSVGGGGGMVKSRDFVNLRSCRLFYNGQICDDDETAQLSSDDGNSSLNRSCEGSVSTISDGDSNTPLLPSSVSSCKATFPTSSKGAAMPFDTLGNSLGAKSLGPIVNFDEEPPPLDQDEFEDAKDKVDGEANNMTKPNVPSVGKTKDRVWVTSAVSVQYAAVPPSPKYTRGQNIVSGFAFREIVGKSDSCIVEWVLCLDLKGYIPRYVLDAALTSSMTDYISNLRKHVNELRQKGRGRAPRTH

SEQ ID NO: 6697 - DNA, 9012 bp, DROSOPHILA
agtttagcattcggatcagatcagaccattgacttggcttgcgttgaatagtcatggcctgggccaagcatacacagcatgatgattgtcacaaattgctgcatcgattggtgttgcagctacatatgttgctggttgctagttgctagttgcatgcagcggctgcattaagctgcacttttgttttggagttttctccacgggtcgccggccagcgggcgatcgctccgccgcgcactgcactgcaattcatcaatcataatttgtatgtcattcactaatcgttcgcactgctcccgaactgcttggccagcgattgccccaccatgatgatcaattcaatttacttaaagtaacgcaatgccatgaagttttctctccagtaattatcgatcgatcccactggggcccttgcgtaaagacccttgataatgacttgtggcgatgtaagccgatcttggggcctagctgaaagtgcagtccatcgcacttgaccatcgaaatccgaaacaacaatgattcatgggattttcgcgtctcgcgtctcgtgattatcgagtattggtggaaagatggctgttgagagttattattaaaagcttgggaaaagtcttatgttaattaataatccaaagaatatttcacatgcttaaacttgtatacaaatccaataagagctcttcaaatgattgcattttcatattcatttgctatttgttattaatggaaatacaaattggttgggaatttgagctaacaggtggaggccacgaaagatgactggctaaccctcaaaatgatgtaatggaaaattaaatttacatttatttcatgtcgtgagtcttttgtcagtgaattgttgatttataaaatctacaaaatgtttaaacaattataaacttcaaatgaagatctttagaaataaatattattaagaatataatattcagtaagcacctaactaaatatttcattattaaaattaattccaattgtcatcttacagaatgaaggcttcgaacctgcaacgcatggcatcagcaaaacggacggaagctgcatcagccaccacagtcagagcaacgggaacggaatcgaaggcgtcaacggaggcggaatcgtcggccaccatctcggtggagtcctgcgcaccactgacctggccagcggggccatggaatgcctgccgatgagcagtgctgcccatcacccacatctgatggcgggtgcatcggcggtaggagccgtttccgcctctcccacggcgaccgtggtggtgggtgccacgtatccgcaccacctgcaccaccaccacttgagccaccacacgccgtacagcaatagctacgggagccaccacatacacagcgagcaaaccaagtcgctgcaggagctgcagcacgaggttggcgctctgctggagttccgggacctggtcatagaaacttttcccgacctcaagcacaagatggcctccatgtccgcaacgccctcgactcccacgtcttcggtgggtgccatcggtggcagtcactcggtaggtggcggcagctcctctctggccaccaggtgagttaaagttccaaaatagcgttttgtatataaaaaccatgtgggatctacaaaattttcgttttctttgcagcagacgtgagtgggagccgggcatacggatgaagcgaaaacagtcgcacaaagaaccgtccacgtcgtcagcggcagctgctccttcctccggagctgaggcgtcgtcctcgtcgctgacacgcagccgtagcaactcgcacagcggcaagaaagagccaaagagcggagagaacaacaacggaagcgttgtgcaagactccggcttctcaacggagaccagttcctccaaggagggccacagtgcctcctccaccaacggtgctatgacggtatgtccgaattggtcctgatcaaaacgattactaattttttccccttgatcacacaggtggccatagcagcgaatcgcctgagctgcgcggaatcggacgatgagttgctcaacctgctggacgttattcaccgcaagtccaatcgattacgcgaggaagtggagcacttgcagagctatgagcgccagcacggggatgctcagaagacaggaggcgaaggccagggtgcgagcaaggagggaatgacagcgcagcagttccgagagcaggtggagcgattaaatcgcgaggatatcaaacagctgcgcaaggagcgcgaccgtctgcttgacaagttggccgaaatggaggcggaaacgctgaccggacgcattaaggcggccaagatgagcgaccaggtggaggagttggtaggagtgaagaaagatctcgaggagcagctgaaactggcgatggcccaaaagctagagttgagctcgcgggtgcaacagttgcagcagcagcagcaaagtaaaagctcttccaggtgagaaaatcctactgatttttctaatacctgtaaaactaaacatatttttacatttcagcggcagtcagtcggattactccagtcaacgcaactttctatcctcagctaccacggtgctctccaatggcagtcgtcctagcagcaacgtcatcagcaataacacattccagccggtcgtacttgatcagccagcgcaggaagcattccatcaaagcccaggcagtgatattccattgagaaaacagcaacagcaatccttgggacgtcttgatggcatcgttagcacgcccggaacgcgcaactccaagtgccgtttgaccgactccaagcgatttgcggccattttgttggaaactaatgtattggagctgcagcgccacttgctcaccctcaccgtgcagaaccaggtgctggcccaaaagctggaatcgtccagcaagtccaagacgctgctggccaagcggctggacaaaaacagcgaggagttcgaacatttgcgctaccagctggaggagaagaatattgagcttgagggcaccaaggcgcaattgcggctggtagagtctcgtctgcaggcgagcaatagcaccagcaactcgtatctgcactcctcacagcacgactacgagaccaatcgctcttcggcttccaccacgctaatgctgagtcgtcgtggagtttccgattcggtggactctacctcgacggctatgcctgccccgccagtcacacagatcagtacgcccagcatgaaggccatggtgccgctggccatggatgagctgcagcagcacagtagtagcacggagtcggcgcacgaacacgagaatcaagggcttcaaacacccaacagcaccagctctcccctcagtaagacgatcataaatgcaagtccctgtccggtgggaagcagtacgcccagtaatatagctgcccgtgtgatgagcatcagcgtgggtggagtgagtccgtttgaggccatgactcctccgccgcgacaaaatgcgttccgaaagtttggaagtgccagcaagcccagcaagattccgttgccgggcagcaaggcggcggcctatttttcgggcaaaccgccaacgggaagaccgtcgacggcgggaagatctcctccatcggcgaacaattcaagtagcacctcgtatggcagtaaatcctcgttgagcagaagtacgggaaatttgcagagcctgcgaagagcagagacgtccgcctccaatcactcgctgagtacgaatacgagccggagttctacttcctcttcgataccgctggccaccacaccttactcatccggctcgactggcaatcgcagccagccgacagccgcaacgactccgtccccgcgtgtgctccagaactcaccgctgcccaagctgaagcgggatacgatcagctcgagggtgcgtcatctggactccctgtcacgtgcccagcagacgccggagggcctgaagggtaccaccaccaactccacctccattgccgctcagctgagctcgactctgcgcaaagatctccagctgagtggaaacgggaccggagctccctataatcagcaccacctgaatcacaggcgcagtggtcactcgccggcctcgaactcctctggcagcggcgtgtccaggcgttacagtagtgcctcgactggggggtccggtggtcgagccatcggccgggatcagggtgagcccaccacgcccacatccagctatggcggcgacagtgatagtggcaaggtacgcactctcaaatcaacatttttgggttggttcaagtgaattattataatactactgataataccgatacatacatttatatatatatatatgaatatctactgattaccgtttaatatgccttcgataacatttacgaaacaacaaagaaccacaagaatcatcatcttcgttacagtttatgaaatcaaatcaaaacgatttaaaacaagtacagaaatcagcagcttacgaacccgatattaactgtttacgttaatattcattgttacgtacatataatttatttaaacatacaattaacccatggcatatatactctaaaaacatatatactacagttacatgcatatattctcgaaatcaaaaagtcagaaagaaatgaaacacgttagcgtttcgtgcctaagaaaggaaatatgttttctgccctcgttgtttgtcttattatttgtcaaatgcgatcttttcaacaagaattagataatttaacaatgactgtgttgccaataggagtatttcctattttgtttaagaatgtttgcttcactaacgaaagcgaagaatttatcaattgattgtttgtagcacatgtttacaattttgatatcaattgtaatacttgaatatttgttgagaactataagtttcccattacagtatcatgaacttataacaaaaatatatttcgttgtaatttttattttgttctaccttttttttttgtaatccaaaacgtttctaaactatttcttgccatagctatatcagcttcacgaagatgacttttctgcagagtaaaagaaaaacacaagcccttgacaaattaataattcttcggtccaagaatggtcaacacacctcactagtctcaacagtatgttcgatatttcgcaccctagaatacagtttcaagaccctgctgctattgctttgggtttgggtcgttgactcaacacttggctagtgaaaggtgcatcctatcaaactctcactgcctatcgatgccttaggtgcttagtagccggctttaattaatcagcaatttcacatgcaactgcagcaacaacactagcagcggtgccagcaaaaacaacaacaacaacagcagcagcaatgtttcctctatatagttatgtatatacaaaagaaaatgaatcaaaagtcaaaagcatgtacgatatcatttcatttactcatatattatgcaaatcacgattatgtgtggcttagtatattttcctcaagtatgcatgcctcattgttggatcagccagtttctcattgtgttcgaaagtgagtttaagcataattattagtttgcgtgtgtatttaaaaattattattattaccattgctttctttgtaattaatttaagctatacttaaactattattgggcttaatttaaaggcatatttattaatttgtgtatgaagcagccgggcttataccaacctatgcgtgtacgctataacataaaaatataaaaccgattatatagaatatgacagacttttctatttatttcttaaattttaaaagaaaaaaacatttcacttgtattgcaataacagaaagacttagttagaagaaagccagtaagaagtaagaacgtgcaagaagtttgcttttgtcgtatgatttgattgcgtttgaggaatggtactttcaatcatcatgtggtcgatagttcatccgaagatccaactaacaacacactcatattcatccacatttacaccagggcaaaaacaccatcgacagcatagagtgctttgttttggctttgtttgtgcattacaaaccacccaagaaagaattcaattagatgatcacacttgaaataatttgtatctaatgctgtaatttcttttttacttttactttttctttctgcgcctttctaccctgtttgtatgtctactccaaaaacaaaacaataatttatactgtctgttgttgtcataactcacatatatactcgtcttttgtatatccgaaaaactgaccgatccaaaaatatccccgcaaaaaaaaaaaacatataaaatatgaatgtacataaaaatatgtccatccaaccaaccaaccaaacaaccaaccaacaaacaacaaaaccaaccaacccaaaatcccaaaaaccgccaacaatccaaaatgtaactaaaaccattgtgaaaacagatacaagccacttatcctaacaaacgccaggctacactgagaaaataagcatcggagttggtatggatagcagaaattacccatattcgtggactaaaggtggtgtactgattgactgattgattgacgtgttggtggtgaatacatatatttcgactgcatgccaaaaataaaaaaaagaagaaacttaatcctgaaatgctaaacatgtaatgagagtgcgactggagtttttggtatcggacagccacagataaaaccgatggccaaacgaaaaggagcagcgccctcgcccagtacatcctcctcagctcagatcagctcagccccaaaatccagctcagatctcaatctcgagccctctgttgtaaatcgtttgtctgttttgtttttggcccaaaagcaaagacaatgaagtagacactttgccgccaatcgttatacgcgtaagtctcttttgttgtatctcacctagtaggttaagttctaccattttccaaaccaaaacaaaccaaatcaatccacaaatcccaacaccgccaaacccacggctttcttttgctttaccccacactgagttacaccagcaatggttttttgatttcgatgtagttcgttgtagatctagcctaccaagactatctagacttagaccctcaccctttctacaatagcaaaacgggcagtgcgcacaaaaaacaaacacaaacttttaaaattgccaagtaaggtaaagtgatttaagtgacttaacaaccgctgtacataaactgattgattggttgattgattgatcgcccactgtgctaaccaaaactatatatacttattgtgccagaggttgagggatctaaccgctgtccaagagatcaaatctaccgcaacatgctaaccccaaaaacttaaatattataattaccattcttttcgttaatgtgcctaaaaagccgtctaaacccctttcttacttctgtttgcgttctaatttctaatcctcattacctgattacccattgtaccaaagaattgatattctattctgtttttctttgctcttacccgaattctcccgaaaatgatgcttagaatttggccaacaccgttgaaaagccaaatttccgtctcaataaccaaaattggcaactatggcaaacgagcagcagcagccagggaaagattcaaatggaacgatatctgccccatgagctgcacgatgtgtccgaggagacggcctacgattcgtactacaccgaatataccacgcccgattccatggattgtggcagtgccaatctcctggtcactttcgactatggctactgtgactccatggaggccagagctaatcctgcagccccggaggatgatgatcggtgcgatggcgttgatcctgattatggtggtgatgggtgtgcagacgaggtggatgccatctggtttggtactccgcccagggataagaaggacgagaaactgtttgaggtgcatcatgtgcagcacaagctgctggatgacagcatgcagtccttgatttcctacgatgttgatgattttgaggaggagctatcggaaccagatccagatgaagagattttctatgatagcattgagtgtgtttaagtgattcccgggtgcaggtgtttaactatcaactatcatatctaaactagtccttagtttcaaacccccatttcacacgttgttttgtaattatcgaaagaaaatggataaatatgtgtatgtagctgtagtttagtgttacgtgatgtgtataatgttgatttaaatatatttggtttaactatccaacggccctgaaattatcgattgtaactgaaatgaattgtgactgaattgtattgaacgtaatgtttgttttctccattaaccattcagggctttagtctttacgtaaattgtttcttcgactatttattaatagcatataatatgtatgccttacccactactttgtatgtaaaatattatttagagcgtgtgcatctttgtaaggagtcgtaagttagttatcctgcaccattgcctatttactcaaaactacatttaattgactcgtactaggccggctaagtagtttagttgttaatcaaatttagttaacacatcgcatctaatgtatgtatgtacagtttggtatactatcttattatgtatgtattctatttaagtcgaaaggcaattgtaataggctctatctatcatgttatcacgaaactgcgtttactacatttataaaaccaacagacatagaagtgagggaaaccaacatttatgattcatattaaagctaataataatatattcaaaaggcagcaaatgtagacatgtatccatttcaacagcaaatgtaattgataaacacataaatgaaaaaaaaaaacactaaaataaaaattataaaaaatacatgagtgcttgattttttattaaatccgttggattactgcggtaagttttgcgactatgtatatacattttttagctatcttttaatattttcaatcaacatataatggcgagacatacttttactttgacacacttacatatatatcaatcaaaatcaatccaagttaaccctcagactgctgggctgctt

SEQ ID NO: 6698 - DNA, 3540 bp, DROSOPHILA
ttacagaatgaaggcttcgaacctgcaacgcatggcatcagcaaaacggacggaagctgcatcagccaccacagtcagagcaacgggaacggaatcgaaggcgtcaacggaggcggaatcgtcggccaccatctcggtggagtcctgcgcaccactgacctggccagcggggccatggaatgcctgccgatgagcagtgctgcccatcacccacatctgatggcgggtgcatcggcggtaggagccgtttccgcctctcccacggcgaccgtggtggtgggtgccacgtatccgcaccacctgcaccaccaccacttgagccaccacacgccgtacagcaatagctacgggagccaccacatacacagcgagcaaaccaagtcgctgcaggagctgcagcacgaggttggcgctctgctggagttccgggacctggtcatagaaacttttcccgacctcaagcacaagatggcctccatgtccgcaacgccctcgactcccacgtcttcggtgggtgccatcggtggcagtcactcggtaggtggcggcagctcctctctggccaccagcagacgtgagtgggagccgggcatacggatgaagcgaaaacagtcgcacaaagaaccgtccacgtcgtcagcggcagctgctccttcctccggagctgaggcgtcgtcctcgtcgctgacacgcagccgtagcaactcgcacagcggcaagaaagagccaaagagcggagagaacaacaacggaagcgttgtgcaagactccggcttctcaacggagaccagttcctccaaggagggccacagtgcctcctccaccaacggtgctatgacggtggccatagcagcgaatcgcctgagctgcgcggaatcggacgatgagttgctcaacctgctggacgttattcaccgcaagtccaatcgattacgcgaggaagtggagcacttgcagagctatgagcgccagcacggggatgctcagaagacaggaggcgaaggccagggtgcgagcaaggagggaatgacagcgcagcagttccgagagcaggtggagcgattaaatcgcgaggatatcaaacagctgcgcaaggagcgcgaccgtctgcttgacaagttggccgaaatggaggcggaaacgctgaccggacgcattaaggcggccaagatgagcgaccaggtggaggagttggtaggagtgaagaaagatctcgaggagcagctgaaactggcgatggcccaaaagctagagttgagctcgcgggtgcaacagttgcagcagcagcagcaaagtaaaagctcttccagcggcagtcagtcggattactccagtcaacgcaactttctatcctcagctaccacggtgctctccaatggcagtcgtcctagcagcaacgtcatcagcaataacacattccagccggtcgtacttgatcagccagcgcaggaagcattccatcaaagcccaggcagtgatattccattgagaaaacagcaacagcaatccttgggacgtcttgatggcatcgttagcacgcccggaacgcgcaactccaagtgccgtttgaccgactccaagcgatttgcggccattttgttggaaactaatgtattggagctgcagcgccacttgctcaccctcaccgtgcagaaccaggtgctggcccaaaagctggaatcgtccagcaagtccaagacgctgctggccaagcggctggacaaaaacagcgaggagttcgaacatttgcgctaccagctggaggagaagaatattgagcttgagggcaccaaggcgcaattgcggctggtagagtctcgtctgcaggcgagcaatagcaccagcaactcgtatctgcactcctcacagcacgactacgagaccaatcgctcttcggcttccaccacgctaatgctgagtcgtcgtggagtttccgattcggtggactctacctcgacggctatgcctgccccgccagtcacacagatcagtacgcccagcatgaaggccatggtgccgctggccatggatgagctgcagcagcacagtagtagcacggagtcggcgcacgaacacgagaatcaagggcttcaaacacccaacagcaccagctctcccctcagtaagacgatcataaatgcaagtccctgtccggtgggaagcagtacgcccagtaatatagctgcccgtgtgatgagcatcagcgtgggtggagtgagtccgtttgaggccatgactcctccgccgcgacaaaatgcgttccgaaagtttggaagtgccagcaagcccagcaagattccgttgccgggcagcaaggcggcggcctatttttcgggcaaaccgccaacgggaagaccgtcgacggcgggaagatctcctccatcggcgaacaattcaagtagcacctcgtatggcagtaaatcctcgttgagcagaagtacgggaaatttgcagagcctgcgaagagcagagacgtccgcctccaatcactcgctgagtacgaatacgagccggagttctacttcctcttcgataccgctggccaccacaccttactcatccggctcgactggcaatcgcagccagccgacagccgcaacgactccgtccccgcgtgtgctccagaactcaccgctgcccaagctgaagcgggatacgatcagctcgagggtgcgtcatctggactccctgtcacgtgcccagcagacgccggagggcctgaagggtaccaccaccaactccacctccattgccgctcagctgagctcgactctgcgcaaagatctccagctgagtggaaacgggaccggagctccctataatcagcaccacctgaatcacaggcgcagtggtcactcgccggcctcgaactcctctggcagcggcgtgtccaggcgttacagtagtgcctcgactggggggtccggtggtcgagccatcggccgggatcagggtgagcccaccacgcccacatccagctatggcggcgacagtgatagtggcaagaatttggccaacaccgttgaaaagccaaatttccgtctcaataaccaaaattggcaactatggcaaacgagcagcagcagccagggaaagattcaaatggaacgatatctgccccatgagctgcacgatgtgtccgaggagacggcctacgattcgtactacaccgaatataccacgcccgattccatggattgtggcagtgccaatctcctggtcactttcgactatggctactgtgactccatggaggccagagctaatcctgcagccccggaggatgatgatcggtgcgatggcgttgatcctgattatggtggtgatgggtgtgcagacgaggtggatgccatctggtttggtactccgcccagggataagaaggacgagaaactgtttgaggtgcatcatgtgcagcacaagctgctggatgacagcatgcagtccttgatttcctacgatgttgatgattttgaggaggagctatcggaaccagatccagatgaagagattttctatgatagcattgagtgtgtttaa

SEQ ID NO: 6699 - protein, 1121 aa, DROSOPHILA
MECLPMSSAAHHPHLMAGASAVGAVSASPTATVVVGATYPHHLHHHHLSHHTPYSNSYGSHHIHSEQTKSLQELQHEVGALLEFRDLVIETFPDLKHKMASMSATPSTPTSSVGAIGGSHSVGGGSSSLATSRREWEPGIRMKRKQSHKEPSTSSAAAAPSSGAEASSSSLTRSRSNSHSGKKEPKSGENNNGSVVQDSGFSTETSSSKEGHSASSTNGAMTVAIAANRLSCAESDDELLNLLDVIHRKSNRLREEVEHLQSYERQHGDAQKTGGEGQGASKEGMTAQQFREQVERLNREDIKQLRKERDRLLDKLAEMEAETLTGRIKAAKMSDQVEELVGVKKDLEEQLKLAMAQKLELSSRVQQLQQQQQSKSSSSGSQSDYSSQRNFLSSATTVLSNGSRPSSNVISNNTFQPVVLDQPAQEAFHQSPGSDIPLRKQQQQSLGRLDGIVSTPGTRNSKCRLTDSKRFAAILLETNVLELQRHLLTLTVQNQVLAQKLESSSKSKTLLAKRLDKNSEEFEHLRYQLEEKNIELEGTKAQLRLVESRLQASNSTSNSYLHSSQHDYETNRSSASTTLMLSRRGVSDSVDSTSTAMPAPPVTQISTPSMKAMVPLAMDELQQHSSSTESAHEHENQGLQTPNSTSSPLSKTIINASPCPVGSSTPSNIAARVMSISVGGVSPFEAMTPPPRQNAFRKFGSASKPSKIPLPGSKAAAYFSGKPPTGRPSTAGRSPPSANNSSSTSYGSKSSLSRSTGNLQSLRRAETSASNHSLSTNTSRSSTSSSIPLATTPYSSGSTGNRSQPTAATTPSPRVLQNSPLPKLKRDTISSRVRHLDSLSRAQQTPEGLKGTTTNSTSIAAQLSSTLRKDLQLSGNGTGAPYNQHHLNHRRSGHSPASNSSGSGVSRRYSSASTGGSGGRAIGRDQGEPTTPTSSYGGDSDSGKNLANTVEKPNFRLNNQNWQLWQTSSSSQGKIQMERYLPHELHDVSEETAYDSYYTEYTTPDSMDCGSANLLVTFDYGYCDSMEARANPAAPEDDDRCDGVDPDYGGDGCADEVDAIWFGTPPRDKKDEKLFEVHHVQHKLLDDSMQSLISYDVDDFEEELSEPDPDEEIFYDSIECV

SEQ ID NO: 6700 - DNA, 13563 bp, DROSOPHILA
agctgcgtatttagaacagtttcaaactacacagaaatcagtaatgggggtagcatttagatgaagcagtatgaatatttgcataaaaccaaccaacttattactataccacacactataagtatttgtatgactagcgatattgatattgtattctaaccgcaactcgcaatctccgatgtcgaacatgttactcgatccaatccagatgctaacctctcttgagctcaaatatagcactcacttgatgtccttaattgaaaacctaatgcccgctatttgtggaccaggtgaggtatccgccccctgccacgcctatattataatgtaccaattagagtgtcagaggtctgaagctgcatcgccgaccgagctaagctttaatttgtgttttatatatgtatgtatttattatttagtctttaatgccttatgaaagcgttaaataaatgcaagaaattgaaatcacttagttcgtatggaatgagttatatattagttctagcctaactacattagtttatgttacgtttttattttgttatcattgaattgtgtccgaaatatgcgagttttatatgtataggttcaggatacgctaattttgtaacatgcagcattgtcattaacttttaagtatgttatttttattatgtgtgagatattaagagctcccggcacccaacaaaatgaatattatgtaagagacggtgcggaaactgtcagaaaaaaagttgcaagagaaaataagtaaaatggtacagttaaaaaatcacaataaatattttttgctaaataatttcaaaacccttaaataaataagtaattgtttcaaaaaatgcatacagttttttatattttcggggattgataatggaccagaaccatttaaatcatctactacaagttctcatctcactgctcgtctggctctactttggaattttgccaaaactaagatcctgaccctcttgtaaatataaataaaacagctttttttattttttagtatggtgtaattttaatatccacaatattcatgagtgataatttttgggcgattattttatacatcaagagagataacgaatgttgtagtctctttcttgggttagttcgaggaatgaaattcattacatgcgcgactacaaactgtaggcttacaactaggcaataaaactagaatatgcgacatacattatagatagagcataaaagatatatttggtaagttgggacgtctggtgccgtctagctctcaaggaatgtcgggtactaaattgtacggtgcacaaagcgttaagtgttatggactgagcctctcatcttgcatcatttcaactgcccggaatcgcagagactgtagacttaattttggaccgaagcctacagccctgcaagacagcagttaggcagattcaatccgatcgacgcaaatccaatctgttaacttatctcttctagctgtgcgtaactgggatggggcgagccattccttgcagctcaacaacgtaaattcattcactaagtatgctaactaggtgtcgatgtgttccgtggttccacatggtgcatagaacccgagtattgggtgagtgacggtgagagggtgatgatcgtgtgggtagtgggcctatgccacattcacaactcttattctaatcctctttctagcttagttgaacagacgcttcagtatgctctggatggtcttcagggactgatcctcgatgaggaaggtgcggtggttgccctcaacagtgtgtacttccacgggctttgtgcagacctacgaatatgaataaccatttagaatttgcgtatttattttaggatatgttgaaactcacctccttaaggcgatagtcctcgtccagcttggcagagttgtctgtgggcttgaccaaggtcacattcgtcttgagcttcagagtgggctggtagccatcggccagctccagtttcttgtagaacagagtggcggatttcttgatctgtaagttggcgtacaaatcatttagtaagctgtgatctatctttgcagaagtctctgtgctcttaccgtttccacgggctgggtgatctcattgctcatcagctcagcgaacctctcgagtttctcctcccatgtggggatcactattagcagacgcaccagctgtataaaatgaatgtttaattacaattcgaactatggccaaatttaatgcagctacttaccgctttgtagtcaatgttggccaacacgattccaaagtaggccaagccgtagctctggttgtcgttatcggcgttggtgccgtcagtgtaacgctgcttgaagctgctcgtgtaccagttgacgtagcttggggctccgtccagcatgatcacattggccacctcgttggtctcttccagaataccggccatcacgtaggtgagcaggcaaccgaaggagtatccggctagtttgtagggaccctttggctggacggtgcgcagctgcttgatgaagaatttggctgctgattccagagaatcggagggcacggcttccgtgtactgcagtccataggcgggcacctccaatcgcttggccagcggctccagtgcggaggcgaacccctcgatcggggaaatgaagaagatggggctctgtttgctgtttgcaggtgcctttgtgtccagttgtacaattgcctcggtggggatgagggacgtggtgaacaccacctgcgttccatcgcccatgggactagctgtgcgcgaggatccaccagaggtaatgtttgcctctgggactccagcagcggctgcgggagcagctgcggctggcttgacatcagcaccaccatccatggccttgagggctccaaaggtgagctgacggatctcctgggcggacagaacaatgtcaaagtttcgctccaaagtctgtttgatctcagcgctcatcagggagtccattccgagatcagcaagcgatgctccgtcctggatattcttggtgtcccggagaccaaggatgttggcaatggtggcaattaggctgactccagccgactgatccgacttgcgcttctcggccacaaccatggaggcaacaaccggatggggctgttgcaggaacaggtcgatggtctgcaggcaagagggcatcctctggggcagggttcctccaatcacggtgtcattgtcacccaagttctccagcaccagaccggtgtctccgatggctccccattggatggcggtgcctgggaatccgctcacctggcgctgctcgcaaattcgctccattgcagagttggccaatccgtagttggtctgaccaatgttaccacgaccgcaggaaacactggagaagcagatgaagtagtccagctcagtgcagatatcgcgagagaactgatccaggtacttggtggccgtcaccttgggatcagccactgtcttgaagtccttggcggtctgatcctcgatcagagcatcgcggagaacagccgccaggttgaagatgcctccgaccaaagccagcttgttactattctccagcagctttttagctccagcggcggtggtcacatcactggtgtcaatcaccacctttacgccacgttcctgccagcgacggatcatcagaccctggtagccggtcttaactccggaacgagaggtcagcacaatgtagcgggctccacgcgtcaccaaccagttggtcagctccaaaccgaatccgccaagacctccaaccaggatgtaactcttctccgggtgcatgtatgtgcgtggaatggcgttgatcaggcgcggcttgggctgcagcgccttcttgcctgcctcctcatcacgcaccttgatcactaccttgccgatgtgcttgccagaggccatgaaacggaaggcctgctccacctgctggtcgttaaacaccgaggtcggaaggggtacaacggctccggtcttgatgccctcagcgaccagggagacaacctggttttgcatctcctcctcgccctccatcacactgtcaagcaaaatgccgtggaaggaggtgttcttgaggaaaacggacattccaagtgggctgttgttgctcaaatcgaacttgccaatctccaggaagcgtccattcagacccaaacagcggatcgaggcctgcagtttctcttcagataacgagttcagcaccagatcgactccgcgtcccttggtctcgcgcaggaccaactgctcgaaggaggtgtctcgggagttgccgatgttacgctcctgcagtttggggaatcgcttcagcaggaactcgcgcttttccttgctgcccaccgtggtgaacacggtcaagccatgggccagagccacagagatggccgcctgaccaactcctccggagccagcgtgaatgaggatcttctcacccttcttcatttgtcctcgcacaaccagagcgtagtagacggtggagtacacgcaaggaacggtcgaagcctcttccatggtccacttctcagggatttgccacatcatgcgcttgcttgccacgcaggtggtagcaagtgatttagccggcaccatggccattacacgacgaccctgggtatcgcgaccagcgaactccagacccagcacacaatcttgctcagccagatctccaggcaaggcatccgcggccagcttaccagaggtcaacataacgtcacggaagttgatgggcgcatagtagacggtgcaagtttccaggttcttgtcgacagttgcagcggtatccgcctgggcagcctcgatccacttgagggaagcaagatcacccttgaccagagcgtttacataggcatgctccacttggagagtggcctgctgggtctccagtttcaggtgacggaaagtgccccaagcgccgttcttcagcacgttcgagatgaggtccttctccagctgctggcggtacagggtcgatgtaagggagaacttctcagccttggcatcttgcacgaagaccaggcgagccagtttgccgccattctcgttcttgatgcacgtcatcagacccacagctccaaacagctcctctccctggcaaaccacgtacacatactgctcctccgtagcagcagtagccagagcggccttcaagtcatccacccagttaaagttctgctcggtggccacaaccacaacggacttgcgagttttcagatcaacagccttgcgggcgaggaccaggacacgggtggctcccagactctgttcctgaacggcaacgaatccaaatttggtcagcagggcacggcctgtcttggtgtaagtgggcagcgtctcctcaaggatcaggaaaccgttctcgcgaatgctggcaatggagttctccagggtcttggtgtccggtcgggaaaggacatcgatgccaaagacgaagtgacagttctgctctaccggttccttcagcacgtccttggacaccactcgaactcctgaatctcctagggcggcggttatggtctcttcattgttgttcgaggtgaccacagccacatcaccagtaagcacgggctcaccctcgataatctgcagcaggcggttggcaaccaaaacgtcggggttgcgtccattggccaattccacgccctttagcttgacggctccgctggagttctcgatgatcacctggatggccacatccaaggcgtgcaggcgagccttctcagagttttcatttagatccgtggtgttgatgttgggcacaaactggtagcgctccagagtgggaggtgcctgtgtgccaggacgacgctgggcgagattggcctttagaccgcgcagctccacgcccgcactcttgatcacgttaatgtcgctgtaccactgcacaggtagtccagtctcaacctgttcctccttggtgagggcgctcagcaattcaaagtgcttggcgggattaatcaccgctcgctcgatgcgagtgggcaggtacagctcacgaaggttcttgctaaggatactgaactgcaacatggtgtccatgaaactaatccagttgtccacccactgaagctttccagtggaggccacggtgtcagaacgaacaatgccgcggaaaattccaccatagtcgtagcctcggaggcgcagctccttgtagacatcgttggtgcctagctccttggcaacagcgctgggagtttgctcctccaggggcaactcctcgttgtcaatagactctggaatggttatttttccagaaaccgccaagctaccgctctcacaaatctcaaaagcgccagttccatcgaagaagttaatgccaaacttgaccactgcgttcttgttaagaatagtggcacggtggaacacgaggttctccattaccaccggggtcttgtggaactcacttccctgcatcttagcgaatgtctgccaagccagagtcatgtagccagtggccgggaagaggatacgtccgtcgatcgtgtgtccagccaggaaagcatcatcctccttggagagatcgacttccacgatggtctcaccagaagaagtttccttgccgaacttggccaccagccacttctgggtgtggtcccatccgaccttggagttcaacatgggggttccacgacccaccgggtagctgataggacgcactagagtaagtacctgaggctgggctccggcggcaaagagtttgcccacattggtgaggaagaactcaacgttgttctcgtgtccgcgcttcaccaagctcagattggtggcatcaggacccagggcgcgcttgaggatagcctggagcaggccgtggggagcaatctccacggaaatggcgttcttgggaacgtgctgaagggcctcgtggaagagcactggcgacagcagattgttcacgtggtaggcggccgaggattgcttggccaccggtgtgttccaagcggattctgggatgctggtactgatccagcgggcggtacggttcttagcgttgggaatgatcttctccagactcttgcgtagtttgggtccagcttcagcgatgtacttgctgtggaaagcgtagccggatgagttcactgccttggcgaacactccctccgcgttcagtttagcgaccagagcctcgatggaagcctccgggccagagatggtgcagttgtcctcgctgttgtggcacaccgggaagcaatcgctgggcacacggctgtgcgcatcttcccagctcaatcccacagcggccatcttgcccttggccagttgagtgtccagaatgctctttcctcgccagtaagcagccagcacggtctgctccggggtgaagcagccatcggcgtaggcgcatccaagctctcccaccgagtgtcccacaattccgtcggggtggatgcccagcgagctgagcaaatcggtaagagccacttgcatggcagcaatcgagatgaaagagttcagaatgttttcgaagctcttgtccgtggaacgggtcaggacatcgattagatccactccctcgggctttaggacatcggcacacctctgaatggtcttggcgaaggcctcgatcttcatcagatccttggccatgctagcccactggctgcccatgccggagtagatgtaccaaatagggcgtttatcgtcgttggactcgatcacctcacgttggtgggtgcccttgctgctcaccactccgtagccacggaagaagtgattcggaatagcctttgagtggatctcgttgatcagttgcaggtactcatcatcatcggcattagtagaggcggactcgagcaactgctccacagcctcaaaggtgcgtccagaggcgaggaccactttcagtgctccatccttgggggtcaaagccttgggcttggggttcgactttaagataacgtgagcgttggctcctccaaaaccaaaggagttcaggccgatgatgccaccgttccaaggcagattcctgtcgaccaccttgagacgtccatcaacgagtccataaagatctgggttcggcttgttgtagtgcaagttaccgggaatgacgccctcctccatggcgatcagaatcttggccacagagcagacaccggaagcgggttccgagtgacccatgttggacttgaccgatccgatcaacagaggggtcgtacggtccttgcagaagaagtcagtgatagagttcacctcctggggatcgcccaccttggttccggtaccgtgtgcctccacgtaaaccacatcggcggggttaagaccaatctcctcgtaggtctcgcggatcaggcgattttgcatcttgccaatagggtatgtgatgccctgctccttgaaaccatccgtattggtgcgcacattgaggatggaggcatacacacgcctggctgcagaggtgcgctgcaggagcagcaccacacatccatcggaacggacgtatccattgccagactcatcgaaggccttgcagctgccgtccgggctcaacatattcagtcgcttgaactgcagcgacatggtgggcttgaggatcagtccagctccagcgaccagggcgttgtcgacctttccttcgcgcatatcggagaaagcctgttccaaggcgtacagagaactggagcaagcggtgtcaatgctgtagctgggtcccttgaaatcaaaggtgaaggagatgcggttggcaaacatggcacgggcacatcctgtcaagccgtagccgttaacccggtcagcatcgctgcaccagtgctgctcagtctccgagttggacacaccgatgtacacaccagtgcgggaaccgcgcagatcacttgggtttaggccagcgtcaataatagcttcatgggtgagctcgagcagcatgcgcagcagtgggtccatgcactcagcctgcttttggtgcacaccgaagaactgttggtcaaagttctccagatcgctatccttgagcttgccaatcctgtcgggaagtccatacagacctggaacgaaggttgttaacacattagattgtaactactcaaaagaatgctattccttatgagaagtccattggtagttgatcttaccacgctcccaacggcggggatcatcgttgaccatgtcgacgccgtcgaaaagattctgcttgaactcctcgatggtggagctctccggcagacggccggagaaaccggtgatggcgatctcatcgttgaggtgctgctgacggggcacatagtgaccaccacccaggtccaattggggggcggcacgttgtgcgggctcagcggtgatgacttcctcggcgaatcgggcgggcatattgatggattcgggattgaattgggagtttaggtggtcctgtctatcgttgggtgcagagtgcggggtggacgaggaggtgctcggtgttagctgcgcgtcggtatcacggaaggcgtcaggttgctgcgaattctgctgctgcttgttgcgtctgcggcgtcgacgacgattggcgcgagcgctctttccgttgttctgggtgctgggtgaatgttggggctgatgggtgctgcaattgttgggcttgaaagcaacaggatgcggctggtccacggcttgcaacaggtttagttgtaggggctgcaattggagaagaggatgcgaaagtcttgttagtataactcatttcgtgtattaaatattttaaaattgtgatcattctgccgcatctgcaacttgtctgccacccctcgctgttaagcaaaagctctttaccacccgcaagcgcagagctttcgctctctggagcgggatgccgggcgattaggttttttgtttgaatgttcagctggtggaaagttggtgtagaaattgcaaatcaggtgatgccgcgcagtcggagctttgaccgcgcatataccggcacacagcattatttgttatgggcggcttgctgctttgaagccagcgactgggttgacagttaacagcaacttgtggcagtcgcgttaacagtgcaacaccattcgcgttaacataggccgcacacactcacactgagccaacgcgaacggcaagctgctttcttattcgccgagaaactcgtacgatgtgcgaaatcgaatgattcaacaaaagaagggaaactatataatgagcggagctggcggagtcggtttaagctgaaatctggggaagccgaaagcgtcgttagaagaggaagagcgagaacatgagcggtcagcaacacagaacaaataaacaatacactcagaacaaaacgaaatacgaatcgtgcagccgtagtttctttgaaattcaaatgttattgatcatataaatatggaaccatacttacaggaaccattttcatataataaacctatttttccgcgtgtagccactacaaattgccggtaaaaatcgggcgactcagcagcaagcttatctatcaaatggccgttggcttggccagacttctatgtttatgttttgctattgtaataggcatccgaatcggaggtgggtgccaaagagagcggcgtatagtcaagacgcagccccaaaagtccccaccgccatgtgtgtgtacatacacacacacacacacagacacacgagctcgacgcgtgtaccatttgtttagtgagataaggtggcgtgatttctcaagttcattgaagtattattttcatagtctctccagatcggttgatctaccggtgaataaactcgcaatgcgatggtgagaactatccttttacagcaattgaacgggcgtatattgatttatcgatggcccccgcccccaatcgatccatccatcatcaggccatattgcgaaagttgcgtcattggatatgtaaacacgggtgacaaacatagccccctcccctttccactctaaactgtgtttgtttatgcactcggttccattcccgcagccatcgattggggcccaaagtactgctgtacgcgtcagcacagcccccgcccaaaaacccacatccccagcccagcaaatcgaatctgcctgtgacgcttcaagttcatgaacaagatgataacgtctctgactgagactaggccatggggcgattccgaaacggcctggtggtgataagagtgataaggcagcgctgcctactcatacgactgtgcacctgtatcggaaatgtttgatcggcggcggacgcgtgttcttcaggaagcgacgactctattagccgataaagattagccagacactcgaaattttccaatcacacaatcgcacgattcttgtttgtttttggctgcggaattggggcgtgtggccgcctttatgggttgctgggtgttgttgttttatgcaaagcgatcgcttgataactcactttcaactttttgagcattcagctggtagagctaagcaatttctgaaaagtattttactttaggtgcttaacttttgaatttgattttgtatttaagcaaacaacttattgttattgcaacatttatcactgcaatttcaaatgtaataatagtaaaatttataatatttgtttgtttgcttgactttagctaaatacgcagatagatttccctattttcgtattaaaagcaatttcaaatttcatttttagtaactgtcttaatggctgtgcagttagcatggttgtaaaataatgaaaatggcacacgcaaccggaaaattgttggatttgtcatttcagaaggtttgggttcgttgcaaaaatggcactggacttatttacatgggaatatttagcaaggatttccgaattgcaaaaggactataacgatgtctgccaaggaaatcgtagaaattaagcagctcttgcatggcaattagaaagggaaaccctatcgcgaagcccctactatatggagcagacgagaggagactgggacttggacttccccccaccgccgcccgcacatcttgcaattagcgtgtaatttggtgtctcagcgcagcaggaactgctgttttggggggcgtttggagtagtagaacaacacttctatgggtcctaaaggtcaaaagcactggagagcaagtgcgaacttagtaattcgtatttttagtcgacttgacgaatgatcacttggagacgctcgatctaaccatttttctcctatttttttcacacttttccgttgtttctgctttttttcttattttcgttagcaattcactttttgtccagcgaaaatttcgttttcattttctcctcagcacaccagcacacacacacacgcaaatttgaacaggggctgttttattcctgcggctgccattttttgtacatacctagaaatcaggcgattcctcgacagctgtttttcgagttcttggagtggagcgggcggagggctgcgcggaggattcgaattcagtttcgtggggggtgttcctttacagttggtcctgactgaatggggaaaccgttataatccagaaactgaaactgctttcgactcgaagttctccgttgactgccgttattagcttagttagtagctattagtttttgaaaattactctgccacacacagttatgttctttgggattcaaacgtagcgtaccggcttgtaaaaccacgacaacgacggaatgctgcgacgaacggaaatgcgagaatcaggtgagcgccggcctttttatatgacgcccgccgcctccaagaagagcttttggagagcttctcgctgcgctgctctctcgcgctgttaaaagttaaccgtagcacgatgcccttcccctacagagggtacttcgaattcggtccgccgcttgggctgacatcctcgaccttacctcgtagacctgattgataagccgctgtttaccggcgatctactcacggatctacgatttcatttgatcattcacaatctacctgaaatccattacttgtacttttcgcttattaagcttaaaagtgattggttattgatcaattagattgaatggtttttaatatttatagcacctattaaaacatatgtgggttcaatgaaaatatgtataaatattattgctagtgtcaaaaaggaaaattcttatttaattaaccgaattgaattagttattatttcaaaaaggtcctagtttaagcagactgcgtaaaattttttcagcagcagggtgtttttaattcggatttccaaagccactgttattggtgtaaacttctgttattgttgctggactctgtgcggcgcttaaattcgcattaacagcgataagtggtcagctgttgtgtgcgtgacggagatgtagaaattttgatttgcccgccatagtcggaccactttttcgtcgattattaatcgtctggcgagatcactagcgcgatagagtgggcggcattatcaattatggaaaggtacgccgaagtcgggtcaataaagccagccagcacgggtcagaatgttcggatcgtagtgattcatcgtggaaatcatgcgagtaccacgcgagtaaaactggaaacacgagcgaacttctccgatcgtttataagccaattactttgtgagaaatgcctcgcgatagtatacatttggaaaattatcttgtattagacaatgttctgattagtgaagttcgaccgtact

SEQ ID NO: 6701 - DNA, 8605 bp, DROSOPHILA
cagcattccgtcgttgtcgtggttttacaagccggtacgctacgtttgaatcccaaagaacataactgtgtgtggcagagtaattttcaaaaactaatagctactaactaagctaataacggcagtcaacggagaacttcgagtcgaaagcagtttcagtttctggattataacggtttccccattcagtcaggaccaactgtaaaggaacaccccccacgaaactgaattcgaatcctccgcgcagccctccgcccgctccactccaagaactcgaaaaacagctgtcgaggaatcgcctgatttctagcccctacaactaaacctgttgcaagccgtggaccagccgcatcctgttgctttcaagcccaacaattgcagcacccatcagccccaacattcacccagcacccagaacaacggaaagagcgctcgcgccaatcgtcgtcgacgccgcagacgcaacaagcagcagcagaattcgcagcaacctgacgccttccgtgataccgacgcgcagctaacaccgagcacctcctcgtccaccccgcactctgcacccaacgatagacaggaccacctaaactcccaattcaatcccgaatccatcaatatgcccgcccgattcgccgaggaagtcatcaccgctgagcccgcacaacgtgccgccccccaattggacctgggtggtggtcactatgtgccccgtcagcagcacctcaacgatgagatcgccatcaccggtttctccggccgtctgccggagagctccaccatcgaggagttcaagcagaatcttttcgacggcgtcgacatggtcaacgatgatccccgccgttgggagcgtggtctgtatggacttcccgacaggattggcaagctcaaggatagcgatctggagaactttgaccaacagttcttcggtgtgcaccaaaagcaggctgagtgcatggacccactgctgcgcatgctgctcgagctcacccatgaagctattattgacgctggcctaaacccaagtgatctgcgcggttcccgcactggtgtgtacatcggtgtgtccaactcggagactgagcagcactggtgcagcgatgctgaccgggttaacggctacggcttgacaggatgtgcccgtgccatgtttgccaaccgcatctccttcacctttgatttcaagggacccagctacagcattgacaccgcttgctccagttctctgtacgccttggaacaggctttctccgatatgcgcgaaggaaaggtcgacaacgccctggtcgctggagctggactgatcctcaagcccaccatgtcgctgcagttcaagcgactgaatatgttgagcccggacggcagctgcaaggccttcgatgagtctggcaatggatacgtccgttccgatggatgtgtggtgctgctcctgcagcgcacctctgcagccaggcgtgtgtatgcctccatcctcaatgtgcgcaccaatacggatggtttcaaggagcagggcatcacataccctattggcaagatgcaaaatcgcctgatccgcgagacctacgaggagattggtcttaaccccgccgatgtggtttacgtggaggcacacggtaccggaaccaaggtgggcgatccccaggaggtgaactctatcactgacttcttctgcaaggaccgtacgacccctctgttgatcggatcggtcaagtccaacatgggtcactcggaacccgcttccggtgtctgctctgtggccaagattctgatcgccatggaggagggcgtcattcccggtaacttgcactacaacaagccgaacccagatctttatggactcgttgatggacgtctcaaggtggtcgacaggaatctgccttggaacggtggcatcatcggcctgaactcctttggttttggaggagccaacgctcacgttatcttaaagtcgaaccccaagcccaaggctttgacccccaaggatggagcactgaaagtggtcctcgcctctggacgcacctttgaggctgtggagcagttgctcgagtccgcctctactaatgccgatgatgatgagtacctgcaactgatcaacgagatccactcaaaggctattccgaatcacttcttccgtggctacggagtggtgagcagcaagggcacccaccaacgtgaggtgatcgagtccaacgacgataaacgccctatttggtacatctactccggcatgggcagccagtgggctagcatggccaaggatctgatgaagatcgaggccttcgccaagaccattcagaggtgtgccgatgtcctaaagcccgagggagtggatctaatcgatgtcctgacccgttccacggacaagagcttcgaaaacattctgaactctttcatctcgattgctgccatgcaagtggctcttaccgatttgctcagctcgctgggcatccaccccgacggaattgtgggacactcggtgggagagcttggatgcgcctacgccgatggctgcttcaccccggagcagaccgtgctggctgcttactggcgaggaaagagcattctggacactcaactggccaagggcaagatggccgctgtgggattgagctgggaagatgcgcacagccgtgtgcccagcgattgcttcccggtgtgccacaacagcgaggacaactgcaccatctctggcccggaggcttccatcgaggctctggtcgctaaactgaacgcggagggagtgttcgccaaggcagtgaactcatccggctacgctttccacagcaagtacatcgctgaagctggacccaaactacgcaagagtctggagaagatcattcccaacgctaagaaccgtaccgcccgctggatcagtaccagcatcccagaatccgcttggaacacaccggtggccaagcaatcctcggccgcctaccacgtgaacaatctgctgtcgccagtgctcttccacgaggcccttcagcacgttcccaagaacgccatttccgtggagattgctccccacggcctgctccaggctatcctcaagcgcgccctgggtcctgatgccaccaatctgagcttggtgaagcgcggacacgagaacaacgttgagttcttcctcaccaatgtgggcaaactctttgccgccggagcccagcctcaggtacttactctagtgcgtcctatcagctacccggtgggtcgtggaacccccatgttgaactccaaggtcggatgggaccacacccagaagtggctggtggccaagttcggcaaggaaacttcttctggtgagaccatcgtggaagtcgatctctccaaggaggatgatgctttcctggctggacacacgatcgacggacgtatcctcttcccggccactggctacatgactctggcttggcagacattcgctaagatgcagggaagtgagttccacaagaccccggtggtaatggagaacctcgtgttccaccgtgccactattcttaacaagaacgcagtggtcaagtttggcattaacttcttcgatggaactggcgcttttgagatttgtgagagcggtagcttggcggtttctggaaaaataaccattccagagtctattgacaacgaggagttgcccctggaggagcaaactcccagcgctgttgccaaggagctaggcaccaacgatgtctacaaggagctgcgcctccgaggctacgactatggtggaattttccgcggcattgttcgttctgacaccgtggcctccactggaaagcttcagtgggtggacaactggattagtttcatggacaccatgttgcagttcagtatccttagcaagaaccttcgtgagctgtacctgcccactcgcatcgagcgagcggtgattaatcccgccaagcactttgaattgctgagcgccctcaccaaggaggaacaggttgagactggactacctgtgcagtggtacagcgacattaacgtgatcaagagtgcgggcgtggagctgcgcggtctaaaggccaatctcgcccagcgtcgtcctggcacacaggcacctcccactctggagcgctaccagtttgtgcccaacatcaacaccacggatctaaatgaaaactctgagaaggctcgcctgcacgccttggatgtggccatccaggtgatcatcgagaactccagcggagccgtcaagctaaagggcgtggaattggccaatggacgcaaccccgacgttttggttgccaaccgcctgctgcagattatcgagggtgagcccgtgcttactggtgatgtggctgtggtcacctcgaacaacaatgaagagaccataaccgccgccctaggagattcaggagttcgagtggtgtccaaggacgtgctgaaggaaccggtagagcagaactgtcacttcgtctttggcatcgatgtcctttcccgaccggacaccaagaccctggagaactccattgccagcattcgcgagaacggtttcctgatccttgaggagacgctgcccacttacaccaagacaggccgtgccctgctgaccaaatttggattcgttgccgttcaggaacagagtctgggagccacccgtgtcctggtcctcgcccgcaaggctgttgatctgaaaactcgcaagtccgttgtggttgtggccaccgagcagaactttaactgggtggatgacttgaaggccgctctggctactgctgctacggaggagcagtatgtgtacgtggtttgccagggagaggagctgtttggagctgtgggtctgatgacgtgcatcaagaacgagaatggcggcaaactggctcgcctggtcttcgtgcaagatgccaaggctgagaagttctcccttacatcgaccctgtaccgccagcagctggagaaggacctcatctcgaacgtgctgaagaacggcgcttggggcactttccgtcacctgaaactggagacccagcaggccactctccaagtggagcatgcctatgtaaacgctctggtcaagggtgatcttgcttccctcaagtggatcgaggctgcccaggcggataccgctgcaactgtcgacaagaacctggaaacttgcaccgtctactatgcgcccatcaacttccgtgacgttatgttgacctctggtaagctggccgcggatgccttgcctggagatctggctgagcaagattgtgtgctgggtctggagttcgctggtcgcgatacccagggtcgtcgtgtaatggccatggtgccggctaaatcacttgctaccacctgcgtggcaagcaagcgcatgatgtggcaaatccctgagaagtggaccatggaagaggcttcgaccgttccttgcgtgtactccaccgtctactacgctctggttgtgcgaggacaaatgaagaagggtgagaagatcctcattcacgctggctccggaggagttggtcaggcggccatctctgtggctctggcccatggcttgaccgtgttcaccacggtgggcagcaaggaaaagcgcgagttcctgctgaagcgattccccaaactgcaggagcgtaacatcggcaactcccgagacacctccttcgagcagttggtcctgcgcgagaccaagggacgcggagtcgatctggtgctgaactcgttatctgaagagaaactgcaggcctcgatccgctgtttgggtctgaatggacgcttcctggagattggcaagttcgatttgagcaacaacagcccacttggaatgtccgttttcctcaagaacacctccttccacggcattttgcttgacagtgtgatggagggcgaggaggagatgcaaaaccaggttgtctccctggtcgctgagggcatcaagaccggagccgttgtaccccttccgacctcggtgtttaacgaccagcaggtggagcaggccttccgtttcatggcctctggcaagcacatcggcaaggtagtgatcaaggtgcgtgatgaggaggcaggcaagaaggcgctgcagcccaagccgcgcctgatcaacgccattccacgcacatacatgcacccggagaagagttacatcctggttggaggtcttggcggattcggtttggagctgaccaactggttggtgacgcgtggagcccgctacattgtgctgacctctcgttccggagttaagaccggctaccagggtctgatgatccgtcgctggcaggaacgtggcgtaaaggtggtgattgacaccagtgatgtgaccaccgccgctggagctaaaaagctgctggagaatagtaacaagctggctttggtcggaggcatcttcaacctggcggctgttctccgcgatgctctgatcgaggatcagaccgccaaggacttcaagacagtggctgatcccaaggtgacggccaccaagtacctggatcagttctctcgcgatatctgcactgagctggactacttcatctgcttctccagtgtttcctgcggtcgtggtaacattggtcagaccaactacggattggccaactctgcaatggagcgaatttgcgagcagcgccaggtgagcggattcccaggcaccgccatccaatggggagccatcggagacaccggtctggtgctggagaacttgggtgacaatgacaccgtgattggaggaaccctgccccagaggatgccctcttgcctgcagaccatcgacctgttcctgcaacagccccatccggttgttgcctccatggttgtggccgagaagcgcaagtcggatcagtcggctggagtcagcctaattgccaccattgccaacatccttggtctccgggacaccaagaatatccaggacggagcatcgcttgctgatctcggaatggactccctgatgagcgctgagatcaaacagactttggagcgaaactttgacattgttctgtccgcccaggagatccgtcagctcacctttggagccctcaaggccatggatggtggtgctgatgtcaagccagccgcagctgctcccgcagccgctgctggagtcccagaggcaaacattacctctggtggatcctcgcgcacagctagtcccatgggcgatggaacgcaggtggtgttcaccacgtccctcatccccaccgaggcaattgtacaactggacacaaaggcacctgcaaacagcaaacagagccccatcttcttcatttccccgatcgaggggttcgcctccgcactggagccgctggccaagcgattggaggtgcccgcctatggactgcagtacacggaagccgtgccctccgattctctggaatcagcagccaaattcttcatcaagcagctgcgcaccgtccagccaaagggtccctacaaactagccggatactccttcggttgcctgctcacctacgtgatggccggtattctggaagagaccaacgaggtggccaatgtgatcatgctggacggagccccaagctacgtcaactggtacacgagcagcttcaagcagcgttacactgacggcaccaacgccgataacgacaaccagagctacggcttggcctactttggaatcgtgttggccaacattgactacaaagcgctggtgcgtctgctaatagtgatccccacatgggaggagaaactcgagaggttcgctgagctgatgagcaatgagatcacccagcccgtggaaacgatcaagaaatccgccactctgttctacaagaaactggagctggccgatggctaccagcccactctgaagctcaagacgaatgtgaccttggtcaagcccacagacaactctgccaagctggacgaggactatcgccttaaggaggtctgcacaaagcccgtggaagtacacactgttgagggcaaccaccgcaccttcctcatcgaggatcagtccctgaagaccatccagagcatactgaagcgtctgttcaactaagctagaaagaggattagaataagagttgtgaatgtggcataggcccactacccacacgatcatcaccctctcaccgtcactcacccaatactcgggttctatgcaccatgtggaaccacggaacacatcgacacctagttagcatacttagtgaatgaatttacgttgttgagctgcaaggaatggctcgccccatcccagttacgcacagctagaagagataagttaacagattggatttgcgtcgatcggattgaatctgcctaactgctgtcttgcagggctgtaggcttcggtccaaaattaagtctacagtctctgcgattccgggcagttgaaatgatgcaagatgagaggctcagtccataacacttaacgctttgtgcaccgtacaatttagtacccgacattccttgagagctagacggcaccagacgtcccaacttaccaaatatatcttttatgctctatctataatgtatgtcgcatattctagttttattgcctagttgtaagcctacagtttgtagtcgcgcatgtaatgaatttcattcctcgaactaacccaagaaagagactacaacattcgttatctctcttgatgtataaaataatcgcccaaaaattatcactcatgaatattgtggatattaaaattacaccatactaaaaaat

SEQ ID NO: 6702 - protein, 2438 aa, DROSOPHILA
MPARFAEEVITAEPAQRAAPQLDLGGGHYVPRQQHLNDEIAITGFSGRLPESSTIEEFKQNLFDGVDMVNDDPRRWERGLYGLPDRIGKLKDSDLENFDQQFFGVHQKQAECMDPLLRMLLELTHEAIIDAGLNPSDLRGSRTGVYIGVSNSETEQHWCSDADRVNGYGLTGCARAMFANRISFTFDFKGPSYSIDTACSSSLYALEQAFSDMREGKVDNALVAGAGLILKPTMSLQFKRLNMLSPDGSCKAFDESGNGYVRSDGCVVLLLQRTSAARRVYASILNVRTNTDGFKEQGITYPIGKMQNRLIRETYEEIGLNPADVVYVEAHGTGTKVGDPQEVNSITDFFCKDRTTPLLIGSVKSNMGHSEPASGVCSVAKILIAMEEGVIPGNLHYNKPNPDLYGLVDGRLKVVDRNLPWNGGIIGLNSFGFGGANAHVILKSNPKPKALTPKDGALKVVLASGRTFEAVEQLLESASTNADDDEYLQLINEIHSKAIPNHFFRGYGVVSSKGTHQREVIESNDDKRPIWYIYSGMGSQWASMAKDLMKIEAFAKTIQRCADVLKPEGVDLIDVLTRSTDKSFENILNSFISIAAMQVALTDLLSSLGIHPDGIVGHSVGELGCAYADGCFTPEQTVLAAYWRGKSILDTQLAKGKMAAVGLSWEDAHSRVPSDCFPVCHNSEDNCTISGPEASIEALVAKLNAEGVFAKAVNSSGYAFHSKYIAEAGPKLRKSLEKIIPNAKNRTARWISTSIPESAWNTPVAKQSSAAYHVNNLLSPVLFHEALQHVPKNAISVEIAPHGLLQAILKRALGPDATNLSLVKRGHENNVEFFLTNVGKLFAAGAQPQVLTLVRPISYPVGRGTPMLNSKVGWDHTQKWLVAKFGKETSSGETIVEVDLSKEDDAFLAGHTIDGRILFPATGYMTLAWQTFAKMQGSEFHKTPVVMENLVFHRATILNKNAVVKFGINFFDGTGAFEICESGSLAVSGKITIPESIDNEELPLEEQTPSAVAKELGTNDVYKELRLRGYDYGGIFRGIVRSDTVASTGKLQWVDNWISFMDTMLQFSILSKNLRELYLPTRIERAVINPAKHFELLSALTKEEQVETGLPVQWYSDINVIKSAGVELRGLKANLAQRRPGTQAPPTLERYQFVPNINTTDLNENSEKARLHALDVAIQVIIENSSGAVKLKGVELANGRNPDVLVANRLLQIIEGEPVLTGDVAVVTSNNNEETITAALGDSGVRVVSKDVLKEPVEQNCHFVFGIDVLSRPDTKTLENSIASIRENGFLILEETLPTYTKTGRALLTKFGFVAVQEQSLGATRVLVLARKAVDLKTRKSVVVVATEQNFNWVDDLKAALATAATEEQYVYVVCQGEELFGAVGLMTCIKNENGGKLARLVFVQDAKAEKFSLTSTLYRQQLEKDLISNVLKNGAWGTFRHLKLETQQATLQVEHAYVNALVKGDLASLKWIEAAQADTAATVDKNLETCTVYYAPINFRDVMLTSGKLAADALPGDLAEQDCVLGLEFAGRDTQGRRVMAMVPAKSLATTCVASKRMMWQIPEKWTMEEASTVPCVYSTVYYALVVRGQMKKGEKILIHAGSGGVGQAAISVALAHGLTVFTTVGSKEKREFLLKRFPKLQERNIGNSRDTSFEQLVLRETKGRGVDLVLNSLSEEKLQASIRCLGLNGRFLEIGKFDLSNNSPLGMSVFLKNTSFHGILLDSVMEGEEEMQNQVVSLVAEGIKTGAVVPLPTSVFNDQQVEQAFRFMASGKHIGKVVIKVRDEEAGKKALQPKPRLINAIPRTYMHPEKSYILVGGLGGFGLELTNWLVTRGARYIVLTSRSGVKTGYQGLMIRRWQERGVKVVIDTSDVTTAAGAKKLLENSNKLALVGGIFNLAAVLRDALIEDQTAKDFKTVADPKVTATKYLDQFSRDICTELDYFICFSSVSCGRGNIGQTNYGLANSAMERICEQRQVSGFPGTAIQWGAIGDTGLVLENLGDNDTVIGGTLPQRMPSCLQTIDLFLQQPHPVVASMVVAEKRKSDQSAGVSLIATIANILGLRDTKNIQDGASLADLGMDSLMSAEIKQTLERNFDIVLSAQEIRQLTFGALKAMDGGADVKPAAAAPAAAAGVPEANITSGGSSRTASPMGDGTQVVFTTSLIPTEAIVQLDTKAPANSKQSPIFFISPIEGFASALEPLAKRLEVPAYGLQYTEAVPSDSLESAAKFFIKQLRTVQPKGPYKLAGYSFGCLLTYVMAGILEETNEVANVIMLDGAPSYVNWYTSSFKQRYTDGTNADNDNQSYGLAYFGIVLANIDYKALVRLLIVIPTWEEKLERFAELMSNEITQPVETIKKSATLFYKKLELADGYQPTLKLKTNVTLVKPTDNSAKLDEDYRLKEVCTKPVEVHTVEGNHRTFLIEDQSLKTIQSILKRLFN

SEQ ID NO: 6703 - DNA, 2837 bp, DROSOPHILA
cacgcaggcaaggggaaaatctagctgcgtattgtgtgtggaaattgaaaagcgagctggaaatctgccaggaagtgcaggacatcttacacaccctatttgatatataaattatggctgattagcagcggctgttggcattgttttaattggtttacctggtgattaatctcaaatggcgaaaggaactttgaaagtgatttatttttaaggcaggttacagtatcctgtacaatttcatagacttgggtacattttttagttgactataaactattcgttgcaagttcatcaactggttaccgtttatgtgtaaatctgatctgatctgaaagtccttgggattcatagggcgatgtgcggaacactaggtgtcacttgttagactgctaatcctcgacagtgtgcgctcaacgggatatcaggcggaaaaggacaaagagcgctgcatacgcacaggctgaaaatgcaaattttccctttggctggctggcagtttaaaatgttgatgaagtaattagtttaatatgcgaaatgcccctgatgggcggcgggagagggcgtggcacatagggaagtgtaattgaaaatactcacagttctgggctaaaagggacaagggcacagtcggggcttgggcattgtgaaactttttccatttattaaatttgccacacgaacagcgcagcggattctgccaagggaactctatgtgggaaatgtttaattatttgtgcgcacatgaaattaaagctgttacaaattgttacaaaccattccggctatcagtttctcaaacaaatttcaattaagataagactttttcacgagtttcgaaaattagaaggaatattttttgtgctcagctactttcattcgaaattgaatatgagaacaactctgcttcttcaggcccagcaaaagttttgccttttgagccaaagttggcagtttgttgtcagtaatgtattttgctcgaacttattcaaaatattatacattttgatttacacgaaatcacagttttcttgccattcagcagcttttcagttttagttttttgagtttcgcgcggaatgaatctgattaactttaatcattaccaggactatgtagacagcttcataaccatccaggacactcgctatttgggcaacaaagagatccagaggaacctgatccagaatgcctgcggtaagaattgcctgggtaatctgctcacccgcgagcaattctaccagcggaaggagaaagagttggtgcttctaaagccaaggggactacgaggactccaactttttggagactacttgaacaacaaagatgaggtgctccaacagtttgccaatcgagagaagaagctgctcgaaaagcaaatttcggttagaaggttacatttatgtgtagtgaaatgtgtacattttgtaatttttagaccgtcgtctacctggtgatgcgttcgaagaagggtctagagatctccagctttctggacctggagcagagtctgcgcgagtcgcgattcgagaactctacaagctgcgtagactggcgggccattttcgagggcagaacgaagctgaggccatcgaatctgcatctcagctacttcgactggcaccagaatcgtgtgtccttcaacaacagcgacaatttccgggtgttgaacaagaggccccacagtctgctgctaaagcatgttggcgatcacaaaatattctgtgtgaacgcctcctgcgattgcgagcactcgaaaaatgtcagccgcaaaacgtatttctcgcccatttatggatatgtcatattcttcgaccacataatcaggcgcattaattagcgacggctttaaagtgtcaatgaacgtaatcgtcgttaaatgaaatgtgcaaataaatcgaaacgagggcgcatttgtcgctgacagctaacgtaaattgcttttcatatcttatcagtacagttctggtcgcagtttttgatggacgtttcgaggtccttccgcccggcgagtcctccgtccatcaggcggcggaaattacccgagctttatgccactttgttgagtttatcgcagtcagggaacatcaattgcataaatctattaactgtcgcccggcggaatgggggcgtggttgagccttcaacttgaccaatatgtttctgtttgcgcatttgccattgtttgccaacttgcttgtgtgggtcagcttatgacgctttgttaattctcccaacagtgtgtctgtttaattggcctttccactcatgcaaatcaacttggccaaaatttacacaaggctgaaaggagaatttgctacggcttacacattggtggttaatgagttgaaaatattagtagtcagtcttaataaaaattatatgaatacaattaaatccactctgttgcccagataccatgtttttggagaagcaaattcaaataaatattaaatacgcctaaattatgatttaagtgccacatgcagaggcagtgcaatttaatttgcatatacaattagctgctaatttacaacttttagtctccactgggccatggctaagttcgcccagaaacaattcaattaaaataaacattaagtgctgcagcctcagctgcatttgcccagccagtgttcaggtgcaaatggaggtcctgggtagcaaggataagtaatattcctcccactggcggacacaaaagtccaaataaatatttgctcggcttcccttagtcaagtccacagagccgtgagctggtctatgtgtctttgttctccattaagatatggcaaatttgttgccccccaaaaaaacaaacaggaggatagaaattcaga

SEQ ID NO: 6704 - DNA, 784 bp, DROSOPHILA
ttttgatttacacgaaatcacagttttcttgccattcagcagcttttcagttttagttttttgagtttcgcgcggaatgaatctgattaactttaatcattaccaggactatgtagacagcttcataaccatccaggacactcgctatttgggcaacaaagagatccagaggaacctgatccagaatgcctgcggtaagaattgcctgggtaatctgctcacccgcgagcaattctaccagcggaaggagaaagagttggtgcttctaaagccaaggggactacgaggactccaactttttggagactacttgaacaacaaagatgaggtgctccaacagtttgccaatcgagagaagaagctgctcgaaaagcaaatttcgaccgtcgtctacctggtgatgcgttcgaagaagggtctagagatctccagctttctggacctggagcagagtctgcgcgagtcgcgattcgagaactctacaagctgcgtagactggcgggccattttcgagggcagaacgaagctgaggccatcgaatctgcatctcagctacttcgactggcaccagaatcgtgtgtccttcaacaacagcgacaatttccgggtgttgaacaagaggccccacagtctgctgctaaagcatgttggcgatcacaaaatattctgtgtgaacgcctcctgcgattgcgagcactcgaaaaatgtcagccgcaaaacgtatttctcgcccatttatggatatgtcatattcttcgaccacataatcaggcgcattaattag

SEQ ID NO: 6705 - protein, 235 aa, DROSOPHILA
MNLINFNHYQDYVDSFITIQDTRYLGNKEIQRNLIQNACGKNCLGNLLTREQFYQRKEKELVLLKPRGLRGLQLFGDYLNNKDEVLQQFANREKKLLEKQISTVVYLVMRSKKGLEISSFLDLEQSLRESRFENSTSCVDWRAIFEGRTKLRPSNLHLSYFDWHQNRVSFNNSDNFRVLNKRPHSLLLKHVGDHKIFCVNASCDCEHSKNVSRKTYFSPIYGYVIFFDHIIRRIN

SEQ ID NO: 6706 - DNA, 5645 bp, DROSOPHILA
aatagatatacgattcatttgttacactcatgagttaaagtaatctttagttatttattcagatgattccatacttatgtcactgaccatgctaatgctaattgatttcctagagcgaatttatttacaatgggaattcgagtacccgtttcgatttggcttagtaaccagtaaaaggagcgaagagcgtctaggcctaatgatatatctatgtaaatctcaatctatttctgagcttagtatggaaaaagtgtaagtgttgggtaacaagttgtaggggttctggaaaaagttctctcggataatctattaaagctttccgatccgatccgtcgtgcatagcttaaccaattacgatcgttttgcttatattttgatctgaatttccttcatacctatgtacagacaattttctttggcagtgccatttttggctttattttactcttggtgtagcgttatgatcataagagacattaattgcacatcttggggattaggattatctggcgccctgtcctcccctctctatctctctctctctctctgtgtggatctctaaagcgagaagtacttggcacaggactgagatcccgttgcgctctcgattggtcttcctctttgagccttcctctcccgatccttgcgatcctcctgctgctgtatagctgctgctgctcctggttatgtttatgtttttttggtttttcgttagtaaggcaatttggaatgcatgcatcacacacatacacacaaatacaaagcacagttagtgggtgagagagagagagagagggagaaacacaaatacgagacagatagagagcgggagatttgggaagcgagagttagatgcgatatgatgcggtgtaatgatccaaatcgcccgatctccggatgcagtcagttgtcagttggatgatcaatgatgatcgtggagtcatgaggaacatgatatgtacaccataccgatcgcctgatggggcagcacgctcccgtgttatatgatactctctctgttccgttccagctcctccgtctcattctcgggatcgacgctggacgtcgacgaaactccgcagatttgcatctcgatctcggctagtcgattctccagatcccactgctgctgcgagagttttgtgtttagggcctggttctctgattccaccgtgtgcaggcgttccctcagccgcttgatctcgtcctcgagaacttcgtgggagcccaagaggggcgtggttccaccaccagctccacccacacccgctccatagcactccagctgcgaactggagtcgcaaatgtgacctaaaaagagggattatgtgggacatacagtatcctgccatgggattccaaatttgtatgtatgcttacccgtgtggctgggttgggattgtggccttattgagtggtgcgaagtcgttcgactacgtggtcgttcctcggatccatgggcactggggctaaccgacctgggtgagtccgtggcccgagccaaacgatcggcatagctgcggggactacaaaaatgttggtgtaaggttggatagcttagagatgattgatatgcggccaaaacaattgtgcaaggcacctttttttgcccgctttcacaataggacattaagctcacctgtacccatgtgtttgggaggaggtttgtgtggactcctgtcgatggggctgctgctgggatgcctgatgctgctgctggagcgcctggtggtggtgcatcagcgatgatgcgccagccgtcgccggtggcagccacatctcctccagagacgtgcggccacagctctcgactaagcccggcgtcgattggcagcggcccatggcaactacattaaagtatttgactgtgttttaaatcaaaatcgttcacaaacggaaacggacgcaaatgaaatcgataacgaaaaggaaggaaagacggaacggaaggcgaaaacaatcgaatcgtgttattctggggcaatcgtattcgtattcgtatgggtatctttgaatttcgagtggtatttgtttgggcggggattctggtggctttgctggatgttgtgtggctggttgggtggttgaattgggaggctcggctgggctgggttgtggttctggcgaaccggatagcggagtggggtggcagcaaataagacaagtgccttacctttctccagcggggccttcttgtatttctccaatcgcttgacggctatcgactccagacgaacacgcgccgccggatactccttcagcacgtcccacatgtccttcttgctcaggacgaagaggtcgctgtatcccactgagcgaacgctggctgtgcgtcggttgcctgtttttgtttcgcatcgggaaagttggcaaagcaaatgtttgccaacgcaaagagaaaagtttaatggtcttgcaaaaaagcatttcccggagatgctttgcgtgtgtatttgtgtgtgctcgagtcattgtgtctgtcgattcttcttgttggcttgggcgtacaatgacattaaaattgcatgccacacaatatggatgttcaaaaaaaataaaaaacaggaggtaaatattgaataggattaacggaagacggattttgattaaaatcttaatactcgcttatcgaaattcggtatgtgcacttttggcgacaagaagaatcgtttgtgtgagtggcttgtgtacacgggtcgtatacttaattgaaattacacacaattcgcaatgcaattacgtgtagggaaacgtttaaattacgtccaggcaaagcaatacaacaacaacaccgagttagaagacaaatatatagagatagagagagacagagtgattaaaatagagacaaagacaaagatggagcgactaactagcgtaaggaatggcttttcggtgctaaaatcctgtaggcaattctcaccgttgagcgcccacgaatggaactaaaccggaataatgcttaaatcatgcagaaacacaaggaactttaaacaattcgattttaccgtctctaattgcttggggaaaggaggtgccaaatgggggatgctgggtcgtggggtggtgcaaaactttggggccacctccttaacttttgtctgcaaattgagttgctctcgccactcttgctctttcgcaaactcaattaggtggcacatggctccgatgatgcgccttcgagtatgcaacgaatagatatcgcacatgcacatttggatggaatacaatcctgttaattataatgaacagagctgctgtctgctagctgctccattttccccatgaatcgacttcacacttggctggccaactattacacgctttaaaagcagcgcaaagttcagtaaattgtgttttttccgaggcgcgaccacaattattgcattcgttttcatttgccctgaataaaaatgtcgagaacaatgaaatcgagagacccgtgtgagtgcatgcaggtgcaataattgcatttgacattcattaatttttcagccctgtcgaggggtgagcaataaaaatacgttgcatactctaagggctggccaaataaacaaacaacaacaacaaaaaaaaacaatataaacttgcaaaaaatgttggaaaaatgaacaaaatggtgctccccatatggtacttgtttttatgatatgaaacgtaaattctatcgaaattgattcttgtgctcgactagttggttacatatgtatgtgctgggggattcggggggcgggaccaatctctaaactatacgttttgcacgctgggatcgggggaatccggttaacacttggttgcacaattatagacaattacattccacacatagacacggttacgcagtatgctttttatggtgtgtgagtgtgtctgttgattaatgggtttcacttcggtttttattttatttcatttatttttctgggcgtttgggttgggaaggttgttgtagtagttacgttatcgttattgttccgcctgtcgcactaaaacgggatatttaccaagttctttacctgcggtgcccatattgagtatactaatctcgccaaaataggaaccagccttcagggaggccatcaccgtctttccattgtcggccaccacctgcaatcgtcctcggttcacaatgtacatctccttgcccacctcgcctaaatcggaaacggtatcaaaatcagtatcagaatcggatggaaacaaaaagcattgaggagcatgtggcgatatcaaaggtgtattggccaggaccataggtactcaccctttctgcagatgtagtcgccgggcgagaagagcacgggcctcaggcgcagcaccagttcgcataggaagccggcctctgtgttttggaaaatctccacccgcttgagcgtatctaaatggacgttaattgctatttcagcctgaaatagccgggggaacaaaggaaagatttcgtctttagtaatggacaaatcgtgttccggagcctaagacgcccccgtgtacttacctttaatttatcaggaagacaggacacggcgcgctcctcgtccgagcatttttgcgtaagccacaggtaatcgaaccatttgatgaccttcacctgcagatgattcggcacacgtcgcatccgcatgtacgtcttcacgccatccagcttggctgagatacagaaaaccaggcccaaaatacgaaggaacacaaatggaatgggagaaacaagaaaaggaaaatgttatatttgtatttgctgaggatttcctgggaattgatacgcgacaggaatacaaagttcctggaaattagggtgttgtacaatggtatttagaatcgccgatggtcagcaaatgttgtgagtattgtacaggtaaataaggtacctctcttgtagcttccaccttgtcaagagacataattatttcatctttatttttagaaaattctataaaatttctgcgtgcgtaaagctttatttcgaatgccatctatctatctccacgagactttctaacttaatattttatcttcaccacataccaataaaattcataccatggtacatgggctttactctctaatcgttcaatcaagacggtctgcataaatttgtactataaggcttttggctgtccagcagacttaagctcttctggcccacctggcgtatgcttgatattgattactgcatcttaggaactgtcttccaagtgaacccatcttgtgtttagccggcaattaacaatccgttctggtcgagaagcacgcacaaaggaactaaccagtggatagtaatcgctgtgttggtgagctagtgggtcgttgctgcagttgcagctcaacaatgagcgatgttcgctcgattggctatatctgaggggatatcggacagggcaaattccatgtgaccactctgctggcattggcagggacatgggacatggcacatggcacatgggacgaaggaacaggacactgtttgagcaatattgatgacaactggcttttgtttttagtttcccacagcaccactccacggcgagtcatccccagtcgataagaggaaattaaatctcttggctcgtcagtggtaacaaatattgacacaatttgtcggcgcttgccaaaggggaatgaaattggcgagtgggcgggccaaatag

SEQ ID NO: 6707 - DNA, 1281 bp, DROSOPHILA
aagctggatggcgtgaagacgtacatgcggatgcgacgtgtgccgaatcatctgcaggtgaaggtcatcaaatggttcgattacctgtggcttacgcaaaaatgctcggacgaggagcgcgccgtgtcctgtcttcctgataaattaaaggctgaaatagcaattaacgtccatttagatacgctcaagcgggtggagattttccaaaacacagaggccggcttcctatgcgaactggtgctgcgcctgaggcccgtgctcttctcgcccggcgactacatctgcagaaagggcgaggtgggcaaggagatgtacattgtgaaccgaggacgattgcaggtggtggccgacaatggaaagacggtgatggcctccctgaaggctggttcctattttggcgagattagtatactcaatatgggcaccgcaggcaaccgacgcacagccagcgttcgctcagtgggatacagcgacctcttcgtcctgagcaagaaggacatgtgggacgtgctgaaggagtatccggcggcgcgtgttcgtctggagtcgatagccgtcaagcgattggagaaatacaagaaggccccgctggagaaagtcaaatactttaatgtagttgccatgggccgctgccaatcgacgccgggcttagtcgagagctgtggccgcacgtctctggaggagatgtggctgccaccggcgacggctggcgcatcatcgctgatgcaccaccaccaggcgctccagcagcagcatcaggcatcccagcagcagccccatcgacaggagtccacacaaacctcctcccaaacacatgggtacagtccccgcagctatgccgatcgtttggctcgggccacggactcacccaggtcggttagccccagtgcccatggatccgaggaacgaccacgtagtcgaacgacttcgcaccactcaataaggccacaatcccaacccagccacacgggtcacatttgcgactccagttcgcagctggagtgctatggagcgggtgtgggtggagctggtggtggaaccacgcccctcttgggctcccacgaagttctcgaggacgagatcaagcggctgagggaacgcctgcacacggtggaatcagagaaccaggccctaaacacaaaactctcgcagcagcagtgggatctggagaatcgactagccgagatcgagatgcaaatctgcggagtttcgtcgacgtccagcgtcgatcccgagaatgagacggaggagctggaacggaacagagagagtatcatataa

SEQ ID NO: 6708 - protein, 418 aa, DROSOPHILA
MRMRRVPNHLQVKVIKWFDYLWLTQKCSDEERAVSCLPDKLKAEIAINVHLDTLKRVEIFQNTEAGFLCELVLRLRPVLFSPGDYICRKGEVGKEMYIVNRGRLQVVADNGKTVMASLKAGSYFGEISILNMGTAGNRRTASVRSVGYSDLFVLSKKDMWDVLKEYPAARVRLESIAVKRLEKYKKAPLEKVKYFNVVAMGRCQSTPGLVESCGRTSLEEMWLPPATAGASSLMHHHQALQQQHQASQQQPHRQESTQTSSQTHGYSPRSYADRLARATDSPRSVSPSAHGSEERPRSRTTSHHSIRPQSQPSHTGHICDSSSQLECYGAGVGGAGGGTTPLLGSHEVLEDEIKRLRERLHTVESENQALNTKLSQQQWDLENRLAEIEMQICGVSSTSSVDPENETEELERNRESII

SEQ ID NO: 6709 - DNA, 3935 bp, DROSOPHILA
catttgcaatgatatggctaattagtttattattttgcatttctagcacttaaatgaatgttttattattttttaaatcacatcacatctttcttaagagaagtttagatacatacgataattaatctaagcaattttcagttctttccccaaaatcttctgaaatgagcacctttatatgtcgataagtttttgcaatgtcatgggaaacacattccatccgggccattagatatattacttgacttaattcctgctggcgactcatagacctacccttattgttttccttgcagatttgccagcgctcacaaacggaaacggaagtgacgcccgaaaggaaaagggggaagaggaagtggtagcgcaggacaaacggctgaataatgcaaattaaaacacaataaaatgtaaaacacaaatgacaacggagaacacgagctgcaaaaggctaaaggagctaaaaacaaaaacaaaaaaaaaaaaatagcaaaaggcgaatcggttgacatgccaaaaaaaaatgcgagtggcggcaacttttccactgaattgatttgattttcagtcaggagtacagccggaatacggagcgtatgcgcgatacgtatacgcgatatttagggcgccgggggagcggcggaaatttgcataactttgctggcgtggcataaacatcaaaaaacaaattgcaagtaacaaagggaagcaatggtcataaaaacggcgccagcctcgtaaaaaatacgttacaaaaaaaaaaaaaagaataagttctcgcaaaacccccgctctttaagtgaaaattaatttatgcagcaaatcaaatacggatagggaagaaatataaaagtaatcgctggccgtaacaattaagacagccgtgggcagtgaggaaaagtcgggaaaagctgggtgaacgctggaaaaatcaagtgcagcagcagccgaaaaaggaaacacagagtcgaagaaaccggttagcaagggttgcttataaatgtaccaagacagcggctgcagcagcagtagcagtcgacgcggcagcagcagtgcagcagcagcaacatctacagcagcaactgcagcagaaactgcagcagcagcagcagcaacaacaaccagcagcagcgacgaggaaacactcgagactctgacgattataacgaccaccatcaccgatagcgatatccatgcgaccacaacaactacgacggttatagccagcggtacggcgacaacagcggcagcggcagcgacaacagcaacacttgccacacttgcaacactcgccagcaacagcgacatcgaggacagcagtccggtggagagcgaggatagcgaggagtgcgagtatatcgagatcgattgccagacgaccgcccaggaaggcacttcgccaagtggcggcagcagcagcagcggcaatgcggtcttgctgcaacgcagcagcaataacctccagcagcagcagcagcaacaacagcagcagcaacaacatttgcaactgcagctgcagcaggcggacgagcgattgttgcgcaaaatcggctatattgcatcgcgtgtgcgctgcctgtccaagtactacggtgacttccgcctggtgaatccgtacagtgcccgccggcagaggcgccaattgcaggagatcctgctgcggcactcgatcttcgatcctggcaaggagcaccagcgggcgattgtcttggccgcggcaacagcggcaattgccggtcctctggcggccatcgattgcgtctgcggcagcagtagcatcagtttagaggcagtcagcagcagaagtcgcagcagtgagctggaggacgatcatcacgagcaggatcaggtgcaggaggagcaggagcaggagcagcatcagggggataccgaggataacgaagaggagcaagagcatccgagtgaaaagccagagagaacagacattgaggaggagccaccgccggcgattgcagtgaccaccaccacaacggccaccgtgcgccggaagtcctcgagcagttccacaatcagtggcacggccaccgtttccggttccgtttcggtatcggcctccgcctctcaatccttttgctccaacaacatcaatctgctcgaggagctgctcattcagttctacgaggagcaggatcatcgcagcaacctaacggtgatccgacatcatcatcatcagcagcaccagcagcaccagcagcagcaaagaatcaccaacaataataacaacaataacaattgcaacagcatacagaacaacaacaacatgtcgaatcctgcggctacagcggcagcaacagcaacgccatcagtggaacaaccggcaacatcgggcaccaccaacatccacttgcaacccacctccctgcccgatggcagcgataatccgcgccgccgccgggccagcgattgctcagcggtgcaggccgctctccagaatcagctgcactgcatcacgctgaagaacaacaattgcggcaaggcgatgcccttccatcgcggcagttgcggcgccgccggtgagcatctgttggccgccaattcgatagctaatcgtgccaccattattttgagtaaatcatgcagcaatgtggatggtgatgccactgccacagcggcaacggcactaagttcaacggttggcggcggcatcggtggcattggtggcagtataaaaatgcgtgccagtgccacagatatcgagacgaatgcattgaacggtgcccgggatgccattgttgcatcgaataacggtaataacggcaataacggaaataacgggaacaacgagtacagcatcctgcagctgaacaacacgatcatccagtgccacttcaacgacgatgactttcgcgccctggtcaaggacctcaagcgcaaggtcgagtacacggagcgcatgaactggctatgtgagtagatcgattcgatatgtgggtataatatgtattttaaataaattatagttgtagctacaggtagctgaaaaatatctagcgatacagttgcaaacctttttaacagaaatattaaaaacttagcttagttacctttaaaattttactacaatattcagagagttcagacgtccacccatttgaccaatgtaattgatggtctgattcctcgctgacaagtggcgcaaatggtcaagtgcttcggcctgtgccagtgccctgcgctttcacccacctccacttccggtccgctttgcgctttttccactctcttcatcaccaccccccctttttttttttttttttgtgtcgtgtgtaatcgcctcaaatgaggcatgagcaaatgcaacaatgggttggaatcaaatggacaaatttaaatccaactacaatggaatggaaaaatgatttcaaaacactgcacaaatgccacgggtgcgatttaggggtggggcattggcttttttcatccggaaaagtgtgcgggtgaaaagcggccggctggctggcgatgtgaaatatttaattcaatggcagctatgcattcgccatttccacattttgcacattttccagcatagattcagatgcacagagaatcagagcagacaaatgcagtgtaaaacgtaaatgaatatcttatgactacaggtggattagtatttgattggtttttctgcactaaacataaaatatggatgggcattaaaaaagtgtacgactattcgactaaaatacgagagtgaaactgaaaacgtgctgtaattctttttccaaggacacagatcgtggcactttcgactaagtttcctgactttccgcagcgacttgattgcttcaacgcctgtggcctttaacggcaataagcactttacgcacagcgtgcatccttcaaaggacaatacaaaattgtaaactaaaaaaaaactgcgattgcgatatgcactgaaacacagaaattgg

SEQ ID NO: 6710 - DNA, 1935 bp, DROSOPHILA
atgtaccaagacagcggctgcagcagcagtagcagtcgacgcggcagcagcagtgcagcagcagcaacatctacagcagcaactgcagcagaaactgcagcagcagcagcagcaacaacaaccagcagcagcgacgaggaaacactcgagactctgacgattataacgaccaccatcaccgatagcgatatccatgcgaccacaacaactacgacggttatagccagcggtacggcgacaacagcggcagcggcagcgacaacagcaacacttgccacacttgcaacactcgccagcaacagcgacatcgaggacagcagtccggtggagagcgaggatagcgaggagtgcgagtatatcgagatcgattgccagacgaccgcccaggaaggcacttcgccaagtggcggcagcagcagcagcggcaatgcggtcttgctgcaacgcagcagcaataacctccagcagcagcagcagcaacaacagcagcagcaacaacatttgcaactgcagctgcagcaggcggacgagcgattgttgcgcaaaatcggctatattgcatcgcgtgtgcgctgcctgtccaagtactacggtgacttccgcctggtgaatccgtacagtgcccgccggcagaggcgccaattgcaggagatcctgctgcggcactcgatcttcgatcctggcaaggagcaccagcgggcgattgtcttggccgcggcaacagcggcaattgccggtcctctggcggccatcgattgcgtctgcggcagcagtagcatcagtttagaggcagtcagcagcagaagtcgcagcagtgagctggaggacgatcatcacgagcaggatcaggtgcaggaggagcaggagcaggagcagcatcagggggataccgaggataacgaagaggagcaagagcatccgagtgaaaagccagagagaacagacattgaggaggagccaccgccggcgattgcagtgaccaccaccacaacggccaccgtgcgccggaagtcctcgagcagttccacaatcagtggcacggccaccgtttccggttccgtttcggtatcggcctccgcctctcaatccttttgctccaacaacatcaatctgctcgaggagctgctcattcagttctacgaggagcaggatcatcgcagcaacctaacggtgatccgacatcatcatcatcagcagcaccagcagcaccagcagcagcaaagaatcaccaacaataataacaacaataacaattgcaacagcatacagaacaacaacaacatgtcgaatcctgcggctacagcggcagcaacagcaacgccatcagtggaacaaccggcaacatcgggcaccaccaacatccacttgcaacccacctccctgcccgatggcagcgataatccgcgccgccgccgggccagcgattgctcagcggtgcaggccgctctccagaatcagctgcactgcatcacgctgaagaacaacaattgcggcaaggcgatgcccttccatcgcggcagttgcggcgccgccggtgagcatctgttggccgccaattcgatagctaatcgtgccaccattattttgagtaaatcatgcagcaatgtggatggtgatgccactgccacagcggcaacggcactaagttcaacggttggcggcggcatcggtggcattggtggcagtataaaaatgcgtgccagtgccacagatatcgagacgaatgcattgaacggtgcccgggatgccattgttgcatcgaataacggtaataacggcaataacggaaataacgggaacaacgagtacagcatcctgcagctgaacaacacgatcatccagtgccacttcaacgacgatgactttcgcgccctggtcaaggacctcaagcgcaaggtcgagtacacggagcgcatgaactggctatgtgagtag

SEQ ID NO: 6711 - protein, 644 aa, DROSOPHILA
MYQDSGCSSSSSRRGSSSAAAATSTAATAAETAAAAAATTTSSSDEETLETLTIITTTITDSDIHATTTTTTVIASGTATTAAAAATTATLATLATLASNSDIEDSSPVESEDSEECEYIEIDCQTTAQEGTSPSGGSSSSGNAVLLQRSSNNLQQQQQQQQQQQQHLQLQLQQADERLLRKIGYIASRVRCLSKYYGDFRLVNPYSARRQRRQLQEILLRHSIFDPGKEHQRAIVLAAATAAIAGPLAAIDCVCGSSSISLEAVSSRSRSSELEDDHHEQDQVQEEQEQEQHQGDTEDNEEEQEHPSEKPERTDIEEEPPPAIAVTTTTTATVRRKSSSSSTISGTATVSGSVSVSASASQSFCSNNINLLEELLIQFYEEQDHRSNLTVIRHHHHQQHQQHQQQQRITNNNNNNNNCNSIQNNNNMSNPAATAAATATPSVEQPATSGTTNIHLQPTSLPDGSDNPRRRRASDCSAVQAALQNQLHCITLKNNNCGKAMPFHRGSCGAAGEHLLAANSIANRATIILSKSCSNVDGDATATAATALSSTVGGGIGGIGGSIKMRASATDIETNALNGARDAIVASNNGNNGNNGNNGNNEYSILQLNNTIIQCHFNDDDFRALVKDLKRKVEYTERMNWLCE

SEQ ID NO: 6712 - DNA, 2649 bp, DROSOPHILA
caccgcagcggctaaactgcaaaaaaaaacaaaaaaaaaaacaatggtaccaaaagaaaaggactaaaagaagaactaataaaatattcttgaagatcagtgtcttgaataatttacttggtcaacggaagaaggatatacttatggagcgacatatacatacacaaaaatatgtttcagtgtatcagccgttggggcgaatgcaagtgcgtgggcaggccttaggcccatcacctgaactcacctaaaaaacacaggcagccaacacacgtgcattatgcaaatatcaaatatattgcccagtgcatgcgataagaatccattgcgcaaaaattaattagtcaatttgcatgaaatttatgtacaaagcgcgaacaaacgaaaccaaaacgagccaacaggcggcatttcaaggagttggagtgtggatttggggctaaacacatatatctgactcgaatcggttgaagccttgcccaaggacacactgtgcagcaaacatttttgaatcgtttgaatattataaacttaagagcaagcaagaaaaagtagcatttccaacattgtcctcatatttcgctgttatcgattcatgtctatcgtaatagcacacacttattaaacaggaatcgtaatcgcacgtatttttttttattcacatcgttgtctttgtctgcatagtgttaatttatacttcttacatagctagtagcttttttaatattgtacttgcacgtctcgactcatgtatatcgtattaaccaacactgcttatcgataaaccaacactgattaaaaaggaacagtagtcagacgaagtattttgtttagtcattgtcagtcgtcttcgcctaaataattgttgaagtgctctgtttttaaaatatctttttacaatgataaattaccgcacacatgaactggtaagcgaatggtaataagtgaatagaagatctgcatatatataaattaactaacattccagagtggttcgccatcgatgccccgtcgccgccagatcgggcatacttccggccattgtaatgtgcgctgcgatggctgcggcaacaataggatgaccttctatcgctacaagtgcctgcactgcctggactatgatctttgctccgactgcaaggaaaatggggtctcaaacgggttgcacagtctggatcatccgctccagtgcctaatggatcgtgatgcacttgagctgcacttcgccggtgagccgattccgatattgtgcgccgacagcttcacgtgcccagtgtgcggtgaaatgggcttttccgtagaggatctgaggacgcactgccaagataatcatcgcatggcgcgcacagtttgcatttgcccagtctgcgcggcggtcccattgtcgcaaccgagtcacattgctcacattgccaatcacttgatgttctcgccatcgcatcgcgctacaggggatccgatgatcgatatcagcgccacttcccaggctgagggctccagtttgccccagaactctgccgtgagctctggatctggcgctcaacacactttttccagctcggaaaattcccaggtgcgcttccttctacccggaaacagagctcccttagctgattccgacgattttaacatggacaattgggaggtataaaacccttcgcatcaggatgacgaaggagcactacacaacattataggtttgaagatttttaccccacatcagaaactacacaaaaaaacaaacacacacacacacaaaacaaacaagcacttgtaccgctacggaattcgcgtgcggaattaaagagttcgttttttcgttagataatgaatgacgaatatggagaaatcctaaaaaaacactaaaaacaaaaaaaaaacacaaaaacacaaaaaaacgcacaagaatcacaaaaacgcacaaaaaaccaagccacttgtatgacattaaagaattcgttttttcgttagataatgaatgacgaatatggagaaaaactatacattatctttacaccaagatatagatgtcgtgcgtctacctaaagataaagattaagttcgattcaagcttcaattcctcgtagctgcagacccaattaattagaaagactatctggtgatgggaatagccccatttcccttccagagcgccaatggtgaggtattacttgctgctcggttcgggtctggagctcgaagtgcttctgttgcttttgctgttcctgtaatccgcttagaggtggaaaccttttgtcattataaaaggatttcaggcctgacagaatttccatttgttgcgattcgctcgacagcctgtgcgctcagttaacttttgcctgccctcacagaaattaagattcaaaaaccgatattttgcctctccaattataaaggtaagcacagacaaagcgtttccagataaattgccaatcgaactagataaaatgaggcaagtgtaaatagtggaaaggcgcagataggccacgtctccaggtcccatctgcactgtgagaaatttccgttggcatgtggattctgtatatgaattggaaaaaaaaaaacggcatttaaagcacatttttggttttctcgtgtagttttctcgatgtagtggggattgtacgtaccggcagcgtccagccgaaaaca

SEQ ID NO: 6713 - DNA, 649 bp, DROSOPHILA
atgccccgtcgccgccagatcgggcatacttccggccattgtaatgtgcgctgcgatggctgcggcaacaataggatgaccttctatcgctacaagtgcctgcactgcctggactatgatctttgctccgactgcaaggaaaatggggtctcaaacgggttgcacagtctggatcatccgctccagtgcctaatggatcgtgatgcacttgagctgcacttcgccggtgagccgattccgatattgtgcgccgacagcttcacgtgcccagtgtgcggtgaaatgggcttttccgtagaggatctgaggacgcactgccaagataatcatcgcatggcgcgcacagtttgcatttgcccagtctgcgcggcggtcccattgtcgcaaccgagtcacattgctcacattgccaatcacttgatgttctcgccatcgcatcgcgctacaggggatccgatgatcgatatcagcgccacttcccaggctgagggctccagtttgccccagaactctgccgtgagctctggatctggcgctcaacacactttttccagctcggaaaattcccaggtgcgcttccttctacccggaaacagagctcccttagctgattccgacgattttaacatggacaattgggaggtataaa

SEQ ID NO: 6714 - protein, 215 aa, DROSOPHILA
MPRRRQIGHTSGHCNVRCDGCGNNRMTFYRYKCLHCLDYDLCSDCKENGVSNGLHSLDHPLQCLMDRDALELHFAGEPIPILCADSFTCPVCGEMGFSVEDLRTHCQDNHRMARTVCICPVCAAVPLSQPSHIAHIANHLMFSPSHRATGDPMIDISATSQAEGSSLPQNSAVSSGSGAQHTFSSSENSQVRFLLPGNRAPLADSDDFNMDNWEV

SEQ ID NO: 6715 - DNA, 17689 bp, DROSOPHILA
atattgatagaactaaagtataaacagcgacgggcagcttcaagggaaatacggcagaaagtaacaacaactcggggtctccgaggtgtcacagctacctgtactcgcacctgggatctcgaggttgcaagggcgctgggttcacagaatgtagagacaagttcaagatttatgtgcctaccgagtaaaacaaaagaagagcagcatgtgtcccacagagaagcctcgtcagtccaagcagtcagccccaccagtggccatatatgccgtcatcaaggtgttctggtgacagcccacacactggccataattgcaccgatctgctgccaagtttgagcagaacctgacttccagttgcgagcgcacagctgtggccgaaagcatgacgttggcctggaggcgctccaaagacacttggataccacctggatacttggaaacttagtctagagtgcttcgaatcaaagcatttttataaattttaatcacaaacaaacattaaagaatatggcaaaaaatatttaaatttaaaaaaaccttagctagggaatatagggttttttgttgaggtttccagcccaatgtttctctatgtgcacacttgcgatatgggatgaccgccgcccgaccctctaattatgccgcactcattagaaagacaatctggacccgcagccgtaggtgtattaaagggagccagcggagcgtggccgccagtcccgccggtcatcaagtgcagctcagctggacgacgtgttgctgctgtaaaactggcagcgacaccgcggccaccgccaattgaggcgatactatactatgccttagtgaagagatcgtcggaagagcgcacatagacttgccaattgctccgaaaatcccagagcgccgccactccgaatcttggcaagaccggttgtcggccatcgtcttggcgttttcgtcggagtgcgagtggctcggtttcgggcccagtcagtcttggccaggtcggtgtgcgagacacatccacagcgctcaacgaacctctatcccatcgatcccatcgcttcgatttcgattgctattccgattcgtttcgatcccgaatcgtgcgtgagtttttcgagtggcgtagctctgcggttatggctccgtttacccggttctaattggatcgtgcgtgtggatttgaaacggctttccgtggctccaagagacgttcatgggtttccgagatttgaaatagttgcggttgttgctgttgtgcctgtgatgtttctgtcgtgattttctctgattgttgttgcccttgggaagcgattaagctcgacgggtggttgaaccgggccagtaaatacgtgctgaatgatttgtgaatcttttgaatatttcgcgttgttttctggggaagtgcaaaagtgtcgggaagtttgttgcctcagtcttttgtgttgagacggcgtaatagcagcagcagcagcagcaacaacaacagctcggattatttgccacaattcgcacaaagagcagctcttagcgtctctttaccactcttggccaactcttaaatgtgcaattcccgcagcgttaacatgtaaaacgagtgttggccacaaaacgaaataattatagaggaagcccgcaaaaaaaaaaaaaaacacttaggaagtacataaaaacaaaatcaaactaatgtgaaaccaaaattcgtgaaaatatctaaaatcatcatcgttccgggcaaccagtttaaggcacagcgaaatcgcaacaacggacacataacaaattggattacgcaaaaagggcgaagttggctagaggtgagtgttgcggagttgctgtttgaaaagccataatcgaataaccagaaacccgaaacccgcaaaaagaaacagttaaaatcaggcagaaaatcaaagctgtgccgtttgcaaaaacaaacccaaaacagccttaaaagatgacttcataaatcgccgacgctgtggatgtgccaaaaatccatcagccaaaccggttggcttcacttcgcctcgctcgaaattcggaattcacggaataccaatacttgtactcgggggaacaaattgaagaagcgttgcaatctgttttctgtgcaaatgaaatgggccttatctgaaaagcggcctgagaagccatctgtccggggatctgaacctgtttgccaaggttgccagtggccgatgttggctgccaagttcgcagccagttgcatcatctggggacacaaatatggccgcgatggggttggccatcggcaattggctatttgagtagccacatcacggacatccgtcttccatccgcttttcctgccttctttcccgtttttcaatgcccatttctggatgcgcaccgcataagtaatgtgtcatcgggctcttggaatcaaaggtccattcacatttacccccactccgtgtgcggccattataagccagaatctgttgctaattggctgacccaacattacccacatgagctgagaccgggttcttctccttgtggaacttttagcacttccacggatcacacagccataattatgttcgttccattgtgttcgggttggcgtctaaagaagcaattagaaatgttgattgatggagagatgaaccccgaacccatcccgatccgacacttgcatcatctttggactatgggaatgtgatgcacggcctttcccttttcggtgatgcatggcctattaattggttaatttgtggtttgttagccatcaaaatattgtagttggccaatgtaatggtcttcatctgcgttgaatacaacgccttgactagtgaataatggctcatccgccaaaggcgtttatctccaacttctgttggatatttccaagttctccggcattctcggaaagctttgcgtcgaggaacgccaacgcaagcgtaaaatttgtataattaaaaggcgaatctgcgcccgagctgctcgaataccagtttctgagccatcgtgtagttaacttgtttatataacagccagacaacaactcgcagtgaccttgaagcgggcacaaaataaggtaaagacggaaaatatgattgtacgtataatttcgtattattttgctgcctggcgatgtgtgtgctcagctaagtgagagaagtgaagacatatgacggatttttgggggtttatgaactaagccgagaaatgcgtgtgggcttgattgccaaaagctgtgtgattgatttataatctcccgcggaagaactaacaaagaaagcgccaaaaatggtgaggtcattcaaccaggccaagaccttttcagcgttagatttccgcctgctcgttggtattgatttacagttgaaacgaaagacttaggcaacgaacttcgcgactgcattactcatacgacacgttggcgctcagcactaattatgcaaaaacccaaatgctagcgaaaggcgtgccccaaacccagccgtgagtcacaagcttcgcttgccccccgttaaacggacactctgcattgggttgcttgtttgttttcggccaaaatgaaaagtcgtctggctagttgatcccccactctccagcctcctccaccaccactggcgaattaaaccaacattggcaaactcaagcggacttaaatgcaggcttttaccttagatcaaccccacgcaaaaccccgcgactgcagtcgaccgaccacgaggttgttcaattcattccaaacactttcaaatccaagccttaaaaggggagtggcaggccaagacttttgaactgcggactgtgctcgaaggaagtgggcacagaactgtggccaatacttggtgtgttaagttctcagacactaagatataagataaataaattattgtaatatagtagcgatcgtctatgatatcaatgtctaagtttagcatttatgacactacaagtgatttatctcagtgaagttctacgctcattaacttcaagtacgagactatttatggtttagaggaaatcctcctcaaaagttagttacttaagtactgagccgaggaaacttgcataaacttattatgggaaacgtaaggtcagctcggcctgtcattaataagcaatgcccatttctcgaactcatcagtcgagtccctcatcacaaacaataattagctttaaaaaaaagggggctcaatgaataagttttaatgatgaatttggctgattctgaccagcagtagctgccaatgtacgagcagctgggaggctggatttttagtacttctagacgcgaaaccccagccaagcaaaaacggaactacaaaactagtttcagctgtgcctttgggctgaaagaaaaaaaaaccataaaaacagcgggtaacaatgggcgccagtcaaaaggcaaaaagcacggcaacagcaaaaagagcaaaataaatggctgaaactgaaatattgtagacccggctgataaaaatcaaacacattcatgtctacagctcagctcaagtcacgttcaatgcgaatttctttgccgtttgtttttttttttttgctatttcgtacatattttttcttcgtggcaataagcaagcctgcggccacaaaaattaggcgtcaaaatgggagagaaaaatatatttaggcagcgccgcgggccgagcgattgtgggtgtccaatcagcggtttgcatattggccagttggtttgagcccaattggacatcttgacaaatggcagagaagctcgccatttgcagagaacttacataacttcgtgacagcagcaagagcagtgacacgcaacgcattgggcagtttttggtcttaagcccaaacttggttcgcacagtgtgtggcaagacccgatgtctccacgctccagtttgatgcgtgtggcaacaaccaggtcagcgcatttggccaagagggtggagttgcgtttttccactttaagaccccctaatgatgcgcgattttcgagttctcacattgccttaatggccaattgcccattagagcctggtcggctgtcgttggcccaatctattaaatctataaacggaatcggcgttggcgtttattgcaattggccaacagcaaattaacagcattgttagctcatttgaggcgaacaatggctgcggcgagacaattgcactgaccttgggacaatcgccgggtggctataggttcgttccgatccgctggctctcggctacctacctgactagctatcaatcccccataaagtgccagctaattgctgcatctgaagtcgcaatttaaaattctaatttccagaaacaaagcagagcctgcatacgcaagcaggtgaaagtcgatgcctcaattgccattgatctccgacgcttgattagccccagcccgctggccaactagaatttcggacctgagtaaaagtaaaagctgagcccgaagtctggctataaagccgctctgacctcaatcggcgaatggccatagctgccctttttgttcgactcgttaattgccgtcattaagaacaatgcgggacaatcgcacaatgcatcttcgctccgaagttcgcttcagtcttcggtcttcggtctttagtcttcggaggtcggcctttaaggccctaacccgccccaacttactttctacgccagcggaattgcagcgaaattagctctacgcatcgctatgctacacaggaagaaagtttggctcgatatgtgaatgccattgtacctagaagactatggcaacgtgttgaattcgaagtatttgatattagcggctaacacttaccctccttaccttaattcttatttaatcaatatgtgaaatcttcaaattgatctcgacatgacaagacatttttctccgagtgtgattgatcacactacgtcgcgatgtacgacgagatttcccattttaatggcaaaccgcaaccgaaagttggtagaaccccacacatcccctccaccaccaccatcagcatagttccaaatgggtcagccacgttatgggtttctatgggtttgtgtgcttagcacagtttctgtttgtgatttgccaatgcctttggcaattcagattggaaccagatctgagtttcgagatgggagtcgtcagatattctaattgactggctgaggtttccaaaggttcccagatgtgcgcctagattaaagtggttcacccagatatgttgatggatcggcgagaggtcggttccctttaattatccacttcattggggtttggattcggatttatttggaatcatttccaaatactcagctgggcgcaatttcacgcacagttacgcgcttttttcacgctatttaccacttttcccatttttcccttattcccagcgattttgctcaagcagaaagccgtaaagctaagtgtgcatttcaaaactactttttttgcacacccgcgttgggtgtttagggcaaataaactacgggaaaatggaaacacgcgaggtcacttagctgccacattaacattagcagagcacacactccaatgaaactgcaattgtttaaacttttaacaaaaacataaagcacacaactctgtggtccgcctggcacgcaaaacccatttaatttattcagttgcacggcccattttgttggttttttgttttcagtcttaccgaatgtttgtttagttgcttcgctgctatttgctctgggaaatgtgtgtcaaatgaattcaaatcgacactcgtagccattcgttacattcgaatgcacacgattgattggaccgtgaatcatcaacgaattattttcattctggtcaggagttcttggacaccaataatactacttactatcaatcctcgactacgagtattctcgcatgccttcattatgactatgatatgacaaggtatctgcaatttgtgccccaatttcgtgcaatttcccttatcaccgatgatcgcaattgaaggtcagcttgccatttccaccgaacattggacattgggcatcatgtttgtttcctttgctcgctttttagcccgaactgggtaacgagagcagatgccaatcaaagtcattattcataatgctcgttggcgtgctccgccgcatttttccaactcattttttgcctgcatgaggtgcgttttcaatccgagctttttagccatgtatctcgcttagagtcgcttgcgtcatttgctaattttagctaatttattgcaatgccagtggagggggcgcgagtacgttggtgggatgttactggctccactggcgtcagttggcaatttgcattcggtttcgagccacgtttgtctacttacggatcgatcgcctggtgttcaggaagtgtgggcctccagctttgacaaattgacgtgtgctcaccgcataatgccagcaatctatcaatttccagcggatctattgacccaattccgtgcttctccccgaaccaatttcaatagcaaccagactcccagcgagattacacctctcggataataagcggtcgtatcttcgagtctgtatcttgatccggggtgagtggatgtagatagagtgctggtcttgtgacatcatcactccgctcccttgtgtgtgtgtgtgtgtgtgtggtgaatgaaatgtgttggcagcgtcagcagtaacaacaaatcattatcgcctctcggccatcagtgtaagccgcattttgttgtcttgcgacgcccaaaacaccgatccacatgcacggcaaaaaaatgatctcatttccgatatcatctgggtggtggtagtatggtactatgaaatgggtttctacaaaagatctacttagttaagacaaagacataaaatagtatacatggagcacttctttttgaaacggttatttcaatttaataaaccaaattacatttttgatggcgtgccgaagtatattatccgggcttatagatgactcgactccgattgccacatatttctttctgtgtagtgaccaccatgaggatgtgactcgcctgcaaagttctcagcgatcggcaggaagtggaaaaccgtttgtcacgggctattgatatgcgcttaatatctcgtaatgcagcagcttctgttgccgagaaaatgcggaaacacgagtcatgatgccacgctgccatgagttgcacttggtggctgtctgtttgcccagcgctcgacggctggcaccgccgagatgccgagatgtggagttcctcgaataaccagcaccacttggtgcgaggctaacccatttgcaatgagctaagccagcacgcgaacccaaattcgccgctgttgacttgacccatttggcagcagaaagttgcctttgggccacgatattcattacagaatcgctgtgttcgagtgatttagcataatgctatatgtgagcagtgggtgtggaaccggtttcggcggctttcagtttatattttcggttttgactatttgccaaggcttaatatccgtctttcggtcttctctcactcttgcagctcgcaccatgaagacaggcactcgaatggacgctttccacacggcgctgcacttaatcgtaagtattctgcactgggttctcttccccaggcccatcgaaatggaaaattgctggagtcggccagaacacatcaatcaggcagcccgctgaatgacaattgcatgccaatgcgattaacctggatgcgggactggaggccacagcgactgctcccctcctcagtatgctaaacgcgaatccgagtggccaaaagtggcacaccagcgccattctaagccgcttggcttggccccaaagatccgagattcaggttcgggctcgggttcaactctaacccagactggcgaaagtttgccagtccgtccaaaggagcctcagaatcgtgagaatgcagcggttcccctactcgccggcaacacgaaatcgaaatttcccctttaattaaagaagcttactggcgatggattaggccagggacttaatttcggcttgtcgtgatttatgtcaacgctttgtgcttgaaaaggggtcgggcatccatggtccatggtcggacctgattggatcggatagagtagcatatataccaactatgctaatgagtgacttgtctccactttctttgcagacaatcgcagctctgacgacgcacgcggcgcagattccaacggcaatgagtgagtacataaatctgttcattaggaagctaaaccgaattctatggattgggacaccgagccactgggggcccaaagaaaaattgccagccaattggtaacgcagacagacgctggcaagattaaacacagttgggcgctttgttagtcgcttgaaaaacataaaataatattcaaatgagccatcgaaatcgaagttatcaactattgtagtttccgctcaaacagaagtaaacagaagagagaatataatcaaattgggaatatttagtataaatttaaggttaagtaggaagagtatttaaacacaaagtacctagttagaaatccatcatgacgtaaccagcagcttacaaatatgtatatttataaaatggatagcaatgcctgatgaattggttccccttcaaattggcgaagcattacctaattagttataaaggcactccacttaatccgccagcgtttttgccattgttaagtaaacccgctaagctggctgttgtctctccggttgccaaatctctgttgactctgtttgccaaaaaccaaaacgaggtattataatcgcatggcaaacagcggtccagtgaagtcgctttggaggctttggagctgcctcattgaggggcgactggcgagcattgcggcacacttccttctggctttcacattgcgttttcggctgggcttggagtggagagggcttgggattgtgatttggctaagaccctggtgacctaggagccatgctctgacagcgattgctggagcaagtccagctagttgagaaactgctggtaggtgaagaactgaccctggttgccacctggttttcggtggcaggagcagcgactgtcgaatatccacttccgctgcaccgggttgaaatccttgtgatttctttaggagctaacctcttcttctcccaattaatactctgttttggaacattaacttccttgcttaagagaaggtgtagattatcgtgtaagaaggatcacttgtgtaaaaccatgaaccgcaaacacacctcttcatccgtgagcggagttggctctgactctagagttggcttcttagaattaatttctcctacccttttcgtcaaatatgagctccttattgcagcagccaaaaccgcgatcagggcgtcgatttgatcctggtccacctttccactcatttcattgctgtcttgacttattttccggcgcaatctcgtccatctttgcacttaaaatttgtcggagtccaagaatcggtgaaagcgatcgatagtttgctcgaatcagatctaaatcacgaagtatctcataaatgtatgaaccataacttaaaactgcgaagttgatttgtttttctctgcaactcgatacacacgcctatttaggcttgcattttctttgttcgccaagtgccaagggaacagcaacttgaggaagggcaacttaggcccggtctagttcgttctatttgaagagtgcagctctgctcgcctgcggagaccgtaaaattatacataatagaaagccattaaatgttttatgtgctcgccaagccgccgagtggattccattccagtggagtaagaaaaccggctctgcgacggccgtgttgcatgcaattactttgccagaaccgcagtaagtgatgcgaaatgctgcaaggttcgttgaaccgcctcgaccgaaggcatcccgtcccatcgcatcccatccgatccatatacacaccgctgaatacacaccgtcaactgccagggcgaacgtgcctgggcagctcttctccagtctgttctcttgctattggtcttgctcttggtcttggagttgctctgggtcttggaatccaattgtgtacctttgcagaggagctagcggggagttctcggctctgcgatggctggctaaaagcaggaaacgccacgagcacctccaaatccccggcagtgcatcgaatggttcgcaaagttcaaggaacttgcggcgtgccgttttctaatcgccccgagcttctgtggcgtgtctgcgcccccagttgctgcttctgccgattttcgaagttgccgcttcaatggcttctcaatgtcatgaacatgcactgaaagaaacaactgtgtttgttgataaataattgcacctagtgttgattttctatcctttaacaatgagagctagatatattacctcaagtcgatatttgtgatttttcttgatctctttatatttcttttatagcattaattaagtacaatttgtaaaacctttgaattttttctcagttcattgttgtttgctatagtcttccgcatgccatttaaagtctgcttgcagttgcagtcctaactaaatactgctcccatgggccattgtcttggcttgctcatgatttatgctaacggctctcgaggatgccaaggtggatgcggcatccattgggtcgcctaactgtgcttttttgggagtgggcctgtcgtgtttctgtttgcatttcataatttcccgacatcgatttcccttgcagaagatgcccagagctcgctgagcgatgcgattgcggcggcggaggcggaggtggcctccacctctaagccggcggtggagccgagtgtgcggatcaagtgcctctccggatcgatgctgatcaccattaaagacgctcctccgaaccacgaaacgggcctgttcagcggcatgatctacccgaaaggcctgtccaagaactccacctgcttgagcgagtacaggtgagtccgcactttagccagtccaatctggattctaatccacgtccctccaccgcagagatcatgtgggctccctgcgatataagctgcccctgagatcttgcaacacgatgccgaaggaaacggtaagtctagaaccccatcctccccagaaaactcccactcagacaggtgatacgtatgtacataggtgacgccacgtaccgggcaactcgttctgccattttggcatgcaaataaaaaattaaacattaagtttaagcacttataaggcaggcagacccgactcattggttacaaggtaaagtccatatgccaagatgatgagtccattgaaaggttgaatctcaaatggccaactcacgcaccttttgcggcagaactaatgatgcgattgtgatggcttcacggagattctatctaaaatagcagtcgttagatgtgctgggtaagatggggaaccattagtaatgggcttggcaactataaatgtctgtcgcttagttagagcgagccagaaatgattgagtgattgcataaaagatgaatttttaaataaaatcattctagtatgttgtatagaaacgtgtcagaagcttttttaattacatttgccagctagtttcactcagtgctagatttcccaagatctcagagccaatcaagtgtattactgatctcatgcgcccgatcagccatgacgagctgtctcccatgtccctgtaagccatatcgaatgatccgaaagacggccgagatgtgccatataaatttcagtctcacattgggctagtctaatgcttatatggctcgacttatttattggctcattcactcgatcgattcgggcaaacaacgggctgcgttgtgctcggattcattttaaaatctcaattagcacttaaccgggctaatgtggctgcaactcacgcatcggctggcattttgaagccactgcctcggtccgattgtggtacatattaatgcaatttctcggcatttatggggcagtgttttgtaattcgcggctgctgctccttctccttcctttcgcttgattggattgacacaatttctgaaattaccaattttaattgcagttacgatagccgccatttagtcgatgaggcaacagaaccactagatgttatggaggctagctgcttcacaatctaacaatatagatatctggaaacgttttattgcgatttaatattaattatgaaaaataggtacttaggaacaaaaaaactaataataactaattacacgccaaaaactttgcataactaagttcgctgcctagtcatttgtttttgattgattttggcaaaaaatcgtcactcgcagattagtgcttggatttgaatagaactaatagagaatggccagacttgatagcaatgcttttagtggttaaccgtttacagatataatgatgtttttactcgaggtctaccaaccatatatagcacataagtattcttttcacttagttcgttgcctaagtctttcgtttttacggctttgtccttcgccgacccgccttttttgttgatccaagcaattcacgccgagtgttcaataagcaagaatcagtaaacattatttaccccccgcaaacagtggaaaatcaacattggccaaggcccgtcgcttggtagatgtcttaaatgtttgtcattaaagacgatgagcgggtctcatccagcgtgcagtcccctaatggcagctatcctgccttacgtcatccgcgtcgagatgagctcattgcagtgtaaaaagtcgcgtgacaggccgacacatctgctgccattgagcgactggtacttgctccgctggaagtcgagggtctcggctgtgcgcatgtcaggcataattaaatgagccacgaacagtgcgatcagcactcacagcactcacagggtcgtcagagatttttaattaaaaattaattgctgccatcccagaactctaaactcccgactgctatcgtaggcaattgttcacagctccgataagtaagccatctcgcgtcgaaatcaatttgttctgttcgctggcaatgcgttcattggccaccaatgccgtcggatgaccatgaaaaggccaaaagtgttcggacatgtaagcggtttatggccgatattgatatttaaaggcagcagctaccgccgtgtttggagcgaaggtcagtgcggcgactgactcccacgcatccgttccgaacctgttttccagccgatgccatccgatacatttacactggctccggagcagagacgagctccgtatttacgcggagaagtgttataatgacataatagggctttctaccgttagaaccgccgctgcccgtgctcgaagtcttaaatgtcactttattatgctttttattggccattgtctcgagatgatgatgcccagatgctgagaacttaccctcgaacataactgtcaacggttctcggggacttgggcaacaaaggaagaccctgcccgctccatcttcttattttcctaacagtttctcggcttgttttaggcggaaaccgtgttgggcaataaatcgcactgaccagcgtctaaatctacagaaagtcggcttcttcagccgtcgattactgcctgctatagcaacaaacatcggtgctggccattaagaatggacgcccgaggagggcccacttaagcgaagaacttccgtgcccaaatctgtacagacccaattacaaaacttccgagcgggcggcgtgcattgcatggagtactccgtcattacctcacctttcttccgcggagttggctttcggttggccaagccaaagccatcgagtgtgtactcgatttgtttctgctgtccgctggaattagcacaatcaccgatgggcgaataacccgttaccagtgcacagagcgaaaaagttcgaagttcgggaagttagatcgtcgtctctcaatataaatatattttttgaggaacctttattggaattacaaggggctatatattattaatatgctatatttccttgagtaattctttaagagaattcaattatgaatctctgcatactaagcagtaggtcctaatgaatttgctaccagtggatatccaattaaagttctctagtaagggaaattgcatcatgatggtggcagtattcttgacttctccaagtgcccaagcagaagctattgaaattcatcatgcaaacttggctaatttccgaggagataaggcccgcagatcgccgacgaaacgtcacacctggctgatcggctctagcaccattctgaaggcgacttcaggaagtgctccacagcccccatggcttgggcatatggtattgtttgacttgggtcgcacattcaactctgaggggcgatttctggctgcagccaagcgtgaatctgtatgcataatgagaagtcgccattctacttgggttcaggtggatgatatgacttctcgacttcggtatccagttttcggaacttataagatctgtacaagatgttgtacagctcagctcgagtggcgtattgggggcgaacgggtttgttttccagctcttttgtcgatatgtggtgactttatgaaaagttcccatttataggtaatagattgtaatgacacgttcgtttaaaattcttaaatgtaaattaatcctatctttcaggatgacggtggcattgagttcttcaacaccatcgtgctgcagccccacctaaagctcatcacggacctgggacgtggctaccacgtccgctgtgcgtacaagagtcgggacgcagccatgaagcccaaaaagtacctgcgcaagcacgcccagaagccacaggccttccgcagcgatgatcggcgggagtacggacgatcgctggacaagcagcaggacgacgacctggacgaggaggatgtctacgatgcgaatgccccgacgcaggaggaggacgtgaccaacaacgagatccccatgccaggctgccacatgaagatctacaacgacgagcacaaaattgccgacgatgtgaagatcggtgatcctctgaccattgtcatcagcatcgataagcagaaggtttacggactccatgtcacggactgcatagttcgcgatggtctgggctggggagagcagcgactggtgggcgaagatgggtaagatggatttcaatccgtatggatatggtatatacaacactctgttccttcagctgccccatggacaacgagatcatgggtcagttcaactacacccaagaccgattggcagccaacgtgacctttccggcgcacaagttcccctacaccacctccgtgtactaccagtgcaacgtgcgactgtgcgccctggaggaccccacctgccaggaggctccccagtgcagcggcaagaggcccaagcgccaagccgccgcggacagcaaggaggaggacggtctgcccgccaccattgaggtcttctctggcctatatgtgaatgagaacgaaaacgccaacgacagcgacgaggacgcggtttacaaggagaaggtatgtggacaggaaatgtttgatggcatgtgattaatacccctttaccatagactctggacgacgccctgtgcgtttcgcaacgcaccttcgccatagccattgccatcgccggattgatccttatgctagccgtggtcgccgccgttctctgcatcatggcgcgcaggagcaccaagacggtgtccaactctggcagctccatctacagtggaccctacacgaacaccgccttctcgcacagcagctaagcgcgggaagatgaggaggatggatagtccccaggaggagattctaaattcaacgtttccaaaatccaaaacactcaaagtgttaaaaaatcagatggttcccaggaggagattcggtcgcgcaggtgcgctgcggtagtcaacgattggtagagttggagccacttagttttaggatgccggagcagtcagaccagtctggtccagcggctgtttcttagattaagcctagcctaagttgcaaatgatgtgcagagattaccgggcaatggccggggtccatccccattgcccgctaatgtcgcagagatcttggtccacatccacattcggaaatggacacccatcgagctctgttccgcacagtcggtgttggactcgccccccctcctaagcgtgtttctacatccctgactaaccccattcccagaacaatctgtcgaactaacaacgaatgcagcagccgacgctcaggtgatatttgtactcgtatctacttaatgccttactatgaatgcactacgcgtaatttatttactcttcggatgaccaactgcccttctagtagaatttcctaaacactttcttgtcatcgatttacgtacttaattcccatgcggcaggagttctagcccttattataattcagccgtccggatcagccacctattatacatggtatatatataacatatatgaaggcagaagtgaacagttctcaaactaagctcagcatttgcaccgcttcaatcgagcattccgacgtccactgccaggatgcaaccagaatgctcctctggagccgtacaagccacgcgattcaattcatactgaagctcaatttagtgtagctctaagttaatattaatcaatgaacaataaactcaaactgaccctaatatctgaaagtgagtgacacttcctgtcgtggattacaacaccaagcggcacaatttcagtgtgatatgtcagtggagatatgatcgtagatacgtgagat

SEQ ID NO: 6716 - DNA, 1727 bp, DROSOPHILA
cacatccacagcgctcaacgaacctctatcccatcgatcccatcgcttcgatttcgattgctattccgattcgtttcgatcccgaatcgtgccgttaacatgtaaaacgagtgttggccacaaaacgaaataattatagaggaagcccgcaaaaaaaaaaaaaaacacttaggaagtacataaaaacaaaatcaaactaatgtgaaaccaaaattcgtgaaaatatctaaaatcatcatcgttccgggcaaccagtttaaggcacagcgaaatcgcaacaacggacacataacaaattggattacgcaaaaagggcgaagttggctagagctcgcaccatgaagacaggcactcgaatggacgctttccacacggcgctgcacttaatcacaatcgcagctctgacgacgcacgcggcgcagattccaacggcaatgaaagatgcccagagctcgctgagcgatgcgattgcggcggcggaggcggaggtggcctccacctctaagccggcggtggagccgagtgtgcggatcaagtgcctctccggatcgatgctgatcaccattaaagacgctcctccgaaccacgaaacgggcctgttcagcggcatgatctacccgaaaggcctgtccaagaactccacctgcttgagcgagtacagagatcatgtgggctccctgcgatataagctgcccctgagatcttgcaacacgatgccgaaggaaacggatgacggtggcattgagttcttcaacaccatcgtgctgcagccccacctaaagctcatcacggacctgggacgtggctaccacgtccgctgtgcgtacaagagtcgggacgcagccatgaagcccaaaaagtacctgcgcaagcacgcccagaagccacaggccttccgcagcgatgatcggcgggagtacggacgatcgctggacaagcagcaggacgacgacctggacgaggaggatgtctacgatgcgaatgccccgacgcaggaggaggacgtgaccaacaacgagatccccatgccaggctgccacatgaagatctacaacgacgagcacaaaattgccgacgatgtgaagatcggtgatcctctgaccattgtcatcagcatcgataagcagaaggtttacggactccatgtcacggactgcatagttcgcgatggtctgggctggggagagcagcgactggtgggcgaagatggctgccccatggacaacgagatcatgggtcagttcaactacacccaagaccgattggcagccaacgtgacctttccggcgcacaagttcccctacaccacctccgtgtactaccagtgcaacgtgcgactgtgcgccctggaggaccccacctgccaggaggctccccagtgcagcggcaagaggcccaagcgccaagccgccgcggacagcaaggaggaggacggtctgcccgccaccattgaggtcttctctggcctatatgtgaatgagaacgaaaacgccaacgacagcgacgaggacgcggtttacaaggagaagactctggacgacgccctgtgcgtttcgcaacgcaccttcgccatagccattgccatcgccggattgatccttatgctagccgtggtcgccgccgttctctgcatcatggcgcgcaggagcaccaagacggtgtccaactctggcagctccatctacagtggaccctacacgaacaccgccttctcgcacagcagctaa

SEQ ID NO: 6717 - protein, 462 aa, DROSOPHILA
MKTGTRMDAFHTALHLITIAALTTHAAQIPTAMKDAQSSLSDAIAAAEAEVASTSKPAVEPSVRIKCLSGSMLITIKDAPPNHETGLFSGMIYPKGLSKNSTCLSEYRDHVGSLRYKLPLRSCNTMPKETDDGGIEFFNTIVLQPHLKLITDLGRGYHVRCAYKSRDAAMKPKKYLRKHAQKPQAFRSDDRREYGRSLDKQQDDDLDEEDVYDANAPTQEEDVTNNEIPMPGCHMKIYNDEHKIADDVKIGDPLTIVISIDKQKVYGLHVTDCIVRDGLGWGEQRLVGEDGCPMDNEIMGQFNYTQDRLAANVTFPAHKFPYTTSVYYQCNVRLCALEDPTCQEAPQCSGKRPKRQAAADSKEEDGLPATIEVFSGLYVNENENANDSDEDAVYKEKTLDDALCVSQRTFAIAIAIAGLILMLAVVAAVLCIMARRSTKTVSNSGSSIYSGPYTNTAFSHSS

SEQ ID NO: 6718 - DNA, 1768 bp, DROSOPHILA
tatatatatgtatggaaggatgatgacccaccttcaccgtctccagttgggctccttccaaaacgatgatcagccgcttttcggtggcattcagatggagcaccttgaattgcttcttgtccagatcgaactccggatcgtccgccttgcgaccgacaaacttacgcttcctattgatcgccttgccctgaccgcccatatcgtaaaagtagttgtatatggttaaaaacaattccgaaattattcccgggctcctgtcgtccggacatcacccaccagtgcctgttgatgctcttcgattcgccactgaaccgggccggtctgcttcaggtctttgtgcgcaccgagcataatgtgcttatcgaaatcaatccccagacgcgcatcccgaggacatttaaacgctttgctggcctaatggtgcaattgctgcacaagttccaaattcgcgccaatgactcctcacgtcgtctgatgagtgtcattaagaatccgattacggatcatgtgccggtcggttgcaagaagtacgccatgagcttctctggcaaactattgcccaattgccgggatctggtgccacatggtgacgagacgtcggccagctatgatgagccggtggtcatcgttattggagccttcgcacatggcgttctcaaaacggactacacggaggagctgttctccattagcaactatccactttcggcggccatcgcgtgctccaaaatctgttccgccttcgaggaggtttggggcgtggtataatccaagtccaaagcattgtttttcttagtttagtcatagctagtagttagtctacatattattcttttgattgccttccattaaaatttggtggaatatccagaccagaatactattttcatctttcttaaagtttagaacatacaaagacgcttatatatatagttataatataatctgggatcctaattaatcatcacgaaacacacgcactttctctgtttttacaattagttggtttatttatgttaattgcagttacaaaagataggcttagaaaacttgcataattttgaaggtatgtttgcggtaatttatgcttaactaattgcactgttcatcaaaaggattattgcgaattttgtatacgttgcacgattgagagctctattaaatcccacatgggaaagggaaggtttcaaaagggatggattatctacttggcacccggctttttggtgcccacatcggctgccttcttttccgcctcccgcttggcggccgcctcctcgcgctgctgccggatcaaagccaatctggccagatcggccttagcctcggtggttttaccagcagcatggagtttctcgtaacgctggcgcgctctctgcttttcgatctgttcgcgttcgcggcgagaaagctccggcttgggattaccgccggcaccggctggcccgtcgtccagcttgatggccgatagcttttgtgtggccttcttggtcacccggttgggattctcgatttcgatgagtgaggccacgcccttcttggcatcgcgcgcttccgcttcggagtcatcgtcggaatcctcgccagactccgattccgaggaacttgccgcaccggcgcccgccgctgatcgagacttttgattgcgattcacgggcgctttacgtgtggcgggtgccttggctttggacgcagaggaactggctttgccgccggcagcgtctttatcgtcgctatctgatcccgagccgctggtctggtcgctatc

SEQ ID NO: 6719 - DNA, 748 bp, DROSOPHILA
aataatttcggaattgtttttaaccatatacaactacttttacgatatgggcggtcagggcaaggcgatcaataggaagcgtaagtttgtcggtcgcaaggcggacgatccggagttcgatctggacaagaagcaattcaaggtgctccatctgaatgccaccgaaaagcggctgatcatcgttttggaaggagcccaactggagacggtgaaggtgggtcatcacccgggctcctgtcgtccggacatcacccaccagtgcctgttgatgctcttcgattcgccactgaaccgggccggtctgcttcaggtctttgtgcgcaccgagcataatgtgcttatcgaaatcaatccccagacgcgcatcccgaggacatttaaacgctttgctggcctaatggtgcaattgctgcacaagttccaaattcgcgccaatgactcctcacgtcgtctgatgagtgtcattaagaatccgattacggatcatgtgccggtcggttgcaagaagtacgccatgagcttctctggcaaactattgcccaattgccgggatctggtgccacatggtgacgagacgtcggccagctatgatgagccggtggtcatcgttattggagccttcgcacatggcgttctcaaaacggactacacggaggagctgttctccattagcaactatccactttcggcggccatcgcgtgctccaaaatctgttccgccttcgaggaggtttggggcgtggtataa

SEQ ID NO: 6720 - protein, 233 aa, DROSOPHILA
MGGQGKAINRKRKFVGRKADDPEFDLDKKQFKVLHLNATEKRLIIVLEGAQLETVKVGHHPGSCRPDITHQCLLMLFDSPLNRAGLLQVFVRTEHNVLIEINPQTRIPRTFKRFAGLMVQLLHKFQIRANDSSRRLMSVIKNPITDHVPVGCKKYAMSFSGKLLPNCRDLVPHGDETSASYDEPVVIVIGAFAHGVLKTDYTEELFSISNYPLSAAIACSKICSAFEEVWGVV

SEQ ID NO: 6721 - DNA, 4873 bp, DROSOPHILA
tcaccagtgttccagctggcatggaaacccccgagaacattgagcttcgcaagaagaaaattgaagccgagatggaggagtaagtgaactaatatttttaaaataacatcacgattaagcccattattccaacttctcctagcaacgaaactcctgttctgtatcaagtgctgcctgagaagcgcaccgaccgcataggggcttccatgatgggatcaacccatgtctacgacgtcagtggcagtggggctaacaaacagcccccagttcgatcaaccacagatcgcgagggcattgtggaactggctctcgatcctagcgaattggacttggacaatgacgcaatggcccagcgttatgagcaacaaatgcgtgagcagcagaatcacctgcaaaaggaggatctgtcagacatgttggccgaacatgtggcgcggcagaaatcgaagcgcaagcgacagcaaacggatccggccaagaccacaaagaagtacaaggagttcaagttttagtttgacaacaagaaatacaacttttccatttgtgcgattgtcaaggatgtcattaaacatagtaaaaactacaataagttcgcgtcattcaatttaaatgcgaggatttaaaataggttctgcaaaaagtgaagttaacacaaaagatcttatcttgtaatttctatcgtaatttgtttattttgatgcagaatcaaaatcatttgcgtataacttaaaatttgactcgttaggtttaattctcatttatacattgaaacttattgagactaagaaattacaattgtggttcgctgtgtggtttgtgctgggaccaggacagtatctaaaccaaacgaagcagagtgcagtggaaggcaaggactgaaaagagaacttgtccagcaactgagtccagggctagctacctctcccgatcctccttaagctagagctagagagtgccacacgatgtcgatgtcggctttgactcaacgcctgtcagctggtcactcgtcgagctgctcgctgagttgggctagaagagccgctcgcttcgattccagctcgccgtcacttaacgtcagctcctcgtttcgcgatccagacgactcgacggactgggcaggactaaggggcgtgccggatcgattgtgcctgttgtgtcgcttgtccttcttagctcgcttctccttcttctttttctttgcgggtgagtgcgagtttgagtcgttctgaagtagagcttgagttcccggcgattgaatgcctggaacatccgattcgcaggaggactgaaatgtaagccatgttagatagtatagttgtccaaggactgggccgacttgctacgtacacctcgcagtttgttcttgcgcttctttttcttcttcagcaatttttcgctctcgatgctgccaattgaggtcagggaatgctgtatgtgcgtgacgttattatttaacttacaagttgcatttaatgttatgtttagcatactaaccgatcgtgtcttggagcgccttcgcttggacttctccacttctatatgctcattctcgatgtctgatctcgagacggaccgtactcgttttttgtgcttcttgtttttcttagattttcgtgatcgcgagtgatgatggctgcacgcatcttcgctttccttaacaaagtcctcccagatcttctccacaccgatttctttttcataaagggcaaatgcttcaaggtgttctaccagcttcttggcgctctcatagggttcggccactgagacgttcgcctccagccattcgtttttaatttcattttctagtttccgcaaccttcgcacctcctctttcatccgttccttttcaatggcctcggcctgtagattataaatacacaaatgagttttattgatataaggtttttttcccactccatagttaccttttccagcagggagttgtatgtgagcttcacatttcccgcgtccaggctggctgaccgcttatcttcacacacgaccgtggcaaagtcctcgaaggatgtcttcgcttggacaacaaatgccttttccttgaggatctcccttattatttttttctcatcatggaagcgggctttcaggttttccacatagaacttgaaaagatccaggggtgtagacccgctctggccgagcatagcggagaatcgcaaatcggctgatatgatgggatacagctccacccacagcgacatggaagtgagctttccctcttcatgcagggagtcgagcagcgcaagaaaggagtccctgtttttgcgctgctgtcgcttcatgcgcttcttttcccgctcacgttcctcgtcctcctccttttccaaggtgcgaatgtgctcctcgaagacaattagggcgtcctccttgtccattccgagcagagtcacatcattcttaaatgctacgttgtccaatagcataacctgagcctctgaccaggtggtggcatgattgattgaagtcatcgactctagcagctcgcccagaaccttcatgtttcgttttttcagcaaccgcgcttcttccttctctcgcttcgctaaattaaatatacagtcctcgtatatatctcgccgatccggttccggcaccgcggtccatgttcgcgttccggcaaatacttcttcacaacgaaaatatttcatctgcgagttcatcttatcgctggacataaggaactgctccaagtcctcttttgccttcttggcttttaagcgagactcctcgcgctcgtccttaatcttctgcgtcttgtaggcattgaatgtttgcttgcgctcgttcagatttttgaaggctgcgtatcgcggatcctttgatatgattttcacacactggtcccagttcgcatttgatggcacattgcggtcccgcagcagctctttaaaggactcgatggcctcgcgtttatccttaaacaccacagcgctctctgacttgtcgtccttcttagctgcaaagaaagtcgtgtgacttgggctgtatattttcagagtttataatatttaccattttgttgtggcacctctatagccgctaacgtggcggccatggcctgatccatcgctgatgacgagttctcgttgctgctgggtgtcagcggcgagtggatctcaggagtcggtaatcggggggcaacaggcagggcagcgggaagaatactagccagagcagcaggtggcaccatgccggctaagctggatgatgtcatggctgctacggctttggcggctgcagcagctctgggtaaacaaggaatcatattactaagtggcacgcgatgcacaactaatttacttactcttccgccttcgccttggccttcatatccacgtactccggcggcggctcccagcaggtctccttggtggccacgttgtggtagtacactttgcccgtatccgagcgatactccttccagggacactggttgtgcagcagctcggcgggcgtcatcagagcctccggcttctcccacgagctttgcttcgtgttctgattgtaatagtatggtcgtccgtccggcgccttgtgctccgtccactcggtgctggtggccatcaccccgaaggcggcggccagctccggtgggggtggggccccaaatccgggtggtggaaactgcggcacgattgcaccgggcggcgtgtagcctatgccccttcccggtggcgctcctccattgcccacgctaggaggaacattcatttcactattttgctatatgggtaatgggtgcaccgagagtctaccggtcgttgcgtgctgcgccggccaattcacttttctttcggtaattgaaaaaatccgtaaaattctcaaagcgaatgccgctttccacgccagagatgtcgattgtgcaatgaaactgcccaccccatcgagttatcgagtccacacacgagaactgtccacccggtagattttctgttatcgattagcttccgcggaacgataacagcgctttttgttgtggttcttcgctgtgtgcctttcaattgttagagtttccttgtcgtcgagggcgattaaggaatactgcccagcgacgatgtggcgtacatagagtaagaaatagctgaaatgtacaacatttaagttaaatgatgcttacactattttttgctaccagatctctctgcagtcatgctcctctggttgcccattgcggtggcacgcaggatgttcatcatcctcgtcctaatggtaattggaggcctcttctacatctacacttcggaaaataaataccactcatgctttatggagggccaagtactggcaactcagcaggcgctaactgcagatggcgaaacaaatctattgggcgacgtcctccaggcggatcccaaaccctcgcccggaaacagtatcttctttcacgagaccagctgccgcctatccgagaacagacagctggagacgctgaaggtcactgcccgccaggcatgcgcaatcgagtcggcagcgatgcataatccgaatttccaagtgttcgtcctgttcgctggccccacctatcgaatctccaacaacaaaagccatccccaaccattgttggaggccattctcagttacagcaatgtccatctacgtcgactgaatctcgagagttacgcatctggcacgcccatggaggagtggctcaaagatggtcgtttgtcgcggtcaaagtgagtttaaagactctccctagttattactcattgatgacattacctttccagatatttgttctcgcacatatcagactttctccgctaccttaccctctatcggtatggcggtctttatctggacatggatgtggtggtgcttcgcaacatggagaaggtgccgcccaattacacag

SEQ ID NO: 6722 - DNA, 2565 bp, DROSOPHILA
acatctctggcgtggaaagcggcattcgctttgagaattttacggattttttcaattaccgaaagaaaagtgaattggccggcgcagcacgcaacgaccggtagactctcggtgcacccattacccatatagcaaaatagtgaaatgaatgttcctcctagcgtgggcaatggaggagcgccaccgggaaggggcataggctacacgccgcccggtgcaatcgtgccgcagtttccaccacccggatttggggccccacccccaccggagctggccgccgccttcggggtgatggccaccagcaccgagtggacggagcacaaggcgccggacggacgaccatactattacaatcagaacacgaagcaaagctcgtgggagaagccggaggctctgatgacgcccgccgagctgctgcacaaccagtgtccctggaaggagtatcgctcggatacgggcaaagtgtactaccacaacgtggccaccaaggagacctgctgggagccgccgccggagtacgtggatatgaaggccaaggcgaaggcggaagaagctgctgcagccgccaaagccgtagcagccatgacatcatccagcttagccggcatggtgccacctgctgctctggctagtattcttcccgctgccctgcctgttgccccccgattaccgactcctgagatccactcgccgctgacacccagcagcaacgagaactcgtcatcagcgatggatcaggccatggccgccacgttagcggctatagaggtgccacaacaaaatgctaagaaggacgacaagtcagagagcgctgtggtgtttaaggataaacgcgaggccatcgagtcctttaaagagctgctgcgggaccgcaatgtgccatcaaatgcgaactgggaccagtgtgtgaaaatcatatcaaaggatccgcgatacgcagccttcaaaaatctgaacgagcgcaagcaaacattcaatgcctacaagacgcagaagattaaggacgagcgcgaggagtctcgcttaaaagccaagaaggcaaaagaggacttggagcagttccttatgtccagcgataagatgaactcgcagatgaaatattttcgttgtgaagaagtatttgccggaacgcgaacatggaccgcggtgccggaaccggatcggcgagatatatacgaggactgtatatttaatttagcgaagcgagagaaggaagaagcgcggttgctgaaaaaacgaaacatgaaggttctgggcgagctgctagagtcgatgacttcaatcaatcatgccaccacctggtcagaggctcaggttatgctattggacaacgtagcatttaagaatgatgtgactctgctcggaatggacaaggaggacgccctaattgtcttcgaggagcacattcgcaccttggaaaaggaggaggacgaggaacgtgagcgggaaaagaagcgcatgaagcgacagcagcgcaaaaacagggactcctttcttgcgctgctcgactccctgcatgaagagggaaagctcacttccatgtcgctgtgggtggagctgtatcccatcatatcagccgatttgcgattctccgctatgctcggccagagcgggtctacacccctggatcttttcaagttctatgtggaaaacctgaaagcccgcttccatgatgagaaaaaaataataagggagatcctcaaggaaaaggcatttgttgtccaagcgaagacatccttcgaggactttgccacggtcgtgtgtgaagataagcggtcagccagcctggacgcgggaaatgtgaagctcacatacaactccctgctggaaaaggccgaggccattgaaaaggaacggatgaaagaggaggtgcgaaggttgcggaaactagaaaatgaaattaaaaacgaatggctggaggcgaacgtctcagtggccgaaccctatgagagcgccaagaagctggtagaacaccttgaagcatttgccctttatgaaaaagaaatcggtgtggagaagatctgggaggactttgttaaggaaagcgaagatgcgtgcagccatcatcactcgcgatcacgaaaatctaagaaaaacaagaagcacaaaaaacgagtacggtccgtctcgagatcagacatcgagaatgagcatatagaagtggagaagtccaagcgaaggcgctccaagacacgatcgcattccctgacctcaattggcagcatcgagagcgaaaaattgctgaagaagaaaaagaagcgcaagaacaaactgcgaggttcctcctgcgaatcggatgttccaggcattcaatcgccgggaactcaagctctacttcagaacgactcaaactcgcactcacccgcaaagaaaaagaagaaggagaagcgagctaagaaggacaagcgacacaacaggcacaatcgatccggcacgccccttagtcctgcccagtccgtcgagtcgtctggatcgcgaaacgaggagctgacgttaagtgacggcgagctggaatcgaagcgagcggctcttctagcccaactcagcgagcagctcgacgagtga

SEQ ID NO: 6723 - protein, 806 aa, DROSOPHILA
MNVPPSVGNGGAPPGRGIGYTPPGAIVPQFPPPGFGAPPPPELAAAFGVMATSTEWTEHKAPDGRPYYYNQNTKQSSWEKPEALMTPAELLHNQCPWKEYRSDTGKVYYHNVATKETCWEPPPEYVDMKAKAKAEEAAAAAKAVAAMTSSSLAGMVPPAALASILPAALPVAPRLPTPEIHSPLTPSSNENSSSAMDQAMAATLAAIEVPQQNAKKDDKSESAVVFKDKREAIESFKELLRDRNVPSNANWDQCVKIISKDPRYAAFKNLNERKQTFNAYKTQKIKDEREESRLKAKKAKEDLEQFLMSSDKMNSQMKYFRCEEVFAGTRTWTAVPEPDRRDIYEDCIFNLAKREKEEARLLKKRNMKVLGELLESMTSINHATTWSEAQVMLLDNVAFKNDVTLLGMDKEDALIVFEEHIRTLEKEEDEEREREKKRMKRQQRKNRDSFLALLDSLHEEGKLTSMSLWVELYPIISADLRFSAMLGQSGSTPLDLFKFYVENLKARFHDEKKIIREILKEKAFVVQAKTSFEDFATVVCEDKRSASLDAGNVKLTYNSLLEKAEAIEKERMKEEVRRLRKLENEIKNEWLEANVSVAEPYESAKKLVEHLEAFALYEKEIGVEKIWEDFVKESEDACSHHHSRSRKSKKNKKHKKRVRSVSRSDIENEHIEVEKSKRRRSKTRSHSLTSIGSIESEKLLKKKKKRKNKLRGSSCESDVPGIQSPGTQALLQNDSNSHSPAKKKKKEKRAKKDKRHNRHNRSGTPLSPAQSVESSGSRNEELTLSDGELESKRAALLAQLSEQLDE

SEQ ID NO: 6724 - DNA, 3931 bp, DROSOPHILA
actcttttgtcgaaatgcggtactatgtttttatctgagcatatgaaagatgacttaagaatgagggtatttaatatggcaaacttggttggtatttaatgttgcaactacaacattgaactttcgcaccacgtgtgctgagctaacctttcgtttcggaatatctagaaatgccacaccagtccctttgttcgttatctgctctttgtgccaactgtcggataaatcatctctttggtcaaaataaatctttagcacaactcaattgtggagaggaatgtgtctggtttaaatttagtcaatagagtcaccagaactatttttacgagctgcgacattggacacggtccccatgttcaactttccactcccaaaaagggttgaaattcatacagagagaaaaaaatcccaagaaatttaggacttatttacatatattaggactttatactgggcataaagtttacctcttgaccttttcatacaaaaaaaaaaaaaatgaattacaaaattcttgaattacattccaattatgtacgtacatatgtataaaggtgtggctaaatttagctagtttttttctttgtgcaaaatgatcgcaacctagatgacccacaaatggcccttttggcagaaactttcatccgcatcgattcggggttattaatgatcggtcgatccattgaccccgacagaaagtcaaagaagaaatagtaataaaacgggttctcggaagaagaaagcccaacgatgctagccaagctgcgatgctgagctgatgaataattcagagccctcgggttcgtaggaaaccgtagctttcggtcaactgggtagctaagctactacgctgagctaaactgctcgatctggccaaatggactagctagcatatatatatattttttttttggcaattagccgtgggtcaataggtccgtgtggtgcgagctaatataagccggttgccgatcgtcggctagctcagttttagacgagatgaggaacggctgtgtctgggctttattggctctcgggatgtgcctggtggccaccagggtcgctggagagaccatgatcgaggtggacgaaaatggcgatgagtacgagctgaagcgattctatattcagggtcgccaattgaagggcgatggcagtcagtcgcagtgtgtggtcacgagaaggaagcgttcgggtcgtgcagcaggatctggatcaggatcaggatcggcagctctgtcggttagttcgcaacccctgaaggtggagagtctgccggcgaaggaacatcgtgagggaggagctgttctgcaggaggtggagagcaatagcaatagcaatagacgttatgtcgccctcactggagtccacttggagtcgcctctgccccagggtgatgtgcagaacgatgacaacgacgatgacgacgaggaggacgatgatggcgacgatcagtcttccagaaatcagtccaactttgtgcccgctgccttggctttgcccctgcaaagccagtccactgctgcccatctgaatcagggagtcagtgtggtcgccaatgcagccagtcatgccaatgtggccgaggatgctggcatcgtggtggtccaatcgcatcagccgcccaaagtcaatcccgatacccatgccgtcttcgagctgaagcccgttcaatcggatgttgttcaccagtcagccggcgttagcttctatccgttcgttcagccttgggaggtggtggaccagcatgaggatgatgactacgatgaggacgactatgacgaagaggactacgatgatttttactacggcggcggcaatggctactacagagatcagcccggctttaatggcctgggtgttttcgaggaggagatcatcagcgaggaccagcccgtctctacgatagccagttgggtaaccggtgatgatgacagcgatattcttcccgctgtcaataagcggcccaatcagaagaacaagaacaagaagaaccagaaacagaaacagaaacagaagaacaagaatcagcaacagaagaacaagcgacagcagcagaagaaacgcaagcaacaggctcaagatgacgagcagcctgcgaagcaaaagaaaaagccgcagcagcaggataaagatcagaaaaagaagcaggataaggatcaaaagaagaagaagccagaggagaatccaaatcagcaggagatggaacagcttactcccgtggaagtgatcaagaagccagtggctatggaacaatcagccgttgcttcttcggccacaagtagcagcaatgtcgctgcatcctccagcagtgtttcatcatcgggtagcaattcttcggacaagaagaagaacaagaagaagaagaagaagcctagcagcagcagcagcagcagtcttagccagcgcaggaccaagaagaagaagaagcagtcgagcagcagcagcagcagcagcagcagcatcatcagcagcagcaacaagcgtcgccgacccagcagcagttcctccattggtggctaccgtcgccgtcgtccgcagcagcagcagttgcagcagcaacgtcgccgcaaaacgcaacagcagcaaaagcgccgtcgccagcagcaacagcagaagagacgccgccagcagcagcaacaacaacgccgccgattgcgcaacaagaatcgtcaattctacggcgacgagcccatcatcaactgcatttacatcaacaaggatccagtgacgaccaccaccacgccgcgtcccttctggaatatcctgggtcgccaatcggattcgaagcccagtgcggaatccactgttgtctcttccgaagaatcccaaacggatcccgtcgcccagcaggcggttcttcaggccgttcgtcgcaactttggcgaattcggcggacgaaagcgcaccaatttgcgtttcgtgtcctagatgaccattccccataagtcctcaattttttttttgcctatttatttatttattgtaatgaaaaccatcaatttttttttttttgtatgattgaacgcgttgaaagtttaattttagagagccgtcttgtgtgtggacaacttatttggggggcgttgcatttgggtttattgatttctgcccacaggagggtggctggcggcattgcaggaatggctggtcgcaggacaggtcagaagagaaaagaacaggtgtgtaacctgaatctgtcgccccgtgaaaaccatcagctgcactgtgccaaatttcgtaaataaagcagatgaagctttgctgaaaaaattagctgatttgttgcatacacggaatttatgtttggaaaacaatcaccattatgctaccgtcttgaaatatttctttcacattctcgtacaggccatcaactttcttcgagtgtaaaagcctcctctgttggttacattttgtccaggacaaagttgaaatcacccccgagaggagaaacgagaatcgagaagcgagaagcgggacgcagaaactccggatatatgcctcactgcacaggccaaacaattccggggcaaaggaccggcgaaaagggttgcggaccagggcacgttttatgtcttccgccagtagatggcgctctctctttcaactcaaatcgcgcaacacactgtcccaaaaaaaaaagaacacactttgtgtctcattttaaagaataggtgatcttaaaatttatcttgaaaataatgtaaaactgttacgcaagagttcatctagttcttgaagtagttaatcccacttgttggtcgtaattttctgtcagtgcctaaatgtgagcactcatagtgactcattgcgatactttggatcgatatttccgtgtccagcagcagcagccaggcagctgtgcttttacatatatacagacatatacaatacatatctatatatgtatatatatatatgtatgtatatt

SEQ ID NO: 6725 - DNA, 1931 bp, DROSOPHILA
tgaggaacggctgtgtctgggctttattggctctcgggatgtgcctggtggccaccagggtcgctggagagaccatgatcgaggtggacgaaaatggcgatgagtacgagctgaagcgattctatattcagggtcgccaattgaagggcgatggcagtcagtcgcagtgtgtggtcacgagaaggaagcgttcgggtcgtgcagcaggatctggatcaggatcaggatcggcagctctgtcggttagttcgcaacccctgaaggtggagagtctgccggcgaaggaacatcgtgagggaggagctgttctgcaggaggtggagagcaatagcaatagcaatagacgttatgtcgccctcactggagtccacttggagtcgcctctgccccagggtgatgtgcagaacgatgacaacgacgatgacgacgaggaggacgatgatggcgacgatcagtcttccagaaatcagtccaactttgtgcccgctgccttggctttgcccctgcaaagccagtccactgctgcccatctgaatcagggagtcagtgtggtcgccaatgcagccagtcatgccaatgtggccgaggatgctggcatcgtggtggtccaatcgcatcagccgcccaaagtcaatcccgatacccatgccgtcttcgagctgaagcccgttcaatcggatgttgttcaccagtcagccggcgttagcttctatccgttcgttcagccttgggaggtggtggaccagcatgaggatgatgactacgatgaggacgactatgacgaagaggactacgatgatttttactacggcggcggcaatggctactacagagatcagcccggctttaatggcctgggtgttttcgaggaggagatcatcagcgaggaccagcccgtctctacgatagccagttgggtaaccggtgatgatgacagcgatattcttcccgctgtcaataagcggcccaatcagaagaacaagaacaagaagaaccagaaacagaaacagaaacagaagaacaagaatcagcaacagaagaacaagcgacagcagcagaagaaacgcaagcaacaggctcaagatgacgagcagcctgcgaagcaaaagaaaaagccgcagcagcaggataaagatcagaaaaagaagcaggataaggatcaaaagaagaagaagccagaggagaatccaaatcagcaggagatggaacagcttactcccgtggaagtgatcaagaagccagtggctatggaacaatcagccgttgcttcttcggccacaagtagcagcaatgtcgctgcatcctccagcagtgtttcatcatcgggtagcaattcttcggacaagaagaagaacaagaagaagaagaagaagcctagcagcagcagcagcagcagtcttagccagcgcaggaccaagaagaagaagaagcagtcgagcagcagcagcagcagcagcagcagcatcatcagcagcagcaacaagcgtcgccgacccagcagcagttcctccattggtggctaccgtcgccgtcgtccgcagcagcagcagttgcagcagcaacgtcgccgcaaaacgcaacagcagcaaaagcgccgtcgccagcagcaacagcagaagagacgccgccagcagcagcaacaacaacgccgccgattgcgcaacaagaatcgtcaattctacggcgacgagcccatcatcaactgcatttacatcaacaaggatccagtgacgaccaccaccacgccgcgtcccttctggaatatcctgggtcgccaatcggattcgaagcccagtgcggaatccactgttgtctcttccgaagaatcccaaacggatcccgtcgcccagcaggcggttcttcaggccgttcgtcgcaactttggcgaattcggcggacgaaagcgcaccaatttgcgtttcgtgtcctag

SEQ ID NO: 6726 - protein, 630 aa, DROSOPHILA
MCLVATRVAGETMIEVDENGDEYELKRFYIQGRQLKGDGSQSQCVVTRRKRSGRAAGSGSGSGSAALSVSSQPLKVESLPAKEHREGGAVLQEVESNSNSNRRYVALTGVHLESPLPQGDVQNDDNDDDDEEDDDGDDQSSRNQSNFVPAALALPLQSQSTAAHLNQGVSVVANAASHANVAEDAGIVVVQSHQPPKVNPDTHAVFELKPVQSDVVHQSAGVSFYPFVQPWEVVDQHEDDDYDEDDYDEEDYDDFYYGGGNGYYRDQPGFNGLGVFEEEIISEDQPVSTIASWVTGDDDSDILPAVNKRPNQKNKNKKNQKQKQKQKNKNQQQKNKRQQQKKRKQQAQDDEQPAKQKKKPQQQDKDQKKKQDKDQKKKKPEENPNQQEMEQLTPVEVIKKPVAMEQSAVASSATSSSNVAASSSSVSSSGSNSSDKKKNKKKKKKPSSSSSSSLSQRRTKKKKKQSSSSSSSSSSIISSSNKRRRPSSSSSIGGYRRRRPQQQQLQQQRRRKTQQQQKRRRQQQQQKRRRQQQQQQRRRLRNKNRQFYGDEPIINCIYINKDPVTTTTTPRPFWNILGRQSDSKPSAESTVVSSEESQTDPVAQQAVLQAVRRNFGEFGGRKRTNLRFVS

SEQ ID NO: 6727 - DNA, 3740 bp, DROSOPHILA
agaggacgaggcgtgggtatcgattaacgatacttcgtaatttcaagcagctgatatcgattggacgacagggctggacctcacaaataaatataaaaccaaaatattcagtggtttctcaatttgaagaataatacaaacggaaaatgtctgccctgcgccgtgatgtgtcgcctttaatccagcgcattcgggccttcctcctgggtgtgagtatccgacatttggacagcgaccgcagagaactcggttctcagttatataagacggaaaatgtgaatctctgattaatctggacgccaattacagcgggagcacaacctggccctgcgcttcgaggacggactggccgatcgcacccagccacagccggaaatccctgacggtccatcgcatctactctcggccaactactactgccagcgggatggacgtcgcgaggttctgccgcccatcgacctggtggagcagcagaagcagctggcggcagagggggaagcggcgaaggccccgtcttccaagctgcccactcccggcaaggtctatgcctgggattaatgggccgcatcaccgcgggaatcgcctttttttgagttgtagtacgagccggttaaagctaatatagaatcaaattgaagcagaaatgcgtgcattggtatgttcagtgatgaagggccaagtgaaaggccccttaccagcccacaatgtttcgaaaccccacttccgggaaaaatcaccatccatttttttttgagttgtagtacgagccggttaaagctaatatagaatcaaattgaagcaggaatgcgggcattggtatgtccagttatggggggccaagtgagaaccccttaccagtccacattatttccaaatcacactcgccggaaaaaacaccatccatcactggatatcattatgtacaagtattttattcaaatatttacagagcccatcacttacaactagttaaaaaaaaaaaatcacaatccaggaacacctaatagacgcgcggcttgaggccacaattgattccggtggtcgagcgcaggataacgttcagtacgggctggacttcttcgcccagaggcagcaactcaaagtgtctcaccattttgctgatggtgctcttcatctcgagcattgcgaacttttggccgatgcagtttctcggacccgctgagaagggagtataggcgaatggactgatctcgcccttgcgctccatgctgaaacgatcagggatgaacttctccggatcagggaagtagtctggatcgcgctgagcatggtaaataagaatgatcacattcgagtcggcgggtatcaatttgccgtcgagtacggtgtcctgggaaatgtagcgtccaatgatcggcaccgagggaaacaggcgcagagactcctttatcacgcactctaagtacttgagctcgccgagtagcttcatagtaactggagccgacttgtcatcaccgataacatctctgacctcctggaagacgcgagcctgaacctcaggatgtcgagccagcaaataacaggtaaaagcaatgctactggtcgtagtgtcatgaccctcgaacatgaaggtgtctacctcctcgcggatgtcgtcgttgctcaacggagccccatcgatggtggacttcagcagcacatcaagaagagccatacgacgcttctggcccacatcgttcaagagggcagcgtcggcatctcctccatcggcaatggctttttgtaggagctcgcgtcgctcagtgattaccgagttggtaaagtcgtgcatgttcttcacggcatcattcagcttgtctagcaatttgggatagaagagcttcatggtgaaatccaagcgctgcaagggattcatgaagcgttcggctaacattgcagaggcactaaaaagatgtgctcatatggaataaagtccgccgatagttaatataggttataatacttacgttgtgaccgactgaacgtaggtaaattgcggctggagctgagcattaatttttacacccatggccgtttccgcaatgatatccatggcacacaagcaagccaccgggaacatgtttatcaccgtcttgccgtctgcccgatcgtaaagcttctggaccatagttgcgctctgttggtcaaagacctccacaaagtcctcgaggatcttaaagtggaatgcgggtgtaatgatcttcctgcggcggaaccacttctttccttggctaatgagcagtccatcgccgagccaatttaccagcagactataaagattgtttttttgaatggtctgttggctgctcatgatcgcctcgatcattttggaatcagcggtcatgaagccactttcgcccaacatctgcgtttttatgtttttaccaaactcagcaatcagtcggaactgcatatcaaagatagctgcaagagaagagggttgatatttgtttagccatcttgtgattttaaaaacaacgattttaagatcaaactgtttccaaaactgaactgtgaaagaacgcagtcttgggaatatgttctgttgtaactgtgtgattagcgtacatgacttactcttgggtgactcgttaatcaacaagggagcgtttccaaccagaggatagctcttgggtcctcgtatcccagcctcggcgtacatcttgttgtgccgcctctttcgcatataatcccacgccaaagcggtcgccaggagaatcgcaaagagctctagatacatgttttttgggtttcggttttccgggttggtaatgggatggatctattaacactggcaccgttggccatcgactgcttgtttttcctcgtcggtggggctgttttgtagccggcgtggtttgcgataaggcgtccacaatcagtggaatgaagccgaaaaccaatgcgaaggccaaaaactatgaccgaggtcaaaaccaggcggtgtgtcgtccgtgggctctccttgcctccaactgccatgtcagttagatttctaagcaggttatgtgatctgcatgaggatcttggagatccgttggcgcacattctgcgatgaacgaaaacggaaaaagtgcctcttcatcgtgacccaaggctttgggccgatcggaagttcagattgataaggcccacacaggtgggcggttgcgggatttaggcggggcctgggaaagttcgcatggcgctatctgtatattgatacatgaaccactctggttctgctgattagatcgaacgcttttgttggacttttggaactaaaaaaggaaatatttaaatagataataagcccacaaatttaatagactctggaaattatgctgagataattgtttattattattgatttcaaattgatcttctaaattcgattctacttacaagctgaaaactatgcagcacaatatgcacagcattaaactgccgttgatcccagctctcttaaatctacaaagttagatggaaaactcagagcatcgctgggaagctgttccatccataacaggtcaaactagaaaaatctatatagtgtacctctcgaaccgacaagcgggtacaaatgtgattgatattaaacttgtacacataatatctgagttattatatcaaatcgatggtttcattgatgacttcaactaactatttattcaaattgttaacagatattttgagttgatatctttatggcttgtccactgcagtatgagatccaatgtttacctccaatctaagggtaa

SEQ ID NO: 6728 - DNA, 1524 bp, DROSOPHILA
atgtatctagagctctttgcgattctcctggcgaccgctttggcgtgggattatatgcgaaagaggcggcacaacaagatgtacgccgaggctgggatacgaggacccaagagctatcctctggttggaaacgctcccttgttgattaacgagtcacccaagactatctttgatatgcagttccgactgattgctgagtttggtaaaaacataaaaacgcagatgttgggcgaaagtggcttcatgaccgctgattccaaaatgatcgaggcgatcatgagcagccaacagaccattcaaaaaaacaatctttatagtctgctggtaaattggctcggcgatggactgctcattagccaaggaaagaagtggttccgccgcaggaagatcattacacccgcattccactttaagatcctcgaggactttgtggaggtctttgaccaacagagcgcaactatggtccagaagctttacgatcgggcagacggcaagacggtgataaacatgttcccggtggcttgcttgtgtgccatggatatcattgcggaaacggccatgggtgtaaaaattaatgctcagctccagccgcaatttacctacgttcagtcggtcacaactgcctctgcaatgttagccgaacgcttcatgaatcccttgcagcgcttggatttcaccatgaagctcttctatcccaaattgctagacaagctgaatgatgccgtgaagaacatgcacgactttaccaactcggtaatcactgagcgacgcgagctcctacaaaaagccattgccgatggaggagatgccgacgctgccctcttgaacgatgtgggccagaagcgtcgtatggctcttcttgatgtgctgctgaagtccaccatcgatggggctccgttgagcaacgacgacatccgcgaggaggtagacaccttcatgttcgagggtcatgacactacgaccagtagcattgcttttacctgttatttgctggctcgacatcctgaggttcaggctcgcgtcttccaggaggtcagagatgttatcggtgatgacaagtcggctccagttactatgaagctactcggcgagctcaagtacttagagtgcgtgataaaggagtctctgcgcctgtttccctcggtgccgatcattggacgctacatttcccaggacaccgtactcgacggcaaattgatacccgccgactcgaatgtgatcattcttatttaccatgctcagcgcgatccagactacttccctgatccggagaagttcatccctgatcgtttcagcatggagcgcaagggcgagatcagtccattcgcctatactcccttctcagcgggtccgagaaactgcatcggccaaaagttcgcaatgctcgagatgaagagcaccatcagcaaaatggtgagacactttgagttgctgcctctgggcgaagaagtccagcccgtactgaacgttatcctgcgctcgaccaccggaatcaattgtggcctcaagccgcgcgtctattag

SEQ ID NO: 6729 - protein, 507 aa, DROSOPHILA
MYLELFAILLATALAWDYMRKRRHNKMYAEAGIRGPKSYPLVGNAPLLINESPKTIFDMQFRLIAEFGKNIKTQMLGESGFMTADSKMIEAIMSSQQTIQKNNLYSLLVNWLGDGLLISQGKKWFRRRKIITPAFHFKILEDFVEVFDQQSATMVQKLYDRADGKTVINMFPVACLCAMDIIAETAMGVKINAQLQPQFTYVQSVTTASAMLAERFMNPLQRLDFTMKLFYPKLLDKLNDAVKNMHDFTNSVITERRELLQKAIADGGDADAALLNDVGQKRRMALLDVLLKSTIDGAPLSNDDIREEVDTFMFEGHDTTTSSIAFTCYLLARHPEVQARVFQEVRDVIGDDKSAPVTMKLLGELKYLECVIKESLRLFPSVPIIGRYISQDTVLDGKLIPADSNVIILIYHAQRDPDYFPDPEKFIPDRFSMERKGEISPFAYTPFSAGPRNCIGQKFAMLEMKSTISKMVRHFELLPLGEEVQPVLNVILRSTTGINCGLKPRVY

SEQ ID NO: 6730 - DNA, 4292 bp, DROSOPHILA
tatattggcgtattttacaatatgactaggcaaattttaaatttcagatacatatacttgtcatattctactgtcatagctgtaataactgtcactgaattactatctttttaatatttaatttgttgttttcgcagatttgtttatttgtcttgagcacctctctttcgctctctcattctcccgcgttttaaatttgttttgttttggcgcgcaaattttcgaaatgagatgttcgaaaatcagatgggcagcgctgccagcgtcgctgtttgtcgttgttgcgttttgcgttgttgggatttaagtgttttaaaccatttttttttgcgatttcgcacctgattttggacgttaatgagcagctgggagtgggcgaatgcgtccgcgttcatcactaagttgcacagcaggaaccacagaaacgcgcgactgtgcttgaaaaagtgatttttactgacgacgcgaccgcagcaattgccgtgcgctggtgttcgagtgcggctgagtgccttaagatgcgccattcgccagcggacctgcgcctgccttgccgcatttgcggcagtttcgatgctctggtgtgggtgctcctcctttaagatcattgcgatccgacaacttttaaataaaatcacaagaaagcacaacgaaccactcgcgtcgacgaacgaaaaataactggcagaaaatggtgaaactgactgaaacgtgacttttcgaaatcagctgacaggtgtgaccgtgcggtaatcccaaagggtgctgccaaccttctcgaacaggagcctacgaatttcgattgtagaaaatataccaacccaatatagctgcattacactggcacacatatctatatctatagaataaatagactacattcattttcatttagtatttaaatattcatattggaatttccactgcatacgttcacaccagccgcacagctgatgcctgtactatgcactaaaatttcccaaaacgcgttgcctcgccgtcgcttgtgacgtgttgtttttttgtaaaatatgtttttcagctgctaaaacggacatagattgttgaaaatccactgaaactaactcagaaggacgggctaaagacggactatataatgctgaccctgcgggagcgccaaatcagtgagaaactatgaaaacaatgcccccattgaagggaaaacctaattaatggattttcatattaatcattgcagatgccattaagcagatgcttaatttgaactcgcagcagccgaaagccctagctgccgagcccgtgtggaagatccttatctacgatcgcgttggccaggacatcatatcgcccattatttccatcaaggagctgcgcgagttgggcgtgacgctgcatgtgtaagttgtgcgagatcctccaggaatccagaaattatagctttggttaacctccaggcaactgcactcggatcgcgactccattccggatgtgccggctatatacttctgcctgcccaccgacgagaatttggacaggattcagcaggacttctcgagcggactgtacgacgtgtaccacctgaacttcctagctcccataacgcgcagcaaaatcgagaatctggccgccgcagccctgcatgccggctgcgtggccaacatccatcgcgtttacgaccagtatgtgaacttcatcagtctggaggatgacttcttcatcctaaagcaccagcagagcgatcagctttcatactacgccatcaaccgggccaacacccgcgatgaagagatggaggccctgatggactccattgtagactcgctcttcgccctgtttgtgaccctgggcaatgtgcccatcatccgctgtccgcggaacagtgccgctgaaatggtggcacgcaagctggagaagaagctgcgcgagaacctttgggatgcgcgtgccaatttgttccacatggatgccacgcaagccggcggcggagtgttcagctttcagagacctgtgctcctgctgctggacaggaacatggatttagccacgccgctccatcacacctggtcgtatcaggcgcttgtgcacgatgtactggacttgggactgaatcttgtctacgtggaggacgagacggctagtgcgggcaagtaaaattacttttatcaaggcgctgaataactgagactcaccaactacgttttcctattctttaggagcccgcaaaaaacccaaggcctgtgacttggaccgcaacgaccgcttctggatgacgcacaagggcagtccatttcccacggtggccgaagccatccaggaggagctggaatcctatcggaactccgaggaggagatcaagcgcttgaagacatcgatgggtatcgagggcgagtcggacattgcattctctttggtcaatgacacaacggccaggctcaccaatgccgtcaattcgctgccccaactgatggagaagaagcgactgatcgacatgcacaccaagatcgccactgcaatcctgaacttcattaaggctcgacgactggattcgttttttgagatcgaggagaaggtcatgtcgaagcagacactggacagaccgctgctggacctactgcgagatggagagtttggtcaggcggaggacaagctgcgcctgtatatcatctactttatctgcgcccagcagttacccgaatcggagcaggagcggctcaaggaggcgctgcaggctgccggttgtgacctaactgcccttgcgtacgtgcaacgatggaagggaatcatgaaccgctcgccgagcattagccaagccacacagtacgagggtggcggcaccaagactgtgtccatgttcactaaactcgtctcacagggcagctccttcgtgatggagggcgtcaagaatctggtggtcaagcgacatgtgagtttctctttccaaattcaaattcaagttctatatcaaaattgtttgcagaatcttccggtgaccaagatcaccgagcaggtgatggagtgccgcagcaatgcggagacggatgactacctttatctggatccaaagctgctcaaaggtggcgaggtcctgcccaaaaatcgtgctccattccaggacgccgtggtgttcatggtcggcggaggcaactacatcgagtaccagaacctggtggacttcatcaaacagaagcaaacgtccaatgtgcaacggcgcatcatttatggcgcttccacgctgaccaacgcgaggcagttcctcaaggagctctccgccctgggcggcgagatccagtcgccgacggcgacgagttaggagcggctgctccgattccattgctgctgagcggagtggaccgggttttggttgcatgtgcatgggtgtctgtgtggcttctttcgtttactttaagcatatccaaaaataaattaaatgccaggcaaaaaagagaagcaagcgaacgcaacggcagagccagagctcagcactcggcaattactccaacctgacgcttaatccccgaaggacaacaagcaaaaacatgcgtagcctcgtgtacaacaagcccagggagctggtgccagagctgctggaatgggagcttggcggcgggcaggggtactcgcattctaggcacccattaacaccaacttggcaacgctttgatggacagctgacagacaaccagtcaacggctgaggcgatgatggcccagccatcccgatgcccgctgccttcggcggcggtgccacaattatggggcgacaactatgcgcggcacttggggacaggcgcagaagctggcagggacagcacccagcaattagcactatccctggccaactatgaatggatcgaggcgaggcaagtcgctgtcgatggcatagccagcgcactggagcactaggcgcattttttcgaagcactgcagctctgattgaatgtcgcttccttgggagacgggcaggcagcctggcagccaggcaggccaagtccatcaaagaagagcgttaaattatccctgaaagcccatctttggtttgaattggtgttgcaagaaaagatgatgtaaatgaaaattctaacaagtaggaaaaagaagtggcaggaaaaggaatgttttaagaaccttattaaccgataccaaattatagaaatcaattgtaaaaacaacgatagagaatgtttatagaattgattctacagattggccaatgtagtaaagtaataaaatctctaagattttcctcaatttaatggcatttgaccagcgaaatgctgaaattttccccatgaaatgaaaaagctcgaactg

SEQ ID NO: 6731 - DNA, 2085 bp, DROSOPHILA
tcgcttgtgacgtgttgtttttttgtaaaatatgtttttcagctgctaaaacggacatagattgttgaaaatccactgaaactaactcagaaggacgggctaaagacggactatataatgctgaccctgcgggagcgccaaatcaatgccattaagcagatgcttaatttgaactcgcagcagccgaaagccctagctgccgagcccgtgtggaagatccttatctacgatcgcgttggccaggacatcatatcgcccattatttccatcaaggagctgcgcgagttgggcgtgacgctgcatgtgcaactgcactcggatcgcgactccattccggatgtgccggctatatacttctgcctgcccaccgacgagaatttggacaggattcagcaggacttctcgagcggactgtacgacgtgtaccacctgaacttcctagctcccataacgcgcagcaaaatcgagaatctggccgccgcagccctgcatgccggctgcgtggccaacatccatcgcgtttacgaccagtatgtgaacttcatcagtctggaggatgacttcttcatcctaaagcaccagcagagcgatcagctttcatactacgccatcaaccgggccaacacccgcgatgaagagatggaggccctgatggactccattgtagactcgctcttcgccctgtttgtgaccctgggcaatgtgcccatcatccgctgtccgcggaacagtgccgctgaaatggtggcacgcaagctggagaagaagctgcgcgagaacctttgggatgcgcgtgccaatttgttccacatggatgccacgcaagccggcggcggagtgttcagctttcagagacctgtgctcctgctgctggacaggaacatggatttagccacgccgctccatcacacctggtcgtatcaggcgcttgtgcacgatgtactggacttgggactgaatcttgtctacgtggaggacgagacggctagagcccgcaaaaaacccaaggcctgtgacttggaccgcaacgaccgcttctggatgacgcacaagggcagtccatttcccacggtggccgaagccatccaggaggagctggaatcctatcggaactccgaggaggagatcaagcgcttgaagacatcgatgggtatcgagggcgagtcggacattgcattctctttggtcaatgacacaacggccaggctcaccaatgccgtcaattcgctgccccaactgatggagaagaagcgactgatcgacatgcacaccaagatcgccactgcaatcctgaacttcattaaggctcgacgactggattcgttttttgagatcgaggagaaggtcatgtcgaagcagacactggacagaccgctgctggacctactgcgagatggagagtttggtcaggcggaggacaagctgcgcctgtatatcatctactttatctgcgcccagcagttacccgaatcggagcaggagcggctcaaggaggcgctgcaggctgccggttgtgacctaactgcccttgcgtacgtgcaacgatggaagggaatcatgaaccgctcgccgagcattagccaagccacacagtacgagggtggcggcaccaagactgtgtccatgttcactaaactcgtctcacagggcagctccttcgtgatggagggcgtcaagaatctggtggtcaagcgacatgtgagtttctctttccaaattcaaattcaagttctatatcaaaattgtttgcagaatcttccggtgaccaagatcaccgagcaggtgatggagtgccgcagcaatgcggagacggatgactacctttatctggatccaaagctgctcaaaggtggcgaggtcctgcccaaaaatcgtgctccattccaggacgccgtggtgttcatggtcggcggaggcaactacatcgagtaccagaacctggtggacttcatcaaacagaagcaaacgtccaatgtgcaacggcgcatcatttatggcgcttccacgctgaccaacgcgaggcagttcctcaaggagctctccgccctgggcggcgagatccagtcgccgacggcgacgagttag

SEQ ID NO: 6732 - protein, 641 aa, DROSOPHILA
MLNLNSQQPKALAAEPVWKILIYDRVGQDIISPIISIKELRELGVTLHVQLHSDRDSIPDVPAIYFCLPTDENLDRIQQDFSSGLYDVYHLNFLAPITRSKIENLAAAALHAGCVANIHRVYDQYVNFISLEDDFFILKHQQSDQLSYYAINRANTRDEEMEALMDSIVDSLFALFVTLGNVPIIRCPRNSAAEMVARKLEKKLRENLWDARANLFHMDATQAGGGVFSFQRPVLLLLDRNMDLATPLHHTWSYQALVHDVLDLGLNLVYVEDETARARKKPKACDLDRNDRFWMTHKGSPFPTVAEAIQEELESYRNSEEEIKRLKTSMGIEGESDIAFSLVNDTTARLTNAVNSLPQLMEKKRLIDMHTKIATAILNFIKARRLDSFFEIEEKVMSKQTLDRPLLDLLRDGEFGQAEDKLRLYIIYFICAQQLPESEQERLKEALQAAGCDLTALAYVQRWKGIMNRSPSISQATQYEGGGTKTVSMFTKLVSQGSSFVMEGVKNLVVKRHVSFSFQIQIQVLYQNCLQNLPVTKITEQVMECRSNAETDDYLYLDPKLLKGGEVLPKNRAPFQDAVVFMVGGGNYIEYQNLVDFIKQKQTSNVQRRIIYGASTLTNARQFLKELSALGGEIQSPTATS

SEQ ID NO: 6733 - DNA, 6162 bp, DROSOPHILA
tcgttgaacagggacagcattgagggcgagccaatggcaatctgcggatctaggaggttgtggtgcagcgccacacacgagttgcccagaaagacatctagtggtagttggtagcgattctccttgtggtgcatccgcagccgctggtggtagtgcagccggtcgttgcgacggtccacggcgatcagcacctcgttgccagtgcgcacattgttggcacactccttgaacaccagcgtggcggccgtgcccttgtcgaacttggcctgccgcttgtgctgctccagcactgggcgcagatcggcattggtcaccgtatcggcgccgagcagaatgaagtggccacggatcagcgccttattgtccaaatcacgcatggcatcgccgaagcagcgacaaccctcgccgccaatcacatggacggtcatcttgaatgaccaggctgcgtccgtggcaatgccggccctgcaaaaaacgcgaatcgagcgtttagcacccataattgcatcatcctgccagctgccgcaactgaacccacctgatgtgctcccggatgctcgagcgatagaggctggtgtacacgaacacctcctccacgccgctgcggttcagcgccatgagagcgtagtcaagcatccgcacgttgaccagcggcagcagggcctgcaaagaatccaacggtcgacagtcaatggatattcacctattccagtggcgctcactcaccgtagagccctcgtcggagaggggcttgaagttccacacattgttgtcggcgatcagcaccgcctgaacgatctccttctcgaattgggccatcttctcgcgttgcaacccagtagtttccccaaaaattcaactcgtttgctggccactggagcgattgcggcacgcggtatgcggtatgtaatggcacttgcaggctggtcacacgcttagtcgggtcgccaaccaattctgattggactcgctcgaacgccgcatttcgtagcattgccacactggtcacaccgcgaaaacggctacaagagtcgcccggaaaataattggaaataaataatgatcgcagcgcggtaattagcacgcgtgccactctgtctgtgctgtgtgtactaacacccacctctcccgcgccccatcagccggccgagcctagtaagatcgcgctggattgccaataattgtcatcgcattgccgatgaataagtgcccctgggcgcgagtgtgtgcgtgtgcgtgtgtgtgcgatacacccaccttgatggaggcaacaacaacaacaacacagcaagcgagaaaacaaacaaacggctgcgataagcactgaacacgattccacaactcaactgctcttccgccacggtcgcgctgcccaagagcagggtcaccccccggccagttgcagtgacgccctcgccaccagaaaccaagcagccagctcccagtccagcgaagacccgaagaattcccattcgcaggcgaccccgcagcagacgaagacaagtcactgggcgttcgcgccaactataaatagaaaagagcaacgacgcaaacaagcaaactgtccatacagcccatatccatatctacacgcacatttatcgacgcagaagaaaaacccctcaagtactgcccttcattcagcgattagcgcagccatctcttcgcaaacaggcggcggaggagaatccgacttggcggggaaagcgaagcgcactcgaaaaccctatcagtactcagaatccggagacaaatggacacgttgagcgaggcagtggccaatggaaccgcgactgcggccaccaggacgaccaaggacattgtcaaggagcgcttcaaggaggacgagaccatagaatacgtaagcaatcatcagatctggcgaatcaaagcaggcgaaggtttagaaaggagtgttggtcaatcatgattgacttttaaagtataatgacgaatattagcaggaaacatgctaaatacactaaaatgatgattaattatcgctaacaagtaaccttacgcctaaatcacactcacgtcttcgctcagaaaaaaacctaaaacggctgctattaaacaatcctttgcttatagatattcgaggcgtatcagatcaaaggaccagagtactccaaccgtcttctggccctggtttcatcgcagtcgggcggcacgtttgccatcatcgcgttctcctacttgcgcactccattgtcctccgcgaacgagctgatcatcaacaaggtgttcgcaatcgaccacaatttccagttgcgacagggtgagatgaagggtgcatgttcatcacacagcttgactatgctagccaaacaaattgcccagtaactgtttgtcaagtagtcacaaaaccaataagtttgcgctcattattggccataacagattacgactgcatttacttatgataatattggtatctcaaatagtttcagctgagatgaaagcaaactaattagtgaaagctcgctctttttcatatatcattttccaaattttttgcagacagcaagagctcgatcaccacgcaacagtttgacctgtccacagccgaggatggccccatcaagtactactactacgccacggagagccaccactacgaggagtttgtggccaaggtgatttccttcaagagcaccatggcgcagcatgatcccgagacggtgcttaacttcaggtggctgaatgactaccggcaaatcggagaagtgaagcaggagctgaagaagcgggagagcgagtacattgtctacaaggacataatgtgagatggaaaatgccctgtcaagcaagagttctcacgcacatttattcaatccttgcagcatctactgcgccacttggaatgtgaacaacaagacctgcagcgacagcaacaatccactgcgagcctggctggcttgcagtgagaagccgccggatatctacgcgattggactgcaggagctagatactcccacaaaggctatgttgaactccacccaggtgcaggccatcgagaagcaatggatgtgagtgtgccacataagttatatagcctcgttaccgagagtctaagttggttctttctcccgcagcgataagatgatggacagcgtccaccctgacgtagagtacgaaatcctgatgtcgcaccgcctggtggccaccatgctgacggtcatcgtgcgcaagcagctgcggcagcacatcatacgctgccgaccaaagtcggtggcccgcggcatcttcaatacgctaggcaacaagggcggtgtcgccattagcctgcagctcaacgagggcaacatctgctttgtgaactcccacctggccgcccacatgggctacgtggaggagcggaatcaggactacaacgctatcgtggagggcatacgcttcgatgatggccgaacaatcagtgaccatgagtaagtttggggaagaaggcataagtataagtcagtattatttcactccatctctgtctttttctagtcacatcttctgggtcggcgatttgaattaccgcatccaggagccgcccggccaacagcgaccaggaccactgagcgatgcccagacatacgagctgctactgcagtacgaccagctacgtcaggagatgcggcgtggaaagtgctttgagggctacaccgagggcgagatcaagttccggccgacgtacaagtatgatccgggcacggacaactacgacagcagcgagaagcagcgggcgccggcctactgcgatcgagtgctctggaagggcacgcgcatcgagcagctggcctacaacagcatcatggagattcggcagagcgatcacaagcccgtgtacgccgtgttccaggtcaaggtcaagactcgcgatgaggtcaagtacaaacgggtgcaggaggaggtgctgaaggcagtggacaagcgggagaacgacaaccagccacagatcaatgtcgagaagacggtcatcgatttcgggactgtgcgatttaacgagccgagcacacgggacttcaacgtctataacaactgcccactacctgtggacttcagtttcaaagagaaggatatacacgccatctgcgagccatggctgcacgtcgatccgcgccaagactcgctgctgatcgactccgcccgaagcattcggctgaaaatgaacgccaatgtgcgcaccattgccggcttgcttcgcaagatccgtgctagcgacaacttcgatattctcatcctgcacgtggagaacgggcgtgacatcttcatcacggttacgggcgactatcagcccagttgctttggcctttccatggagacgatgtgccgcaccgaccgtccattaagcgagtattcccaagatcagattaagcaactcgtgagttcccttcatttttgtaattacgaagtttttctactgatcacgaaccacgtttcgttgcagatgaatgacgaatcaccggaataccgtgtgacgatgccccgggaattctttctgctgatcgactatctgtacaggcagggctccaagcaggtgggcgccttcccgtcctacgactcgcgtctctccctcggcgctcaatttaactcggtgcgcgattggttggacacctggtcggatgatccgttccgtaagtggactctattagattgccaccataatagttgtgaatattcccttacaatctacagctgccaacgcagagacggctgcgcaggcgctgctgcttttgctggatctgccggagcatgctctgctggagccggtggtcgagaatctgctggagtgcaccaacaagtcgcaggctatggactacatttcgctgttaagtccccccaagcgcaatgttttcatgcacctttgtatgttcctgcgcgcgggcatcgagagtcagttctatgatctgcatcaagtcggtaggtagagaagctccagcagcattgtaccaccatcgtaacgccattcctcccacacagcatccacctttggccgcattctgttgcgaagcaccgagcgtgccgcctggatggactaccacagccgatgcatacagttcatgcggctcttcatcgacaccgacgtcgaggcaatgggcaacggcaatgagggcgccggaactggaacaggctcgggatctgggacccgggcgggtctgcaggcatagtcgccgcagctgtgccgccgaatcggaagcgagcgatagatgtactactctgttgatagttacgcatagtgttaagctatttattttatttgttggtactttgttggcacttagcatttatatcttctctgttttaactgttaattgtttgtgcccgccctccgttcattccaactcggttgtccccgcctgcatcacaaatccatggagacacgcaaccagcaacgcaaagataaatgaattgtgtaaataagtaattcgtttagcacgattgtttgttagtttaaattaatgaagtgaccctcttacatccccgtttcagttgcaactgaaaataaataacaccgttacatacagtatcaatattctgaaaaatctctacattggctgttcacatatttggccacgcccgccaaaattttcaaaattaaaagacgcgctacggatttgtgagtacggatggtatcgattaaattcccaaagttatcgacagtgtaaccagatctaaagtggcgacttcagttgacggcagagacgacagcagaatgcaaaggcaacggattactcccaggatttaaatagcatagattatcgttgaaaccgctgacgacgcgcccagatgagctccatggactgcgccacgttcccaatgcatcctaaaatggacgagcaactggcccgaaccttcgtcatcaacgaggaggaggaggagaagcacattcagaaggtgcagaacgccttcctttactatgggtaattgttattgtttttgcgctgtgttctggagcacatgctccaaacggacgcttgccaaccgatcgtcgttgagggggggcggtgcggtgacagcgacatgtgcagacaagctgccgacaaactaccgtttcgtttggcgccagtgctggcggtgcaggagtaatcacgccaaatctggctagtgttttcaaatggctcaccgttccttagaagacgcatcttctaaagtatccaatagagccaa

SEQ ID NO: 6734 - DNA, 3306 bp, DROSOPHILA
actggtcacaccgcgaaaacggctacaagagtcgcccggaaaataattggaaataaataatgatcgcagcgcggtaattagcacgcgtgccactctgtctgtgctgtgtgtactaacacccacctctcccgcgccccatcagccggccgagcctagtaagatcgcgctggattgccaataattgtcatcgcattgccgatgaataagtgcccctgggcgcgagtgtgtgcgtgtgcgtgtgtgtgcgatacacccaccttgatggaggcaacaacaacaacaacacagcaagcgagaaaacaaacaaacggctgcgataagcactgaacacgattccacaactcaactgctcttccgccacggtcgcgctgcccaagagcagggtcaccccccggccagttgcagtgacgccctcgccaccagaaaccaagcagccagctcccagtccagcgaagacccgaagaattcccattcgcaggcgaccccgcagcagacgaagacaagtcactgggcgttcgcgccaactataaatagaaaagagcaacgacgcaaacaagcaaactgtccatacagcccatatccatatctacacgcacatttatcgacgcagaagaaaaacccctcaagtactgcccttcattcagcgattagcgcagccatctcttcgcaaacaggcggcggaggagaatccgacttggcggggaaagcgaagcgcactcgaaaaccctatcagtactcagaatccggagacaaatggacacgttgagcgaggcagtggccaatggaaccgcgactgcggccaccaggacgaccaaggacattgtcaaggagcgcttcaaggaggacgagaccatagaatacatattcgaggcgtatcagatcaaaggaccagagtactccaaccgtcttctggccctggtttcatcgcagtcgggcggcacgtttgccatcatcgcgttctcctacttgcgcactccattgtcctccgcgaacgagctgatcatcaacaaggtgttcgcaatcgaccacaatttccagttgcgacaggacagcaagagctcgatcaccacgcaacagtttgacctgtccacagccgaggatggccccatcaagtactactactacgccacggagagccaccactacgaggagtttgtggccaaggtgatttccttcaagagcaccatggcgcagcatgatcccgagacggtgcttaacttcaggtggctgaatgactaccggcaaatcggagaagtgaagcaggagctgaagaagcgggagagcgagtacattgtctacaaggacataatcatctactgcgccacttggaatgtgaacaacaagacctgcagcgacagcaacaatccactgcgagcctggctggcttgcagtgagaagccgccggatatctacgcgattggactgcaggagctagatactcccacaaaggctatgttgaactccacccaggtgcaggccatcgagaagcaatggatcgataagatgatggacagcgtccaccctgacgtagagtacgaaatcctgatgtcgcaccgcctggtggccaccatgctgacggtcatcgtgcgcaagcagctgcggcagcacatcatacgctgccgaccaaagtcggtggcccgcggcatcttcaatacgctaggcaacaagggcggtgtcgccattagcctgcagctcaacgagggcaacatctgctttgtgaactcccacctggccgcccacatgggctacgtggaggagcggaatcaggactacaacgctatcgtggagggcatacgcttcgatgatggccgaacaatcagtgaccatgatcacatcttctgggtcggcgatttgaattaccgcatccaggagccgcccggccaacagcgaccaggaccactgagcgatgcccagacatacgagctgctactgcagtacgaccagctacgtcaggagatgcggcgtggaaagtgctttgagggctacaccgagggcgagatcaagttccggccgacgtacaagtatgatccgggcacggacaactacgacagcagcgagaagcagcgggcgccggcctactgcgatcgagtgctctggaagggcacgcgcatcgagcagctggcctacaacagcatcatggagattcggcagagcgatcacaagcccgtgtacgccgtgttccaggtcaaggtcaagactcgcgatgaggtcaagtacaaacgggtgcaggaggaggtgctgaaggcagtggacaagcgggagaacgacaaccagccacagatcaatgtcgagaagacggtcatcgatttcgggactgtgcgatttaacgagccgagcacacgggacttcaacgtctataacaactgcccactacctgtggacttcagtttcaaagagaaggatatacacgccatctgcgagccatggctgcacgtcgatccgcgccaagactcgctgctgatcgactccgcccgaagcattcggctgaaaatgaacgccaatgtgcgcaccattgccggcttgcttcgcaagatccgtgctagcgacaacttcgatattctcatcctgcacgtggagaacgggcgtgacatcttcatcacggttacgggcgactatcagcccagttgctttggcctttccatggagacgatgtgccgcaccgaccgtccattaagcgagtattcccaagatcagattaagcaactcatgaatgacgaatcaccggaataccgtgtgacgatgccccgggaattctttctgctgatcgactatctgtacaggcagggctccaagcaggtgggcgccttcccgtcctacgactcgcgtctctccctcggcgctcaatttaactcggtgcgcgattggttggacacctggtcggatgatccgttccctgccaacgcagagacggctgcgcaggcgctgctgcttttgctggatctgccggagcatgctctgctggagccggtggtcgagaatctgctggagtgcaccaacaagtcgcaggctatggactacatttcgctgttaagtccccccaagcgcaatgttttcatgcacctttgtatgttcctgcgcgcgggcatcgagagtcagttctatgatctgcatcaagtcgcatccacctttggccgcattctgttgcgaagcaccgagcgtgccgcctggatggactaccacagccgatgcatacagttcatgcggctcttcatcgacaccgacgtcgaggcaatgggcaacggcaatgagggcgccggaactggaacaggctcgggatctgggacccgggcgggtctgcaggcatag

SEQ ID NO: 6735 - protein, 850 aa, DROSOPHILA
MDTLSEAVANGTATAATRTTKDIVKERFKEDETIEYIFEAYQIKGPEYSNRLLALVSSQSGGTFAIIAFSYLRTPLSSANELIINKVFAIDHNFQLRQDSKSSITTQQFDLSTAEDGPIKYYYYATESHHYEEFVAKVISFKSTMAQHDPETVLNFRWLNDYRQIGEVKQELKKRESEYIVYKDIIIYCATWNVNNKTCSDSNNPLRAWLACSEKPPDIYAIGLQELDTPTKAMLNSTQVQAIEKQWIDKMMDSVHPDVEYEILMSHRLVATMLTVIVRKQLRQHIIRCRPKSVARGIFNTLGNKGGVAISLQLNEGNICFVNSHLAAHMGYVEERNQDYNAIVEGIRFDDGRTISDHDHIFWVGDLNYRIQEPPGQQRPGPLSDAQTYELLLQYDQLRQEMRRGKCFEGYTEGEIKFRPTYKYDPGTDNYDSSEKQRAPAYCDRVLWKGTRIEQLAYNSIMEIRQSDHKPVYAVFQVKVKTRDEVKYKRVQEEVLKAVDKRENDNQPQINVEKTVIDFGTVRFNEPSTRDFNVYNNCPLPVDFSFKEKDIHAICEPWLHVDPRQDSLLIDSARSIRLKMNANVRTIAGLLRKIRASDNFDILILHVENGRDIFITVTGDYQPSCFGLSMETMCRTDRPLSEYSQDQIKQLMNDESPEYRVTMPREFFLLIDYLYRQGSKQVGAFPSYDSRLSLGAQFNSVRDWLDTWSDDPFPANAETAAQALLLLLDLPEHALLEPVVENLLECTNKSQAMDYISLLSPPKRNVFMHLCMFLRAGIESQFYDLHQVASTFGRILLRSTERAAWMDYHSRCIQFMRLFIDTDVEAMGNGNEGAGTGTGSGSGTRAGLQA

SEQ ID NO: 6736 - DNA, 3820 bp, DROSOPHILA
cagtgaacgtcatatcatgctcagttcgagatcgcccttcatctgccgtttgtatcgcaccttccgtgacgagaagtacgtgtatatgctgctcgaggcctgcatgggtggggagatatggacgatgctccgggatcgcggatccttcgaggacaacgcggcgcagttcatcatcgggtgtgtgctgcaggcgtttgaatacttgcatgcccgcgggatcatctatagagaccttaagccggagaacctgatgcttgatgagcgcggctacgtcaagatcgtggacttcggctttgccaagcagatcggaacgagctctaagacgtggaccttctgcggcaccccggagtacgtggcacccgagatcatcctgaacaagggtcacgatcgagccgtagactactgggctttgggcattctcattcatgaactgctcaacggaacgtacgtaactgacaccacctcttgatttttttgaactcccccaaataatggttgtttttcgcttgtaggccaccgttcagtgctccagatcccatgcagacgtacaatctcatcctgaagggcattgacatgatagcctttcccaagcacatctcccgctgggccgtgcagctcatcaagcgactgtgccgcgatgttccatcggagcgcctcggctaccagactggtggcatacaggacataaagaaacataagtgagtaaaacatatatgatagaaagatagctattgatgatgtgtttaaaccttaggtggttcctgggattcgactgggacggcttggccagccagctgctgattccgcccttcgtgagacccatcgcccatccgacggatgttcgctacttcgaccgctttccgtgcgatttgaacgagccaccggacgagctctccggctgggatgcggatttctaggcccattccgtcgacctccttgacttagtaattgatcactctttagttaaatataggttactttactgattttcctagaaacgtagaaagaaaggaacatggaaactatcttattgaagtttatacatttgggtggaaaaagtacacactagatttggaggccagcagctggcaaatttgggagcatcgttcgatcaggggcttgtagatcttatcgcagccaggtgttggttccgcagccagtttcaagccggaaggcacgtccctgaaaaactcgtcgaagctgagtctcgtcctacggcccgtgggcatcatgcaggaatggcaattgcaggcggactctcggtgttcgtagaaggcgtacctggcacgaaaggcgcatcctaaaaggctgacctcgacaccggttcgctggtaaacaggagcattgaatatgtccgccacgatctgcaggacactttgacacctggagtcctcacccaccacaattatctttgtgttcggtgtgtggtggaagcccatctcgtgggcaatggaccagtggtgcatgatctgaccctcgattagagcccgaacctcaatctccggtgtggagaagcggtgtaggccacgtatgcactccgccgacatcgggcttatgtgcgcatcccagcgcagagtgcccttggcagtgggtataatctcccggtcccggaagtgcacagctacattgccattgttgcccgatggcgtggcgtctagcatttcgtagaagtgcctccaactgccgccggcgacatcctcacagatggcttttcgcgtcaatcctccgttttggaagcataggaggcccatgtattcgtcccttcttgtcggatggcacatcacgtggccgtcctccagccgcggagctttctttagaggcatcactaccacatcacttgtatccagactgagcatgagaaagtcattctctaccagtagccctgccagttccgaggctttgctcccggtggaagcgaccaccatgcagtccggcctgaagttccagcgtttcacgtagtagtccccgatgcgtccttgcagccgggacgagggaatgggcttcatcaaacgcctggcaaggtcaggagcacaggcgtctaggcacgctgcagaccacttctttttccggatgtcgagcaggttcatccccgagccatcgctgtagtctatggaggcaatgcctccgataaggagagaggccaaaaagctgctgatcagcgaaatcctggaagttctctcgtactgctccgggcactgggtatacactttccgtatttggggacccgtgaatctggtgtacgctctggagcccgttattttcgacagttcagcgggacccccgacggtgtgctccatttcacggacctgcacgtccgtcgagctatcccgccaagtaggcgttctggtcaattcgaaggcgctctccgtgatctgctcgtggagccgcaggttaacgttcaaattgcatagacgcctcaagcccaactccgaccagaagacgcaaccgtgctgctgagcagctccggcaatagagaccaccgtgtgcatatccgctccctgtttcactaaacagtccatcagcatgtccagtgcctttacccacattaccggattggccaggaactcgccaggaccgccatctgatagtattccattcgttgtcttgaactctgggagatcaacgtcatagcggatctgcgccacataggtaacgttcaatttggagtcgaggatcagggcgcggaagagttgggtgcccaagtggaggcccaggtagctgttgccactgtagtcctgcttgatgcggtggcacatattccatcggtggagctgcaaccaaaattttgaaggaacgaaatttttttttataaaacttctaagttagacgggaaggacgaagcatgaaatacattgataaagaaatttgtagtgcttataggacaattttaagtcaagtttcgcaaatttttgccaatcctaactttttgtcatagaaaagtcattattattcgcataacattccaaaaaatgatcggagaaaacagtgatatgccttgttgaattcgtaataaaatttccaatcgaactgcattccaacttagaaattgtatttttttttaatttttcgccaaaaatcatgatgttatttccaaaatttcaaaaattggtaaaaaattttttttttatatcattcaaaaagttttttgggtggttagtttaggtcaatagctattcaaaacagtaagaattttggttgtgagacaattttaagcctagtttcgaaaaatgattgcaatgaaaatgtggcacttaagctaatactaactttttgtcatagaaaagtcattatttttcgcataacattccaaaaaatgatcggagaaaaaagtgatatgccttgttgaatttgtaataaaatttccaatcgaactgcattccaacttagaaattgtatttttttcaatttttcgccaaaaatcatgatgttacccctttccaaaatttcaaaaattggtaaaaaaatttttttttgatatcattcaaaaagttttttgggtggttagtttaggtcaatagctattcaaaacagtaagaattttggttgtgagacaattttaagcctagtttcgaaaaatgattgcaatgaaaatgtggcacttaagctaatactaactttttgtcatagaaaagtcattatttttcgcataacattccaaaaaatgatcggagaaaaaagtgatatgccttgttgaattcgtaataaactttccaatcgaactgcattccaacttagaaattgtatttttttccatttttcgccaaaaatcatgatgttacccctttccaaaatttcaaaatttgttaaaaaaaaatttttt

SEQ ID NO: 6737 - DNA, 1820 bp, DROSOPHILA
tagaagttttataaaaaaaaatttcgttccttcaaaattttggttgcagctccaccgatggaatatgtgccaccgcatcaagcaggactacagtggcaacagctacctgggcctccacttgggcacccaactcttccgcgccctgatcctcgactccaaattgaacgttacctatgtggcgcagatccgctatgacgttgatctcccagagttcaagacaacgaatggaatactatcagatggcggtcctggcgagttcctggccaatccggtaatgtgggtaaaggcactggacatgctgatggactgtttagtgaaacagggagcggatatgcacacggtggtctctattgccggagctgctcagcagcacggttgcgtcttctggtcggagttgggcttgaggcgtctatgcaatttgaacgttaacctgcggctccacgagcagatcacggagagcgccttcgaattgaccagaacgcctacttggcgggatagctcgacggacgtgcaggtccgtgaaatggagcacaccgtcgggggtcccgctgaactgtcgaaaataacgggctccagagcgtacaccagattcacgggtccccaaatacggaaagtgtatacccagtgcccggagcagtacgagagaacttccaggatttcgctgatcagcagctttttggcctctctccttatcggaggcattgcctccatagactacagcgatggctcggggatgaacctgctcgacatccggaaaaagaagtggtctgcagcgtgcctagacgcctgtgctcctgaccttgccaggcgtttgatgaagcccattccctcgtcccggctgcaaggacgcatcggggactactacgtgaaacgctggaacttcaggccggactgcatggtggtcgcttccaccgggagcaaagcctcggaactggcagggctactggtagagaatgactttctcatgctcagtctggatacaagtgatgtggtagtgatgcctctaaagaaagctccgcggctggaggacggccacgtgatgtgccatccgacaagaagggacgaatacatgggcctcctatgcttccaaaacggaggattgacgcgaaaagccatctgtgaggatgtcgccggcggcagttggaggcacttctacgaaatgctagacgccacgccatcgggcaacaatggcaatgtagctgtgcacttccgggaccgggagattatacccactgccaagggcactctgcgctgggatgcgcacataagcccgatgtcggcggagtgcatacgtggcctacaccgcttctccacaccggagattgaggttcgggctctaatcgagggtcagatcatgcaccactggtccattgcccacgagatgggcttccaccacacaccgaacacaaagataattgtggtgggtgaggactccaggtgtcaaagtgtcctgcagatcgtggcggacatattcaatgctcctgtttaccagcgaaccggtgtcgaggtcagccttttaggatgcgcctttcgtgccaggtacgccttctacgaacaccgagagtccgcctgcaattgccattcctgcatgatgcccacgggccgtaggacgagactcagcttcgacgagtttttcagggacgtgccttccggcttgaaactggctgcggaaccaacacctggctgcgataagatctacaagcccctgatcgaacgatgctcccaaatttgccagctgctggcctccaaatctagtgtgtactttttccacccaaatgtataaacttcaataagatagtttccatgttcctttctttcta

SEQ ID NO: 6738 - protein, 572 aa, DROSOPHILA
MCHRIKQDYSGNSYLGLHLGTQLFRALILDSKLNVTYVAQIRYDVDLPEFKTTNGILSDGGPGEFLANPVMWVKALDMLMDCLVKQGADMHTVVSIAGAAQQHGCVFWSELGLRRLCNLNVNLRLHEQITESAFELTRTPTWRDSSTDVQVREMEHTVGGPAELSKITGSRAYTRFTGPQIRKVYTQCPEQYERTSRISLISSFLASLLIGGIASIDYSDGSGMNLLDIRKKKWSAACLDACAPDLARRLMKPIPSSRLQGRIGDYYVKRWNFRPDCMVVASTGSKASELAGLLVENDFLMLSLDTSDVVVMPLKKAPRLEDGHVMCHPTRRDEYMGLLCFQNGGLTRKAICEDVAGGSWRHFYEMLDATPSGNNGNVAVHFRDREIIPTAKGTLRWDAHISPMSAECIRGLHRFSTPEIEVRALIEGQIMHHWSIAHEMGFHHTPNTKIIVVGEDSRCQSVLQIVADIFNAPVYQRTGVEVSLLGCAFRARYAFYEHRESACNCHSCMMPTGRRTRLSFDEFFRDVPSGLKLAAEPTPGCDKIYKPLIERCSQICQLLASKSSVYFFHPNV

SEQ ID NO: 6739 - DNA, 6999 bp, DROSOPHILA
aatgaaaatgccctgcaatgcggagacagttttcattgcattattgattcggctaagccaaaacactcagcctcgtgcaaacaaaaacgctgcgagttcgccgtggagtcgaaatatttccagcttaaaggttcattaaactggtttttgttcgcacaagagaccccgaaaaaaaaacagagagtggaggggcgcatattagcatatttctttggcttagaaatctcagacacggaatcttttcgattcgcttcacattccggcagtccaataaattgttctttagtattcttttttgtttgtatttacgcgtggggttattttttcgtgtttaacacacagttcttcacttttatcggattctccgttagccgcaatcacaaattcggtgcgtttttcttgccaattttccaggcgttttgcgaaccgcgatgccgccgacgtgtcagtttcgtttggagcgcgatcttcgactgccaacgcgactctcgatgggagcgccctcatctcgcaaacccgtcgagcaggtaaatccgatcgcagagcgcgacggagcgtaagccgcccagagattgcggcaggtgagcacagctgagctcaactgagagccagtgagagtgtgcgggagtgggaaactcagagagcgactcacacgatgggaattcgccgcacagtgggtagatggttcttcaaaatattaccatacataggttacaattagcagatatattttcactcgtcgaaaagtatgtaaattggggaaataagcattttcgaccctatatagtatatatattccagatcatattggtctccttgattaaactaaatttttgtataatatttctaaaactacatactccacatactacgcacatgagtttaacaatggaagaaccagtaagctgttcctatctaagattatggccaaaatatgtggtcccaagttagatgcccttataagtaactaagccacttatcatacacccccatatatcggttagtaagcgaactcgaactcacctggaactgtttcgccattgaaggtgatctgcaccgtgtgcgttccatgttcgtgcggcgtgaagctggctatgaacctctgacctcccagcgagcgcaccgaggaggtgacacgcccgccgttgaccaggatctccaaattgccggagcccgccctcgagccatcgatctcgaactcgacaggccgtccaatagagccattcggaatatcctgcactcgaatggccctggcaccagtggcattgccgtctatgggtcgaaatctggagagggagctgtatccatagcccggggaggggccatggccattgctctcggtaaccacatgctcgctggattccttaacggttttcgtatatccaccggacttgtccgtatacgtattgttcgaatgtgacttgactgtaatggcactgggtctgcgagataattaaatggttggtcatatttataatattttaataatattatgcagcacgttatcattgaactcacttgtagcgctctccatcatcgggggaatcccggcgatagtccgactgctgctgctgctgcttgtgcagggcgaacttgttgtattgggtgttccggtgcgtctcgtggtccaaatccgggcgattgtattgcagttccgtgttcagctgcttctcggtcatgttcgccagcgattcgagcgaattgtgcgagagcatgtgcttcgtcttgttgatgacgtcccagctgtcccgcctggcggaagccggcttcatcgaggacaccctcacattggaggaatggtcgatgcggggctcgggggatccggttcgacgcagtcgctcggcagttccgtaaagcgagggactggcacgaatattcgaatcggtgacgtagttcgaggtggacttgtaggtcgatgacttttctacggtacgtgacgactcgtaaccattctgaaaatcgatgaaaggattagtttaggagtttaaagggttttttttactgagagcgttttactccttaccttactaacgggactggttaagggacttcccatgcggtgagtggccgtagtgatataggcgctattgggagaataacgttgcacgggcgaaacggaggcgtgccgcggactgctggtgatattccgtgtggaactctcgtactgattggacgtcttgatggtcaacggactgtgggtgtgcacttcgcttgatcgagtctgtcgaaagtaaaaaaaactaggtttaccaactgatcgcaataagtgaatcacacaaagcaggcaagagttaatcgttggataaatttctttttgggataagcaaatcgaaacaacaaaaatttagttacattgagtgtgggactaggtattggactaagcgatctggtcagggtactggtggccagctgctggtggcgctgctggaagctgctgctgctgctggtattggtggtgctggtcagttcgcgctcctcgcgcggtggcgtcaacttgggcttggtcaccgcacgcctctgactgtacagctcgttctccttgtcgtagtagtagtcgttcttcgtggagctgctgttcgaggtcttcgaatcccgtcgcccgttcaaagtttccgtatacagatcagcggagtttaggtacttgaccgtgggggaaccactagctggtggtggagctggcggcggagtggcatggttctcctgtcgaaggtaggtttcagtgtgtgtgtgtttggggaccgaaccaaggatggaggagtggacatgttggtgtgtgtgtgtgtgtgttagccaaacattcaattttgatgggttcgggtgatgaggaagaggaatatcccatgccgcatgcctgctcccctgacttcaacttacctcgctctcccgcttatagtacctggaactcgaactgtggtagtcagtggtgtccaatttgggagagtactgcggtgaatagctgttggtcctctcggccgtgttgtgcctcgaaagcgaggagtttcggtaatcattgtgccgcgtgttcgtggtggagacaaagtgcatcgagggactctccgatcggtgtttgctgtcgtggagcggactgctgcgcgttttgccagatcttcctttggtgcccacacgcatgctggaattcaacataatcacaattaaatattgaatctctaagaccagtggatgtactcacatgaagggcgaacctttgacatcgtagccattgaagtagatgtacacccgatactttccattctgcctgggcataaaagtcacccggtacttgttctccacgatcttctccaccgagcagaccaacgaatgcttgtcgtgcacaatgtccacgtgcagctcgcccgaaacacccactccacgggcatccacttcaaaggtgtgagcccgcagcggcatagctccatctaacccatggaccgaaactccggatgcatcaaacacggcacaggtgaaggggcctccctggatgtggcgaccctggtaggtgatggctatctcccagatacctgcctcgtccggcttgaatatggcactgtgtccctcgtcgatcttcttcagcgggcagttgtgcgagatgcccgtgggcgagaccgccgtgaccaggatgtcctccgtcttgggcgcaccggtggcattgaccagcacctcgacgagactgcccaaggcacagggcgccattcccggcggagccacctgcagcaagcgcggcagggctcggaagaagtgtccgcccagactgtcctcgccgatctccaccacaatctcatgcatcccatagcgctccggcacaaagactccttcgccgtgggcattgagccgcacgggctgtcccggctgtccggacggaggaaccacgtggcagcgtactgagctgaggcttatgtcccgggacattacgtcgatgcggaagtgggtctgcgtgtgaatcggacattaaaaatttacgctctgcacctggcagactgcagtgttcatatacacacccacagtgatgggtaaaataattgagctgactagtaaaaatatttgtttaatttaaaaattgggagctatctttccagttatattgtaagtaaacaccactgatcggatttgtgttaagtaataatatatatttttttctagtcatgagtgccctattattttgccaccatctgtacattcatatatatattgtatatatatgcttcactcaccggttcgcccacccgaccggatgtgctctccaggtagacgctgaccaggtcggacagcggaggcctcggcggcacccactgcaggtgggccgcgtaggccatgatgcccaggtgctccacttccgggttggccatgtccttggccgtcaggatgggctgcacgcccagccgggcgcccgcgtccaccgccttccgaatgttgttctcgtagtggaagggatcggtgctgagcttttccggtgcgggcgccgagccacccagtcccttaataatttcgcacataacgcgtccatcgttccagtcggtctgcgaaatgaaagtgccattatgggatacgattattattggttggaaaaatacgagaattaataagtatttatgttctttttaatgcaattgttgcagatgtacattaacatttgttcaacggattaaaaggtcatatttaaatgcggtgaaaaagcgtgttttattgtagagccataaggatttattaaaaaagaaggctgctttataactgatatgtgattatggatattaacataccgtaaagttcttcacagggtccttgacctgcgtattcacccatcgcatggtggcattgtaaccaggaccaccgggcttcatgaagtacgagaggtacgtcatgccggacagctcatccaaccagggcgaggcgaggtactccggttccagaaccttgggcactccaaactcgcgctgagccaagtccatggcctgggtgcagttgcgcacactctggctgggatcgagacttcgccagtgcgggaacaagcccggctggcagtagtccaggagcgccgccaaattgacgccactattccaatcggtggtcagattggtgatcctgcagtccggcagagcggcctgcagccaggccagcatcagtttgcgcggcgggaacttgctccttccgatctggtagcgcacgataagggaccagatcaagcccaggatcagctttatgttcccattcacaatgtccacgttgccgatgttcaccagcttgatgtgatccgcctcgatggacttcagcgccgtggtggcgttctccaaataatgatgctggttggcgggtcggcgattccacgagggtttcagtggacgcgtctgcagattctccacaagggcgcacagacaagtgccatcgcagaaatcggtggcccagtcatgaacctgagagacaatgggaatttgcattaacttctccgtatcattagaaatagtaatgggaaagtttgtggcaaataattagattactgctggaatacattccgtttagcaacgcaagtaatgtggcaagtaagagatgggagtgcattccataataggtttattattataattgcatttaatatgatattagctttttacggtctaatggatttgcaaaatgtacttttattaagtgggtagtttttacttttccattctatatagatttaattttaaaaagcatgctaacccaaaacaaaaaaatgttcgaaagaagagattttttatctttatttaatgactctagcagcattttctttatagctatgcattagttgagattactagacttgctgtagtacatatgtacatagttcccaatggagattagcaaatgtgcgaaacgcctaccatgtctgcgcaaatgcaagaaggtcgcttgactggcagccttcctaatgagcaatcaacgccccttccgcaaactggtggcccactttgcaaggtaaaccgcttgctcggaacttggagcatggagctcagatctcggaacatggcacatggagctcaagaatgggcttgggaacccaacaggttcgctgctccgaactgagcggctttctccgcccgggtgcaaccaattgtgcgcgattttaagcatttgacataaagctttttatctggctgctgtcggcattcgattcgactggggggaactccactccactccactcaactcaactcaacaaataaaatacgacaaaaaactggagaactgggtacggagacaatcgcgtgtctgttgctgtttgtttgtgcctaggaaaatattcattggatgccataaaaatctcacatcgcacatatgtagttgctccatggctctctaacaagctgccgcaggttgttatttgtcgctgctgttattccgcccttaaatttttaagattcctctgattttacgatatgaactcgagtttcgttgggagttgcgttttcacctaacaaaatatatatgtacttttatttgcatataaatttttgctatatgtcagaaaatgtctagtcattctattacgacagttccatggtggcaatcattttgagataatttaattctacctgccgcaactgttgttgcactgcattaaaacgttaaggtcatacaatgcagtcactttgaatatttctctccgtgtatctgctcccatcaaagcatttcccttttgtttgcacatgcatttgtcatacaaagtggattgcaatattatttgtcgcatacgcatgaactagaattgtaaacagcgtaaaaaacgcaaacttggatgactcgttttggtttggtgacccaaatagacgccagccaggtcacaattagcgctgtttactaaggggtcttcagccttgctcatcacatatgtacacatacacgtatgtatgtacgtttttggcccaaccgaaaaagtaaaaaaaaaaaaataaaaccccgaattttatactcgaaaccgggcaagatcgcgcacaaaagctttagcttgttttgtgtattgtaact

SEQ ID NO: 6740 - DNA, 3540 bp, DROSOPHILA
atgttccgagatctgagctccatgctccaagttccgagcaagcggtttaccttgcaaagtgggccaccagtttgcggaaggggcgttgattgctcattaggaaggctgccagtcaagcgaccttcttgcatttgcgcagacatgatgcaaattcccattgtctctcaggttcatgactgggccaccgatttctgcgatggcacttgtctgtgcgcccttgtggagaatctgcagacgcgtccactgaaaccctcgtggaatcgccgacccgccaaccagcatcattatttggagaacgccaccacggcgctgaagtccatcgaggcggatcacatcaagctggtgaacatcggcaacgtggacattgtgaatgggaacataaagctgatcctgggcttgatctggtcccttatcgtgcgctaccagatcggaaggagcaagttcccgccgcgcaaactgatgctggcctggctgcaggccgctctgccggactgcaggatcaccaatctgaccaccgattggaatagtggcgtcaatttggcggcgctcctggactactgccagccgggcttgttcccgcactggcgaagtctcgatcccagccagagtgtgcgcaactgcacccaggccatggacttggctcagcgcgagtttggagtgcccaaggttctggaaccggagtacctcgcctcgccctggttggatgagctgtccggcatgacgtacctctcgtacttcatgaagcccggtggtcctggttacaatgccaccatgcgatgggtgaatacgcaggtcaaggaccctgtgaagaactttacgaccgactggaacgatggacgcgttatgtgcgaaattattaagggactgggtggctcggcgcccgcaccggaaaagctcagcaccgatcccttccactacgagaacaacattcggaaggcggtggacgcgggcgcccggctgggcgtgcagcccatcctgacggccaaggacatggccaacccggaagtggagcacctgggcatcatggcctacgcggcccacctgcagtgggtgccgccgaggcctccgctgtccgacctggtcagcgtctacctggagagcacatccggtcgggtgggcgaaccgacccacttccgcatcgacgtaatgtcccgggacataagcctcagctcagtacgctgccacgtggttcctccgtccggacagccgggacagcccgtgcggctcaatgcccacggcgaaggagtctttgtgccggagcgctatgggatgcatgagattgtggtggagatcggcgaggacagtctgggcggacacttcttccgagccctgccgcgcttgctgcaggtggctccgccgggaatggcgccctgtgccttgggcagtctcgtcgaggtgctggtcaatgccaccggtgcgcccaagacggaggacatcctggtcacggcggtctcgcccacgggcatctcgcacaactgcccgctgaagaagatcgacgagggacacagtgccatattcaagccggacgaggcaggtatctgggagatagccatcacctaccagggtcgccacatccagggaggccccttcacctgtgccgtgtttgatgcatccggagtttcggtccatgggttagatggagctatgccgctgcgggctcacacctttgaagtggatgcccgtggagtgggtgtttcgggcgagctgcacgtggacattgtgcacgacaagcattcgttggtctgctcggtggagaagatcgtggagaacaagtaccgggtgacttttatgcccaggcagaatggaaagtatcgggtgtacatctacttcaatggctacgatgtcaaaggttcgcccttcatcatgcgtgtgggcaccaaaggaagatctggcaaaacgcgcagcagtccgctccacgacagcaaacaccgatcggagagtccctcgatgcactttgtctccaccacgaacacgcggcacaatgattaccgaaactcctcgctttcgaggcacaacacggccgagaggaccaacagctattcaccgcagtactctcccaaattggacaccactgactaccacagttcgagttccaggtactataagcgggagagcgaggagaaccatgccactccgccgccagctccaccaccagctagtggttcccccacggtcaagtacctaaactccgctgatctgtatacggaaactttgaacgggcgacgggattcgaagacctcgaacagcagctccacgaagaacgactactactacgacaaggagaacgagctgtacagtcagaggcgtgcggtgaccaagcccaagttgacgccaccgcgcgaggagcgcgaactgaccagcaccaccaataccagcagcagcagcagcttccagcagcgccaccagcagctggccaccagtaccctgaccagatcgcttagtccaatacctagtcccacactcaatactcgatcaagcgaagtgcacacccacagtccgttgaccatcaagacgtccaatcagtacgagagttccacacggaatatcaccagcagtccgcggcacgcctccgtttcgcccgtgcaacgttattctcccaatagcgcctatatcactacggccactcaccgcatgggaagtcccttaaccagtcccgttagtaagaatggttacgagtcgtcacgtaccgtagaaaagtcatcgacctacaagtccacctcgaactacgtcaccgattcgaatattcgtgccagtccctcgctttacggaactgccgagcgactgcgtcgaaccggatcccccgagccccgcatcgaccattcctccaatgtgagggtgtcctcgatgaagccggcttccgccaggcgggacagctgggacgtcatcaacaagacgaagcacatgctctcgcacaattcgctcgaatcgctggcgaacatgaccgagaagcagctgaacacggaactgcaatacaatcgcccggatttggaccacgagacgcaccggaacacccaatacaacaagttcgccctgcacaagcagcagcagcagcagtcggactatcgccgggattcccccgatgatggagagcgctacaaacccagtgccattacagtcaagtcacattcgaacaatacgtatacggacaagtccggtggatatacgaaaaccgttaaggaatccagcgagcatgtggttaccgagagcaatggccatggcccctccccgggctatggatacagctccctctccagatttcgacccatagacggcaatgccactggtgccagggccattcgagtgcaggatattccgaatggctctattggacggcctgtcgagttcgagatcgatggctcgagggcgggctccggcaatttggagatcctggtcaacggcgggcgtgtcacctcctcggtgcgctcgctgggaggtcagaggttcatagccagcttcacgccgcacgaacatggaacgcacacggtgcagatcaccttcaatggcgaaacagttccaggtgagttcgagttcgcttactaa

SEQ ID NO: 6741 - protein, 1179 aa, DROSOPHILA
MFRDLSSMLQVPSKRFTLQSGPPVCGRGVDCSLGRLPVKRPSCICADMMQIPIVSQVHDWATDFCDGTCLCALVENLQTRPLKPSWNRRPANQHHYLENATTALKSIEADHIKLVNIGNVDIVNGNIKLILGLIWSLIVRYQIGRSKFPPRKLMLAWLQAALPDCRITNLTTDWNSGVNLAALLDYCQPGLFPHWRSLDPSQSVRNCTQAMDLAQREFGVPKVLEPEYLASPWLDELSGMTYLSYFMKPGGPGYNATMRWVNTQVKDPVKNFTTDWNDGRVMCEIIKGLGGSAPAPEKLSTDPFHYENNIRKAVDAGARLGVQPILTAKDMANPEVEHLGIMAYAAHLQWVPPRPPLSDLVSVYLESTSGRVGEPTHFRIDVMSRDISLSSVRCHVVPPSGQPGQPVRLNAHGEGVFVPERYGMHEIVVEIGEDSLGGHFFRALPRLLQVAPPGMAPCALGSLVEVLVNATGAPKTEDILVTAVSPTGISHNCPLKKIDEGHSAIFKPDEAGIWEIAITYQGRHIQGGPFTCAVFDASGVSVHGLDGAMPLRAHTFEVDARGVGVSGELHVDIVHDKHSLVCSVEKIVENKYRVTFMPRQNGKYRVYIYFNGYDVKGSPFIMRVGTKGRSGKTRSSPLHDSKHRSESPSMHFVSTTNTRHNDYRNSSLSRHNTAERTNSYSPQYSPKLDTTDYHSSSSRYYKRESEENHATPPPAPPPASGSPTVKYLNSADLYTETLNGRRDSKTSNSSSTKNDYYYDKENELYSQRRAVTKPKLTPPREERELTSTTNTSSSSSFQQRHQQLATSTLTRSLSPIPSPTLNTRSSEVHTHSPLTIKTSNQYESSTRNITSSPRHASVSPVQRYSPNSAYITTATHRMGSPLTSPVSKNGYESSRTVEKSSTYKSTSNYVTDSNIRASPSLYGTAERLRRTGSPEPRIDHSSNVRVSSMKPASARRDSWDVINKTKHMLSHNSLESLANMTEKQLNTELQYNRPDLDHETHRNTQYNKFALHKQQQQQSDYRRDSPDDGERYKPSAITVKSHSNNTYTDKSGGYTKTVKESSEHVVTESNGHGPSPGYGYSSLSRFRPIDGNATGARAIRVQDIPNGSIGRPVEFEIDGSRAGSGNLEILVNGGRVTSSVRSLGGQRFIASFTPHEHGTHTVQITFNGETVPGEFEFAY

SEQ ID NO: 6742 - DNA, 4009 bp, DROSOPHILA
aggagctcactgcagctgcaacgcggcgcaagagtgggaggaggaattccgcaacgtgcgcagggcctggcaaccatatggtggcttctaagggtggtacttatggtggtggcacaagcctcaagcgactacttcgccttccggatcagttgtcaactgcatagcggccaggacacacatctagtcagcggagtaaatcagcgtcagtgaaaaaagccaaggtgagtgctcgcctatcagttgtgtcaagaatcaggcctgagacatccatatcattcagatgataccgcacagcgagaatcctttttcgatcgaggatacttacgtcgaggagccacagttctctgagcagtgcggcaacagtcgttgtggacagccccaaactgcgtatgaggtctatcagagaatcctgctaagattacaagcccaggaacatacacgctccacagaagccaatgaatatgagataaggaagaagttctggatagccagcttcactgggaggcccttgcaatatcaatgttagttgaacaacacaaaagaaaaccatatccctgatagaaaatatatccaaagatagacagacatttgttttaagcctttattaactttatagccttactttagacattaacagttaaacttaagctacttacccatcagatttaaaataaaataatactttgaaaaaacctgaaatattttagttatgcaaactctttatatgtttattcaatgttttttctttttcatttataaatttataatagtttattaacttatttttagacgcactttaaggtcttgatgtgatcttcatttcggttttttttttttttttttttttttgattaaacaatgtgataagttcgcacggttttatttcattagatataaacctcttgattctactgctagtgagacaattgtttaattacgtaatgcatatattcatggtaaatgaggggtcgagtcatttaaaagaataggatagttagatctgattgcagagaatttattaaattcattcaatgcgtatcattttattacattcatagaaaattacgaactcgggaaatcataatttaaacataataggaattatttgacttattatctgttgaaatggtccagaaaaggcatgccaacagtttaacatatttatggatatacaaatttaagattaatattgtttgtgggaattgatagcgcaagtgcgcgttttataaatattaatgtttattaattgatagcatcattttgaatgctgctttcttcttgattaaagtattttcaatgtgctcccagcatggattttataacgtaagcattgtcctttgttttcatttatagcggtgtgcgacgaaatcaaccggagctctattatttatattttttaagtattgtatacggattgggcttataggacttgatgggcggttcgcgcatacgtttcatgtcagtcggatatggacgtttatatgccgctgcgtttgtcggtattattgatggacgtgctataaaattggttgattattatttgtagtattttatgcgtgtatgtaattactataaaggagtgaatcgttgcataatattaatcattccagtgtattatatagtttgatctgagagcttgctcaatcacagttattggttttgatagtatgatctaatctaatctataacccaaagttcctgtcaaaggtgcatcccaaaaaactggtgcattcaggggaaaaatcgatcttatgtcatagaccccggcactacccaaataaagaatgcatgcttgggattaacttacgtttgctgtactcatagcccgtaggcggacgcttggggggcatacgatgttcatactcataggccacctcctccacatcgtcgactctataaaaatgaaaatgttaattgctgggttaacagatgttggctaggatttaaggcactactatgacgcgaggactctcggttccattactcctggtggggtcattaaataatacaaaattatactttacaagtaacttactcgggcggattttccgcagctctcttaatcaggttgatgtatttgggagccccattgctgttgcctccaaacttcttgtcgaagacagatctgcaaaataatatatttttattctcatgcccaaaggctgcatagggtgtaagattacctgtaggcctccagattcggtccgtgaatgtttttggctgactcgggatccatttccatcagctcgcgcagctgttcgtgtgaaacctcgtcgttcttgtctggaataagatacttacggatctcggccagagcgtaggctatgcgggcatagcactccgccggagtggccaccgtgctgacctccaaaaataggtccttctgaagatgagcatatctcgggtcgcctgtgctgcgcagctgctcttctttgttacgatcgcggatcgaactgcgacccttaatggcaatcttgcactgggtctcctcctgaaggcgacgcagcgaattgcccttgggccccaggatcttgccagtgaagttgaactgcgcaagggtacggatttatttttcgaacggagaggacagctaattgtataaacccaccttgggatactgctttacgggcacgaagaccttttgggtaatcttcatcggcttctgcttgtacacgtctgcgtagaactcttttccgggaatacgaccagtgcagtagacacggtccacagctgcaatattgggattagtaccattaaaataccctgtaaaagggccaaattgattttaccctcgtcgattagcagtgcgcaaagtggaaagtccgcggacaatcgctggcgctcctcgtccaaatcggcgagaaacttttgggccacctcgttaagacgcggctggtgatcgtgggtgggtggctgtttctcagtaaactcgcttggggtttccatttttatcataacaatctttacagaaaattacaattaaaaatggtgtagactgaaaaacagtatgtacaccaatgaactaaaataatggcagagctgccaagcgtgtgaagttttcgggctgccaacttttttaattcaatagtgattgtttaaatgtcgattttttccactgtgtacaaaatgtcgtgtttgaaacacagaagtagtacaattactatagattattttaaaaagttaaatctgttagtaaggagcttcgccgagaagatagcggagctgccaccatttcgatttcatacatggtgcaatatcgatatttttggcggctgccttgatactcatctctaaaaatatggtatttggattgcattcgcttggtttgttttcaatttttatagtgcgcaatggccagcgaggaactatttgaggctgaattctcggaagaacaggacttggagcatcagcaggccatggagactgaggaggcggagctagcggaaacagaagagcctttggaaatcaccgaggaatcgccggataatcctgaggcagaatctacaacagaacaattgacagaaaaaccaggtaagttagatgcacttagatagaatttctcctatatggctcctttccttccagtgacgaatggcaacaaggcccctgctgataacgaagccaagatgacacaactgccgttggccaggatacggaacataatgaaactagatccggatctgcatatggccaacaatgaggccgtgttcatagtggcgaaggcagtggaactattcatagcctcgttgtcacgggaatcatatacctacacggcgcagtccaaaaagaaaaccatacaaaagagggacgtggatatggccatttctgctgtggacagtttgctattccttgatggagccatgaacttttgaacacccccacaaatgaaactggatttgtcgattatacttttatactttatttagggatattcagcggcaaacaaattcagttctaaacgtccttatggttttatgttaaaaataatatttaagttataaaacaattg

SEQ ID NO: 6743 - DNA, 1400 bp, DROSOPHILA
atactgtttttcagtctacaccatttttaattgtaattttctgtaaagattgttatgataaaaatggaaaccccaagcgagtttactgagaaacagccacccacccacgatcaccagccgcgtcttaacgaggtggcccaaaagtttctcgccgatttggacgaggagcgccagcgattgtccgcggactttccactttgcgcactgctaatcgacgaggctgtggaccgtgtctactgcactggtcgtattcccggaaaagagttctacgcagacgtgtacaagcagaagccgatgaagattacccaaaaggtcttcgtgcccgtaaagcagtatcccaagttcaacttcactggcaagatcctggggcccaagggcaattcgctgcgtcgccttcaggaggagacccagtgcaagattgccattaagggtcgcagttcgatccgcgatcgtaacaaagaagagcagctgcgcagcacaggcgacccgagatatgctcatcttcagaaggacctatttttggaggtcagcacggtggccactccggcggagtgctatgcccgcatagcctacgctctggccgagatccgtaagtatcttattccagacaagaacgacgaggtttcacacgaacagctgcgcgagctgatggaaatggatcccgagtcagccaaaaacattcacggaccgaatctggaggcctacagatctgtcttcgacaagaagtttggaggcaacagcaatggggctcccaaatacatcaacctgattaagagagctgcggaaaatccgcccgaagtcgacgatgtggaggaggtggcctatgagtatgaacatcgtatgccccccaagcgtccgcctacgggctatgagtacagcaaaccacgtccatcaataataccgacaaacgcagcggcatataaacgtccatatccgactgacatgaaacgtatgcgcgaaccgcccatcaagtcctataagcccaatccgtatacaatacttaaaaaatataaataatagagctccggttgatttcgtcgcacaccgctataaatgaaaacaaaggacaatgcttacgttataaaatccatgctgggagcacattgaaaatactttaatcaagaagaaagcagcattcaaaatgatgctatcaattaataaacattaatatttataaaacgcgcacttgcgctatcaattcccacaaacaatattaatcttaaatttgtatatccataaatatgttaaactgttggcatgccttttctggaccatttcaacagataataagtcaaataattcctattatgtttaaattatgatttcccgagttcgtaattttctatgaatgtaataaaatgatacgcattgaatgaatttaataaattctctgcaatcag

SEQ ID NO: 6744 - protein, 317 aa, DROSOPHILA
METPSEFTEKQPPTHDHQPRLNEVAQKFLADLDEERQRLSADFPLCALLIDEAVDRVYCTGRIPGKEFYADVYKQKPMKITQKVFVPVKQYPKFNFTGKILGPKGNSLRRLQEETQCKIAIKGRSSIRDRNKEEQLRSTGDPRYAHLQKDLFLEVSTVATPAECYARIAYALAEIRKYLIPDKNDEVSHEQLRELMEMDPESAKNIHGPNLEAYRSVFDKKFGGNSNGAPKYINLIKRAAENPPEVDDVEEVAYEYEHRMPPKRPPTGYEYSKPRPSIIPTNAAAYKRPYPTDMKRMREPPIKSYKPNPYTILKKYK

SEQ ID NO: 6745 - DNA, 3653 bp, DROSOPHILA
aaaccaaactgatgatcgggctggatacccttcgcttccataatcctgtccaaccgggcagcaatcagtctctcaaacaccttcgagatcgaaaagaggagactgattggccggtaggacccaggattcttttcaggctttccaggtttatgaatcatggagataataccgagcttccacggtggagagaagtattgcagcctcaccatagcgttgaataacaatgtattatttaaattaaataatccgtttttcggtaaatctcattcgactttctttacagttttgggcagcattgacggggcagtggttggagcggtcccaacagacgtgcgcttccgggagtcgcaacggtgttcttggaagagctctggtttgaggacgaaggagcaataaagcaataaagcttactaatttgataccctatcttctctttggtcaggcaataaaacaaataaaacacaaacaaatttggtgggaaaaaaactcggagctagccgttgcaattcgtagcgaggggaacgcaagaaaacgcaagtttacaaaaaatcaactcaatcttttatgaaagcaacagaaagatgtccgctgcgtaattacaagggcactgtgcgaaggaatgctttaaaccgagaaagaaacgcaacccctggtacgcttgcgggactttcctacactatgttcgaccaaagacactagaatactattctaaaatatatttatttcagatctcccacaaagtattccaaattaggatcgtataagtttataagtacctattcttaagaaacttaccacatacctccaaaactattttaaatactcaagcttggacacgatcagtcgtgttatggctgcttcaggtgcggcgtatgtagcgtcaaaaccagcagcttatctttggaatgaggtgaggaaacacgcctatccgatgtgtgcgacagagacggcacacaaatgctatgcgtgctgccgaaacgccacataaaactatgtacatatgtgtgcgccgacaagaagggagaacggagatctgcgaaggagttgggaaagacaccaacttggggtgacccgcaatctgcacctgttaagcagcagaacggagaaagctcagcttttccgtgcacgtggcgggctctacagttgcacgcagatgtgtatttttactgcgatgaagtcgggaccatactccatgatcctagacgagtcaggcagagctgctatcaagtgttgcagctttctccaagtccaggaactggctgcatcaccgatgcggggaatcgcacatgcaaagataaaacacgtgcatatgtacagctgctatgctccgcctagcgacactcccgaccagtacgaggagttcctggaggcgcttggggaccatgcgagagggcgaagcccgaagatcattgcaggtgattttaatgtctgggcagtggaatggggcagcagagtatccaaccccagaggccgagcagtgatagacgtcatgggaatgctggacctagtactgctgaacgacggtcgaaagccgacatttaacaacgataggggtacatcatttattgacgttacctttgtcagtagagggcttgttgataacaacaactggatggtctatgattttgtaacgctgagcgaccacgctttgatttccttcattccctccccggagggtctgcctggagacggcagagtagagccgccgggcaagcttgggacaccaggaagatcgatgaggccatgctggcctatcagatctattcccaagtggggatgcagagagtgtgtcggctggccttatgaacatgctgggcagcctttgcgacgcatccatgccaagaaaaaataaggcacagcgcaaaccacctatgtactggtggagtgccaccctagtccaacttcggtctgactgcctcagggctcggagaacggcgcaacgagccagaggctgcacccaccacgaggagctcttggaggctttcagaaggaaacgcttagagttcaagcacggcattgcggctgccaaagcgcggtcatacaaggagctgcaggatagcgtagacagcgatatctggggcctcgcctacaagcttgataccaacaagctaaggaagagagcggcaaccccatctgaccatggccctcaggctcttcagaggtttcaggaccatatccgaagacgcggcgctctcagcctaatgcggggtggcgctccaggctggaggcacacgagtggatgctgggtgagtggcagaacagatggcaaacgtcgcggcggggaaggtggtcacaccagctcatccctgagttgacggtctgggcagaatgtcaacagaaatgcctggactaacatctaacccagtttctcacggaccatggctgctttcgggcctatttactcaggttccgccacgtagagtcagcccaatgcgtgttctgcgtcgatcgtgaagaaacagctgaacatgtgataatgcactgctccaggtgggagcagctaaagtcgctggcaggtaccccgttcagccctagtggcttgttcgcggctatgctggcgaacagcgaggcatgggagctgggtcacagccttataattaagattatggagcgagtccgatcagacgagatggccaacagagttcgtggctaagctcaaacagtcgtcccgtgtggtggcgggcgaagaatactacctcagccttcccggcttgtcgtaaaagtcgactttagggtggaaggtccatgagggccatggactaccgaagtcataccttcactggcagtcccggtgagcaagcaaggactaaagagcacgcagaggtttttgttttagtacgtaggcataatcccattatagtttatgaatcgtacttgccacctacggacggtaggtggtatctttagaagattttaattttcctaccgtaagtcgaataataaaaaaaaaaaaactgcgatgaagtcattgaaaatttcacacgtagtcaaaaatcgaggggcgaaaaaaacaaggaaagccgctttggcgttgcgtccaataagacttctacctccaaaacgcgagaggagcatacacaatagagggctgcataaaaccattctctttgtttgcaagtagagtatccatatgttttactgcgtatccagaatacatgctttaatatgaccctaaattagaatcccttagctcagcgtaagctttcagagtgatctaacaaaacatctacagtcgccactacaatagctctccattttattacacccatgtctaatactaatttaatatctgaaatatctgaataatatctgaaatccaaagtttggagaattgccagcggtacaccttcatataaattcacaagtagacaaaatctgcacccatattgtactaaccaagtgttgattggccccactcccactgaaactatatgtaagggttaagtaagatcaaatcattcctttgggaacataacacagatttaaaaatcatatgtatttgtatacgtaagtaaaagtttcattatggttgtgcactggtattattttttctagatggtttgccatcattgaattgccatcaacagaaaaagaaaataatttttttacagtgtgggttatatccggtttgtggacgttacatgtgcgtgggt

SEQ ID NO: 6746 - DNA, 964 bp, DROSOPHILA
atgtgtgcgccgacaagaagggagaacggagatctgcgaaggagttgggaaagacaccaacttggggtgacccgcaatctgcacctgttaagcagcagaacggagaaagctcagcttttccgtgcacgtggcgggctctacagttgcacgcagatgtgtatttttactgcgatgaagtcgggaccatactccatgatcctagacgagtcaggcagagctgctatcaagtgttgcagctttctccaagtccaggaactggctgcatcaccgatgcggggaatcgcacatgcaaagataaaacacgtgcatatgtacagctgctatgctccgcctagcgacactcccgaccagtacgaggagttcctggaggcgcttggggaccatgcgagagggcgaagcccgaagatcattgcaggtgattttaatgtctgggcagtggaatggggcagcagagtatccaaccccagaggccgagcagtgatagacgtcatgggaatgctggacctagtactgctgaacgacggtcgaaagccgacatttaacaacgataggggtacatcatttattgacgttacctttgtcagtagagggcttgttgataacaacaactggatggtctatgattttgtaacgctgagcgaccacgctttgatttccttcattccctccccggaggtttctcacggaccatggctgctttcgggcctatttactcaggttccgccacgtagagtcagcccaatgcgtgttctgcgtcgatcgtgaagaaacagctgaacatgtgataatgcactgctccaggtgggagcagctaaagtcgctggcaggtaccccgttcagccctagtggcttgttcgcggctatgctggcgaacagcgaggcatgggagctgggtcacagccttataattaagattatggagcgagtccgatcagacgagatggccaacagagttcgtggctaa

SEQ ID NO: 6747 - protein, 254 aa, DROSOPHILA
MCAPTRRENGDLRRSWERHQLGVTRNLHLLSSRTEKAQLFRARGGLYSCTQMCIFTAMKSGPYSMILDESGRAAIKCCSFLQVQELAASPMRGIAHAKIKHVHMYSCYAPPSDTPDQYEEFLEALGDHARGRSPKIIAGDFNVWAVEWGSRVSNPRGRAVIDVMGMLDLVLLNDGRKPTFNNDRGTSFIDVTFVSRGLVDNNNWMVYDFVTLSDHALISFIPSPEVSHGPWLLSGLFTQVPPRRVSPMRVLRRS

SEQ ID NO: 6748 - DNA, 3647 bp, DROSOPHILA
gaccgggagctgccctttatctgcgaaatccacacggcccggtcaactttcggctgggagcagtccagttccgagctggacatcggcccaaatgcagtcttcgagtgcggaagagaccgagtctgagtctatggcagcatggatattcgcagccgttttattcacttaagcagttttcaaaacacaaaagccaaatagatatagtttagtggtgattgcccgcctctcgcacgccttgtggaaagtgtagaatctgttgcagatgcaggaccaccgggcagcgccgcttagtggtacttgtagttcctgtggtgcttcaacttggtgtagttaatcagatagaagaacgtcatgctggcgacggtcagctggaagaagggagcgatcccggcgcgctttgggaacacgtacttgtgctgccagcgccaccaggcacggctcacagctccggccacagcgttgggggtcttgttgcggcgtcccagccaggcgccgatctcgcccagcttgacctggccgaagggcacatcggctgcggatcggagagagcggagaggtcggaaagttgtttaaattatgtaaaacgctgcacatttttgggcagtgcaaatgtgctctgtgcctgccgcaaaaattacgtaacctgctcacctttgccgtagaagcgagcggggtcgtagggcccgtgcaccttggggttgtactcagctggatagtcaccgaatgccatcgcgctggtttggttgagatatattcttaaatcggattcttatgaaacataaaattacgcctgctacttacttccttcgatactgacagtatgaccaaagcggcgagagctgggattttcatcgaccaatataccgaaatatactatgtgcgaatttattgtgtgcgtctccgctaacagggaggatgtattcgctacgtcatcgatacagcgaatatatcgatgcccgatgcacgatgcacttctcacatcactaagctccagtatatacagaaatcaaataggatttttgcaagcctgggcattcgaatcagaatccagccaaagcgaatccagtgtgtaaacaaaaacaatgaaactggaggagttgctgaccaagggagcctcctctccgccggaggacgacgacgaggacgagaaggtggagctgaagccgcagaagtcaagcagcgccaccgcggacgagggggcggagaacgcggaggatgcggccgaggatgctggcgagaaggaaggcgcgggtggcaagaagaagggcacgcgcaagaaacgctcccttaactgggaggaggcggaaagggggctgctccttgaggtcatcaagtccaaggtggccttcgtggagaaccggagcgtggacgccaagagcataaaggccaagcgtctggcctggtcgcagatcaccaagcagtaagttgcgccattgggcagtggagctcgtcttataatggcccttcactccttccattccaaccccccatccaggttcaatgcccttaacttccgccatcgcctgctggagcagatccaggtgcagtggcgcagcatgaagaactccgccaagcgggagcaccagcagaagcatccgaaaacggaggccctggaaggcatgcggatgatcgagttcctggaggagatgcagaaggatccggtcacctcgcgcagtcagacacgcagcgcgaacacaaacggcgctcttaagaaggagctcatggacatcgacgaggacgaagacatgccgctggccgctctgcccaactctacgaacgccagcgaggacacgctgcagacctccacaatagccatcccctcgccgccgccctccactgctggcggagacggggactcccagcaggagggaaatcccgcccagctgccagcccagcgacgcaagcggaccaaggccaagcagtcgccctcgggcgccaagacagaaacgtccggcgaaacgggggaggagaacgaaaagggcgtaggcccaccacgaaagcggcgacaaaggaatgtgagtttgaacacaagccgcaagtttatttattattattaattaaggtttagctgaacaagttgcaaatttttgtgaaggggaatcttaatctttcttactaataatactatctcatcgttaaccagctctcacaggcccagtcgctgctgtccgacgagaacgaagcctccaccaacgcagctccgagcgccaccccagttgcagacacaaatagccagtccttagatttggtcgccgccacggagatagagcagaagtacaagcaggacctgtttaggctgctcaagcaggcccgtctggccgaaatcgactacgcccggcgggaacacgagcagaagctgcgcttcgagcagatggagcaggaggtgaagatggcctactaccggcaggagcaggacctcaagctgcggcacatgcgcgaggagcacgacatccggctgcggcagcaacgacgggagcacgaggcgcgcctggggatctactcgctgaagagcggtggcctgaacggaagcatacaggatcagagttcagcaaagtgcaatgccaaagcggactacaacaatgtccacgaggtcgggccatcgaccagtgcggagggggcgctggcgctcaatgccgcctgcaactaggggcgtggctgttggcccatatgcatatacaatacgaagagagccagcaattagggtgtaaggcatttagaggaaacatcaacagtactttaaaatttagcttgaaatatgtttagcgaaatgtagctcttccggtcagccagagtaaccggaaacggaaacgtaaacgccggacgcgcatacaatactcatcgacacactcaagttgccactcggacgaatggactgttgtttattgtgcaattcgcacgagacgaactcacaggcattgcattttcaagaaattagtattacataattgtatccgtatctgttaagtactccgggcgaagagatcaattcaaaatgcggttgtgtcgtcgaaaaaaaaacaaactcgaaaatactcatgcacagactctgaataagttcccctttgcagaacgcaatttactcatcagtcagtattctctatggccactgtattatttttataccttcatttgttagctttaagttttttttacacaactactacttatacttgtgctgccaccagttgggctgccgtagttgcagatcaatgtatccattgtccatacattgcgagaatcttttataattcgtctaagcataagttactgtacgtcgtgttgtatagcgctgtaatatcctgtcacctgcttctgcttaattaataccctatatcgggcgagagcaaggtacgattaaaccattagataatgaaatacaaatacatagtgtataaacagatgaacgacgtgcgtttaaaggggggttctccgatctctcagtccccgaaacaggaatcaaagtgggcaactctgcaaatgcttagtatttaaaaatcaagggttctatcaatatatttcatccacttgaacttttagaaagctgtgataaatcgaaatgaaggacctggacggctccttggacactctggagaatgcccgcttcaactacgtgtatatgaaggacattgctcgcctggcaaaggact

SEQ ID NO: 6749 - DNA, 1444 bp, DROSOPHILA
cagaaatcaaataggatttttgcaagcctgggcattcgaatcagaatccagccaaagcgaatccagtgtgtaaacaaaaacaatgaaactggaggagttgctgaccaagggagcctcctctccgccggaggacgacgacgaggacgagaaggtggagctgaagccgcagaagtcaagcagcgccaccgcggacgagggggcggagaacgcggaggatgcggccgaggatgctggcgagaaggaaggcgcgggtggcaagaagaagggcacgcgcaagaaacgctcccttaactgggaggaggcggaaagggggctgctccttgaggtcatcaagtccaaggtggccttcgtggagaaccggagcgtggacgccaagagcataaaggccaagcgtctggcctggtcgcagatcaccaagcagttcaatgcccttaacttccgccatcgcctgctggagcagatccaggtgcagtggcgcagcatgaagaactccgccaagcgggagcaccagcagaagcatccgaaaacggaggccctggaaggcatgcggatgatcgagttcctggaggagatgcagaaggatccggtcacctcgcgcagtcagacacgcagcgcgaacacaaacggcgctcttaagaaggagctcatggacatcgacgaggacgaagacatgccgctggccgctctgcccaactctacgaacgccagcgaggacacgctgcagacctccacaatagccatcccctcgccgccgccctccactgctggcggagacggggactcccagcaggagggaaatcccgcccagctgccagcccagcgacgcaagcggaccaaggccaagcagtcgccctcgggcgccaagacagaaacgtccggcgaaacgggggaggagaacgaaaagggcgtaggcccaccacgaaagcggcgacaaaggaatctctcacaggcccagtcgctgctgtccgacgagaacgaagcctccaccaacgcagctccgagcgccaccccagttgcagacacaaatagccagtccttagatttggtcgccgccacggagatagagcagaagtacaagcaggacctgtttaggctgctcaagcaggcccgtctggccgaaatcgactacgcccggcgggaacacgagcagaagctgcgcttcgagcagatggagcaggaggtgaagatggcctactaccggcaggagcaggacctcaagctgcggcacatgcgcgaggagcacgacatccggctgcggcagcaacgacgggagcacgaggcgcgcctggggatctactcgctgaagagcggtggcctgaacggaagcatacaggatcagagttcagcaaagtgcaatgccaaagcggactacaacaatgtccacgaggtcgggccatcgaccagtgcggagggggcgctggcgctcaatgccgcctgcaactag

SEQ ID NO: 6750 - protein, 453 aa, DROSOPHILA
MKLEELLTKGASSPPEDDDEDEKVELKPQKSSSATADEGAENAEDAAEDAGEKEGAGGKKKGTRKKRSLNWEEAERGLLLEVIKSKVAFVENRSVDAKSIKAKRLAWSQITKQFNALNFRHRLLEQIQVQWRSMKNSAKREHQQKHPKTEALEGMRMIEFLEEMQKDPVTSRSQTRSANTNGALKKELMDIDEDEDMPLAALPNSTNASEDTLQTSTIAIPSPPPSTAGGDGDSQQEGNPAQLPAQRRKRTKAKQSPSGAKTETSGETGEENEKGVGPPRKRRQRNLSQAQSLLSDENEASTNAAPSATPVADTNSQSLDLVAATEIEQKYKQDLFRLLKQARLAEIDYARREHEQKLRFEQMEQEVKMAYYRQEQDLKLRHMREEHDIRLRQQRREHEARLGIYSLKSGGLNGSIQDQSSAKCNAKADYNNVHEVGPSTSAEGALALNAACN

SEQ ID NO: 6751 - DNA, 4304 bp, DROSOPHILA
tgcactgcttgctaaaagtacatgtcaattacatgtaaatataatgtacatacaatttcaagatgtaaaactttaaatgttatgttaaatttgaaagacattcatttgctgatcaggtagatatatagttgattaccccttggaggagtagcttccggcaattaaccaaaccataagccatgtatacaaagtaaaaggcgtttaatgctctgaccctctgctcttttcacgcttttctctacccgtttaaacgaaccaacaacaggaggatgccgagaccgatattggatacgtcctggtcactcttacggcttggtagacggaagcagccggaatatccgaatatctatgagcaataccccactgttcaagtagaaaatgccaaaaacaaaaaaacgttgcatttccccaaaaaaaagtataacaaaagcgaagaacaaatggagttggtctatatacagtagttgtgatgtgttctaaaaatccaatctacaaaacgcttagtattttccctctgtgcaataacgtctaacgttcaacgattatttaacatttttacgtatttttattttgtatacatgtctttttttattgtaaattatggcgcatcaaagtcgtatgcgtagtttgtgcttgtattaactaataaagttggcttacactcaacggcaaagctgggtcacattcaccatccactgatctcctttccaggacgacctctccggagactacagctacgtcttgcagtgcctggcctcctactaaggatttcctcgttggatcgattgttaaccattctatttgttgtaactcttactttaaggcaagcatcgtttgccaactgttttgcggaagattcatagcctatgttcaattcataaatgcactgtaaaatcgcggtaaataattggaagattttttcacttatctagggtaaccgaaaccaagggggaatgggtattggggaatattcgttaagggggaatgctgtttgggttttctacttggcaactcgatcctggtaggctgcccacaggcggtcgcggtacgtctgagccgcctgcttcgggctgctggccttcagaatgcccctgcccaccactccgatgtcggcaccccgctccttgaccacatgctccggactctggtactgctggcccaattggtccacgccctcgtctatcttcacaccgggcgtcagttgcagaagtccggggaaggcaaaggcatcggaggattggcataccacaccggcaacgaaatctacatcggctccctcggttgcgatcttgttgctgttctccttgtacttggcgtcgatcaggttgccgctggcagacatctccgccagcaggaagacgccgcgttccttgccggctcctccttcgccaaggcccgccttcagaccctgcagaatactacgtccaggtaaggtgtgggccgtgaccagatctgcccaactggaaatcttatagatgcccttgccgtactgcagggacaccgtgttgccgatgtctgcaaacttgcgatcctccatcagcaggaaattgtgccgctgggccagagcttgcaggtcagcgatgaatttatcactgaaatcctccacaatgtctacgtgcgtcttcagcaggcaaatgtacggaccgcacttgtcggccacgtccaggatctcatcggcgtgtgtcaggtcggcggccaagcagaggttcgtctgtttgctggctatcaggttgaagaggcgcttggccaccgcgctcttagccagattggcgcgattctcgtaggtcagtttagtgcgctgcaagtcgttggctgcggggaaagtgatggtgattagttaacacttcaattttgaaacgtgcacgtagacctatcttatcgcctcttcttatcgctatatggttgttttgtacctatgccaattttcttcaatagcttcacactttggcgatcccaaagtacataactcttttcaactgggaatcaattttggctattgtttatacagtatcttaagagtatatacaaaagttactccccaaaggcaaagacgatgattatgatgagattagaatactgtgactttacaggtggaaacaaaaagcaaaccggttcccatacatctcatcaaagcgccataaacgaaatgtgattatttatagaagatgggcttgattgaaggagcaggctggctctcgagtgggctgataagcgtggtggcataattgagtgcggaccggacactgccctgaatcagaatcacgtgccgcattcccgggaatgatccggtccgatagtggaatccagatcggcctaccgccgtttatggcggttgtataactttatagtagcgcgactggagcgctccctaattgaatttgttcgaggccatgtgctggccgagtgtcatgtacttattatctatctatgcatctatctatctggcagatatcacggggatctggagcatacgcacctctgacaacgtcgcccttatcgccgccgacgaaggtaccatcgctgttgatttgcacggcggcgatgtacttggccaccgcctccactgtggacttctcgatgcgcccggcctcgtgaagtgtgttcagcagaaaggagagcgtgaagagcgagtgcatccgcacgccgtgcttggcgatgttggccactccgccctgctcacggtctacgacgaccacggcgtcggtgaccacaatgccctcgccttgcagatcccgcaccgtgtccaggatgctggagccggaggtgaccacgtcctcgacaatcagacaggtgtcgccagcattgaagatgccctcgaccagcttcttggtgccgtacgccttggcctccttgcgccgcaccagcatgggagttccctgctgcacggacacaatggtggccagcgggagcgccgtgtagggaacaccgcacacgtgtttggcgctcagctgcttgtccttgatgtgttccaccagcaggtcggatacggtttgctgcgggaagaccaagttagctactgccattgacatggagcactaatcccaaatactgaccatcacatccggataactgacgatcactcggaggtcgaagtagaccggcgaatttatgcccactttcatcttgaagtcgccgaacttgaaggcattgatctcgaagagcttcagggccagggcccgcattttgtcggagttctgggcaaccatgctggcaattctaaatctcgatcttaattcttcacacacgtgctagctaggctccaataagaaccgtccaattgggagtctacgctttttaaacatgctgccagtgtgcacgtatctgctgtgacattggggcacatttcgaacaccctaattaaggtacaagttctggttgcgccgcctgggtggttaacttcgctatgccgccaaacttatcgaagttcaaattattataaatgtcgtagattttatcaacattggcttcgaattaataaacgtttattattagttatagggtaacaaagtagcataagtgttaaggttttgaaataaactattttgcatgtgaaatatttcccaaattcataaaatatataacctttagtttctgagaagtcttaagaaatttcaaggaaatgaatggatggattatatacaatattttgtccgctgcattgctgtattgttcactacttagcatttgtaatctgaaagctttggctccgcccacaaacccttgactgcaacttcaaggggaggagtctagtcattttgcaaccaccaatgacagtcctgtaagctcatattgcaaaatgaaagccaaagcgcctgcgtaagtcaacaaagtttgcgccattcattgaaacaattccagatcctttggcgcgtgtttccaaaatttagtttcttttcgctggtctccaaataagtcgcaaatttgtgctccaaaagcggcaacttcttagtcgaaaaatcggttttctctcaatccatttctcgcctgcgttgcgatggccagttcaagtggtgaacctgctgatgaagtggctaataagcgtcctcgtcttgtggctaatcccaaggccaccaaaatagttgaacccacaccggccaaggtcaccaatcgggtgcccaagtgcgcccgctgccggaaccatgggatcatttcagagctgcggggtcacaagaagctctgcacctacaagaactgcaagtgcgccaagtgtgtcctgatctttgagaggcagcggatcatggccgctcaggtaagttaggatttatatgcacgatgacaagcaatcctttctgcttaattggcaa

SEQ ID NO: 6752 - DNA, 1580 bp, DROSOPHILA
gcatgtttaaaaagcgtagactcccaattggacggttcttattggagcctagctagcacgtgtgtgaagaattaagatcgagatttagaattgccagcatggttgcccagaactccgacaaaatgcgggccctggccctgaagctcttcgagatcaatgccttcaagttcggcgacttcaagatgaaagtgggcataaattcgccggtctacttcgacctccgagtgatcgtcagttatccggatgtgatgcaaaccgtatccgacctgctggtggaacacatcaaggacaagcagctgagcgccaaacacgtgtgcggtgttccctacacggcgctcccgctggccaccattgtgtccgtgcagcagggaactcccatgctggtgcggcgcaaggaggccaaggcgtacggcaccaagaagctggtcgagggcatcttcaatgctggcgacacctgtctgattgtcgaggacgtggtcacctccggctccagcatcctggacacggtgcgggatctgcaaggcgagggcattgtggtcaccgacgccgtggtcgtcgtagaccgtgagcagggcggagtggccaacatcgccaagcacggcgtgcggatgcactcgctcttcacgctctcctttctgctgaacacacttcacgaggccgggcgcatcgagaagtccacagtggaggcggtggccaagtacatcgccgccgtgcaaatcaacagcgatggtaccttcgtcggcggcgataagggcgacgttgtcagagccaacgacttgcagcgcactaaactgacctacgagaatcgcgccaatctggctaagagcgcggtggccaagcgcctcttcaacctgatagccagcaaacagacgaacctctgcttggccgccgacctgacacacgccgatgagatcctggacgtggccgacaagtgcggtccgtacatttgcctgctgaagacgcacgtagacattgtggaggatttcagtgataaattcatcgctgacctgcaagctctggcccagcggcacaatttcctgctgatggaggatcgcaagtttgcagacatcggcaacacggtgtccctgcagtacggcaagggcatctataagatttccagttgggcagatctggtcacggcccacaccttacctggacgtagtattctgcagggtctgaaggcgggccttggcgaaggaggagccggcaaggaacgcggcgtcttcctgctggcggagatgtctgccagcggcaacctgatcgacgccaagtacaaggagaacagcaacaagatcgcaaccgagggagccgatgtagatttcgttgccggtgtggtatgccaatcctccgatgcctttgccttccccggacttctgcaactgacgcccggtgtgaagatagacgagggcgtggaccaattgggccagcagtaccagagtccggagcatgtggtcaaggagcggggtgccgacatcggagtggtgggcaggggcattctgaaggccagcagcccgaagcaggcggctcagacgtaccgcgaccgcctgtgggcagcctaccaggatcgagttgccaagtag

SEQ ID NO: 6753 - protein, 493 aa, DROSOPHILA [sequence omitted]

SEQ ID NO: 6754 - DNA, 5356 bp, DROSOPHILA
tttcttttaaatgtatatgcaagatgtatatatcgatttatgcagtatgtgtgtatgtctaaggatgattttcaatcacttattgttacgtacggtgtttggtataacatgcttcgcttggactagcccgatggcctctttctccacctctcccgttttgtctaccttcagatttattagatccggcggatcgttcaaatcgttctttccttccctactctctaacttcaataacatataaagcattggtttggttttggttttcatctttgggtgtcttaaatgggcaacgaaatagttatcgcttatcgcacaaacgatattttcgattatggctcgattaccgagactatataatcgataagcatcgatagctgcgaagcgaagcattgagagggcctaaaacggacggattgctaccgttagtcaacggctaaccgttcgatgcctgttgttagtgcatttaagtcgttaagtttttgtttttatcactctctcttcctttttgtttgttatcgttttttttttgttttttaattatcgttatcgttatgcataagtattagcctgaggtgctccgaatcgagatcagttgtgaggtctagagcaattaactattatggtgttatatcctagttatcccttggaaatctgggcttccacagtttacctcctttcaccgatctttcactctttcttgtgattttctgtgtattgttttgggtgttcttttttcctttttttttgttttgctttgttttttttttttgattacgccattattatgcagttatatatgcacttactcaggaatagctgtactgtgtagcatacagctattcctgtgcgagtgtaagtgcctttttgcttgttgcgtgtgtgttgtgtgtgtgtgagacgtgactatggccatatatataataaatatagtccaatagcaccgggtatttatcgactttgcttagtgggttaaactgcagctccgtctaaggccgcgtgcttagagcttcttgtaccagtaaagataatgctccccatcctcgaccattagctcgtccacacctgcaagagttcgcatcgaaattaccgccagttgggggggaagcaccattaattacagtgaaacctctctgactctatacatgaatatctgaatgaattgttaacgaatctctaaataccaaagatattcatttgtatcagaaatctttcaccataatcccgaatccaaatccaaacttaccaacaggcgcaataagctgattcccgggcgtattattgggatcgggcaactctggcaatcgataaagcagccagtagtgatacctaatatatatcagtttgtataggtatattgtgtttattgtacggatgtgggtaaaaactcaccctcgaggctcctcctttttgccatacagggtgtgcacatagtgaccattgggccattcacgagcctcgaaaataaatctgaaagataataatgattgtagtaagaatcataatggtgtagaatatttattgaattgctgttttacctgggatccatttcggccgcttgggtcatggccttaaagaagctagtgttcttgggtgagacgagtgacagggagaaggactcggtcacattggatcccacccaaagtgtgtacgtgtaggagatgttcttggcatccgactcttctgcagaggaactaagtccgaagggcaccgccagctttggctcgccgttctctgtgcgggaaaatagatagtccagtgcaatgtaatcttttaatagatacgttaaatgatgaaacaaatctttacttctgtaccctattgctgagcttaaaaatgcggagattcattctctaatccattcttacctattgattaatctatgtacgataccccagagaccgtactcacccgtaggatcactgctctcgcgtatcacatggtcgcattgcagtgcccgcactgcacccaatcccttccagcccaaagcgagaatgatgtccgccgtgaggcccacaccgatgtcgggttcctggccatcctgcagcggttcctcgctccatcctccatccgctcgctggcgactcaggatgtagcgcgaggcggctgtacggttccaatgtccagccggatcgtactctaaatcctgtagagcctgcatggcgagtgctgtgctcctaagcgatccgaaactgccgcgctgatcctgcagagtggccagtcccctcgccggtcgtcggacaaagtgttgcagatgtcgatggcgatgatcggtgacgatgcaacgcaaggctagaattaccatggcaatggcatcaacgctctggtccgtcactccgctggcaatgtccaggagccgtcggatctgacgtttccttacatgggccgccgaactgcaggccgacagagtggttagtgcgaactcaatatcctgggccggctcatgatgctgcagtgtggccaccaagtcgtggccatggaaatgcttcgggtccttgcacagggaacccaaggccaggacgtatctggccagcttgtcgagatccaggggctttgggagtgtatgatggcgatccagcatggccaggatctcgatctccatttccttcacggatagcgtatcctccagctcttggatgacctgcacatgaccatctacactatcgttaggatctcggccgccggaaagctctttggccagtataaccacatgggtatcgttgccccagccgtagtccgaagccctcttctccttgagccaatccaaagctcgcaggatggcctcctgttcaccctttgtgggcggtgcctgaccaattgtctgatgctcgggcggtgtaccgctgccattcagggcagtgggagttgccaggatgagggactcctgctgatctacaccagaaatggcagatgtcgttgtactcaaagaggaaacggaacttgagttgctgttggcattgtcaatgttgctgttgctgctgggcaaaccattgatgtttctgctgtgactgctcgtgttgctgttgctattgccagtttgctcatcgctggcttcgttgtttgtattaaggttgctgctgctggctgtttgattctccaattcggtggaaatgggcgccaccaccgaggaggtcgtgctaaagctcacggaaattggcgaggtggatggtaacgtcgccagagtcacattctccgccaaggaaaccactgttgccgagccatttgcgaagaagaaaaggacgaggagcaagagccacggcggcgatgacagcgacaacatcctgaagagaattctaaaagtaaagataaggattggtttattttccaagggaagtttaatcaaaagtaagccgttgcttgtataattaggttgtctgaataagattcagttttaaaatttcaatcttaaacaataatggctactatcgaaataatcgacttagcgtgaccaaggtatcggtgtcgcaaattcaattatactttgatgtcagaatagatgttgttattaagcaaaaatggggagggaaaatgaaggatgggtaacgaatgatgagcacaaagcggagacgcaggactcgaggcgttgccttgaactgaatttcgcaggaaacacgtcatgcgacttatcgataattggcaaatgtggcgatcgatatcgcccaacgtctattttgaacaacaaataaacgaaaaaagagcacttagtcatcacatcacaataagtgcaacagcaacaaattggcttttagacaaaggtctttcgtgtcctgcgtatgcgcttgtatttgtgcgtgcgtgcttttgtgcatttgtgtgtgtgtgtgtgtgtgtttgtgggggatggaaagtgggcgatgagtcggtgggtggtgagtggtttgggcgaaagggggcgtggtgtgcggcagctgcgaacgttcaattgcctttgacaataaagagttcattgcgacaacaacaacagcacaacacactccaaaaagcttacataataatacaataacaacaaaggccgagccgccaaggataaaaggcaaatgaagtcccgttatcagcctatatgcaatctatatacacatatacaaatgtatataaagttctatgtaatccgtaatccgacttctcgcctttgttcgattttgacacacttgaaagtctagaaattgtatcctttttcgcccgcttttctgtcgcttcgagggatttatacccttaattatcttgtatttcggtttcggtgtaagatttcgcgattttttgcgggcggggcgagggacgtctcgatattcgcgtttttcgccagcgcttcctgcgattttttgattttcaatgttctcagaccgttccttgcagggctgccaggttttctaaagcttgaattgtctaaaaaaggacaaaagcttacaagtaaatgtttaaaatggccgataagaaatcgattggcgattggtcaggcgatgcaaccctgggtggcggtctacatctaattggttttgcaacttggctaaagcgcagcttgtgctatgccccgtcagatggcgctgctagcgtgtttttttttttgggaaagacagggtcgttgttcaacgaatcgtttgaaatttggcggaaagtgttcagaaaattttagacaaaagtaattatgcataattatacacaagggtgggtaactacgatttttgtaatttactaaagtttactaaaattaacaataagattttccgatatatttgagcacatgcaatgagtgaggatgctgcccccttcgtgatttcgcgatttggggtaaatgtgactctccgtccatcagctctttagtcatacagtcagttggatggactagctggatatgtaattcgatatactttgtgccggccgcaaaagccgacaatcaaaatgccgccgaccgccaactgtcgacgtcaaatggacgccgctgccccgcatcctgattcttggttcctgatttcagattgccgatcccaatcccgatccagattcaaatgcagattctgattcagtggatgatgattgcctatcgttttcgcccgagcaattaaaagaacaagcatccgtatcggttacctctgttgagccgaatgaaatctatatggggaatccgctccagagcgattcgaacaatgaaaggaagtctgcgagcgagccctgtgagtcctgcgattcgcgtccctcgtcccattgtgcagttatgacaggcgtccccctttgccggcattttgagcctctcaagagtcctgccgaatcacacacacgcccaaaaggaaatgttcgaactttgaagtgagctaatttcgtgcaactccggatgagtcactttcaaaggagccaaaggatatta

SEQ ID NO: 6755 - DNA, 2159 bp, DROSOPHILA
gcagccctgcaaggaacggtctgagaacattgaaaatcaaaaaatcgcaggaagcgctggcgaaaaacgcgaatatcgagacgtccctcgccccgcccgcaaaaaatcgcgaaatcttacaccgaaaccgaaatacaagataattaagggtataaatccctcgaagcgacagaaaagcgggcgaaaaaggatacaatttctagactttcaagtgtgtcaaaatcgaacaaaggcgagaagtcggattacggattacatagaactttatatacatttgtatatgtgtatatagattgcatataggctgataacgggacttcatttgccttttatccttggcggctcggcctttgttgttattgtattattatatgttgtcgctgtcatcgccgccgtggctcttgctcctcgtccttttcttcttcgcaaatggctcggcaacagtggtttccttggcggagaatgtgactctggcgacgttaccatccacctcgccaatttccgtgagctttagcacgacctcctcggtggtggcgcccatttccaccgaattggagaatcaaacagccagcagcagcaaccttaatacaaacaacgaagccagcgatgagcaaactggcaatagcaacagcaacacgagcagtcacagcagaaacatcaatggtttgcccagcagcaacagcaacattgacaatgccaacagcaactcaagttccgtttcctctttgagtacaacgacatctgccatttctggtgtagatcagcaggagtccctcatcctggcaactcccactgccctgaatggcagcggtacaccgcccgagcatcagacaattggtcaggcaccgcccacaaagggtgaacaggaggccatcctgcgagctttggattggctcaaggagaagagggcttcggactacggctggggcaacgatacccatgtggttatactggccaaagagctttccggcggccgagatcctaacgatagtgtagatggtcatgtgcaggtcatccaagagctggaggatacgctatccgtgaaggaaatggagatcgagatcctggccatgctggatcgccatcatacactcccaaagcccctggatctcgacaagctggccagatacgtcctggccttgggttccctgtgcaaggacccgaagcatttccatggccacgacttggtggccacactgcagcatcatgagccggcccaggatattgagttcgcactaaccactctgtcggcctgcagttcggcggcccatgtaaggaaacgtcagatccgacggctcctggacattgccagcggagtgacggaccagagcgttgatgccattgccatggtaattctagccttgcgttgcatcgtcaccgatcatcgccatcgacatctgcaacactttgtccgacgaccggcgaggggactggccactctgcaggatcagcgcggcagtttcggatcgcttaggagcacagcactcgccatgcaggctctacaggatttagagtacgatccggctggacattggaaccgtacagccgcctcgcgctacatcctgagtcgccagcgagcggatggaggatggagcgaggaaccgctgcaggatggccaggaacccgacatcggtgtgggcctcacggcggacatcattctcgctttgggctggaagggattgggtgcagtgcgggcactgcaatgcgaccatgtgatacgcgagagcagtgatcctacggagaacggcgagccaaagctggcggtgcccttcggacttagttcctctgcagaagagtcggatgccaagaacatctcctacacgtacacactttgggtgggatccaatgtgaccgagtccttctccctgtcactcgtctcacccaagaacactagcttctttaaggccatgacccaagcggccgaaatggatcccagatttattttcgaggctcgtgaatggcccaatggtcactatgtgcacaccctgtatggcaaaaaggaggagcctcgagggtatcactactggctgctttatcgattgccagagttgcccgatcccaataatacgcccgggaatcagcttattgcgcctgttggtgtggacgagctaatggtcgaggatggggagcattatctttactggtacaagaagctctaa

SEQ ID NO: 6756 - protein, 595 aa, DROSOPHILA
MLSLSSPPWLLLLVLFFFANGSATVVSLAENVTLATLPSTSPISVSFSTTSSVVAPISTELENQTASSSNLNTNNEASDEQTGNSNSNTSSHSRNINGLPSSNSNIDNANSNSSSVSSLSTTTSAISGVDQQESLILATPTALNGSGTPPEHQTIGQAPPTKGEQEAILRALDWLKEKRASDYGWGNDTHVVILAKELSGGRDPNDSVDGHVQVIQELEDTLSVKEMEIEILAMLDRHHTLPKPLDLDKLARYVLALGSLCKDPKHFHGHDLVATLQHHEPAQDIEFALTTLSACSSAAHVRKRQIRRLLDIASGVTDQSVDAIAMVILALRCIVTDHRHRHLQHFVRRPARGLATLQDQRGSFGSLRSTALAMQALQDLEYDPAGHWNRTAASRYILSRQRADGGWSEEPLQDGQEPDIGVGLTADIILALGWKGLGAVRALQCDHVIRESSDPTENGEPKLAVPFGLSSSAEESDAKNISYTYTLWVGSNVTESFSLSLVSPKNTSFFKAMTQAAEMDPRFIFEAREWPNGHYVHTLYGKKEEPRGYHYWLLYRLPELPDPNNTPGNQLIAPVGVDELMVEDGEHYLYWYKKL

SEQ ID NO: 6757 - DNA, 3416 bp, DROSOPHILA
ctcttcggagcgctacatggaaatagtagcaagtttcaagccggacatgtatgagggactctgcgatgcggacacaaatttagagagtgccaagaagcgggttcagaaatcggttgacaggacagagaagtttatgcaatacatctacgagcaccggggcaaggtgaattccactctgctagctcccattgtgggcggatacaacacctttgctcggacgcagtccattaaacatgcccgggaacagccagcgggaagctatggaggttacatcttcgagggtttccacgcgaatggtctatcagcgaccactttggacacttccaaactactgccaatagtagagcactgcgtcaagcagctggaggaggacaagcctaagatattgccgggtgcatacacgcccctaaccgttctggaactaatccaacaaggaatcgatgtgtttgacacttcctacgcatattgtgcttctctaaacttcaaggctttgtcatttagttttgtgcaggatgcagtggagcatgtgcctttcttggacataaccgacgaagctatcaaggaggattttactccgccgctgagcaactgcaattgcttgacttgccagaaacacacgcgtgcctaccttcaccacctgtacaagaccaacgaactattaggtcccatcttactgatggtgtaagtgatctttgtcaattaatttattctttcatttatcagttttctcattctttcagtcacaacctttatcactacatggctttctttgaaaaaattcgtgagagtgtggctaaagatacgcttccacagctgacggagctcgtaagaaatcagaatgggaaaacacaggtggattattccatcgcagccaataccaaagtaattagcaaggccactatggggaaaggattcgctgcggcagcagtatgacatgagcaaccaattaaacgctaaactaagtctagttagaagcctctgattatttattctctgtgtttcatatcgtcaatggttggtcccaaagatagtattcttgtccttcgaccatactcgtaatttgctcgtacacagcctttggagcattgccagttattgttcgaatcctaaatagcacctgaagctctgtaaggttctccattttatcagcatctgttaacgaaggaacagattagttagttagttcaacaacaaaattttatagtgcgactatgttacctggcaagggaatgtaaccagccaactcacagaaaccgacattaaactcggccaaatccttgtttacacagtactcggagcgggcaaatacgaataccttaatattaccgctttttccgggtctccgatcctgggtgaggaacagattgtgtggcatattgttcttgcacatccacatggcgagcatgtagagctggtccactttctccgccacctgttcatcactatcgttttcgttaaatactatacatattccttccgttggcgccctacggctcaaacgataaacatagccaccggccagctcatccaagggaacatggtctatatataaatcctggggcatgtggagaagatgaaagtgaaggtgatttacagatgccagcgctccagggctattataacccatccgcatatccttatcatcgatatttcgcataaaggtgatgcagaactgaagagcgtcacgggtaatccgttgggtatggtttttacctacttccgggcagatcaaagtatgatatttggtgattgggctcttgtttatgatcatctgaacttcgggactgccgtgtgcatcatcaatggtcatgatcacctcctgggcatcgactttattgaagttgaacatcatgtgcttaaaggtgggattgaggctctcgatggtctggggacgtcggcgcttacggtttcgatctgaattaagctggaggacaagaatcaataaatattactagagaacaagaatatgacactcacctccgcatagaagccccagtatcctggtattttccggctctgaggggatttctccaattgatatgaaaacagcccgggcaccttgtgcagctggtcccatctcaccttcatggcgttgagatagagctgcgccctcccctccagactcgtctcgtacttaaccttgctcatggttcgcctacggaccggtcgctttacctcctggtcctctttttgcctgcaatccgcggatcggaggactaccagcggcagcagagttgcaaccttcagcgaaaacctgttgctaaagccggcggctataaaactgctgtatttttgggcaacatatcggttgaatcgaaagaaggctgcgaaatgccgcgaaaacatttcgttttgtgctgggcagggaaaaacaaactgaaaatttagtacaattttaaggcccagacaacctgacaacccagaccgcccagacagctgattgctgacttcagcggcgtggcaagagggttaaaaaaaaaaacgagtcagcgcgttcgtttttataaatatggatcctaataaagtcccaatttcggaattttattagttagaagctggcgtacgagatttaagaagcatattttattttctgaaccccattaaaaaatttgagctacgcctttgatccaaaagacctgcatccctggtttgtttgctgctgaaattggctgcattcatcaacaaatggcccaagttcgaggatcttgcgaaagtttctgtcccgatggggaggcgaaaatgtaggtaaacgaaatttaaacccgaatttaatataataacaccgtttaatacattcaggcgtattcgcgagaagcttttgcactatttcgagctaaaaaatggccagaagaacaagccaggagtcctggtcaaggagtttacacgctccgccgccgatgtcaagatgcccatgcccaaggaaatgcgcacagaagcggcattgaccaaaacagtggaatatctgctcaaggagcaagtatattaggcgcttagttagccaagttaaatctgataattaatatactgtgcagcataatcctggacacacgaaagccgtacaatgtggcttacgacttcatattcgatcgattgagggcggtgcgtcgggagatcgtgatccagatgtacgatgccagtcagaagatttgcctgttagagcccattgtgatgtttctggcatatagtcgctatcgcttgtgtgaggagcccatcgagaagttcgatctcaagatatgcaatcagcatttgcaagagtgcctcacgggagtgctttgctgttacgaagaactggaggacttggaatcatctagagaacccaccgttcgtgagcttgagcggcgctgcttcatagagagcctgtatcaattgtttaatctgggttctcccgagtcctttacacgcgccctcaccttacc

SEQ ID NO: 6758 - DNA, 1297 bp, DROSOPHILA
gtcaggttgtctgggccttaaaattgtactaaattttcagtttgtttttccctgcccagcacaaaacgaaatgttttcgcggcatttcgcagccttctttcgattcaaccgatatgttgcccaaaaatacagcagttttatagccgccggctttagcaacaggttttcgctgaaggttgcaactctgctgccgctggtagtcctccgatccgcggattgcaggcaaaaagaggaccaggaggtaaagcgaccggtccgtaggcgaaccatgagcaaggttaagtacgagacgagtctggaggggagggcgcagctctatctcaacgccatgaaggtgagatgggaccagctgcacaaggtgcccgggctgttttcatatcaattggagaaatcccctcagagccggaaaataccaggatactggggcttctatgcggagcttaattcagatcgaaaccgtaagcgccgacgtccccagaccatcgagagcctcaatcccacctttaagcacatgatgttcaacttcaataaagtcgatgcccaggaggtgatcatgaccattgatgatgcacacggcagtcccgaagttcagatgatcataaacaagagcccaatcaccaaatatcatactttgatctgcccggaagtaggtaaaaaccatacccaacggattacccgtgacgctcttcagttctgcatcacctttatgcgaaatatcgatgataaggatatgcggatgggttataatagccctggagcgctggcatctgtaaatcaccttcactttcatcttctccacatgccccaggatttatatatagaccatgttcccttggatgagctggccggtggctatgtttatcgtttgagccgtagggcgccaacggaaggaatatgtatagtatttaacgaaaacgatagtgatgaacaggtggcggagaaagtggaccagctctacatgctcgccatgtggatgtgcaagaacaatatgccacacaatctgttcctcacccaggatcggagacccggaaaaagcggtaatattaaggtattcgtatttgcccgctccgagtactgtgtaaacaaggatttggccgagtttaatgtcggtttctgtgagttggctggttacattcccttgccagatgctgataaaatggagaaccttacagagcttcaggtgctatttaggattcgaacaataactggcaatgctccaaaggctgtgtacgagcaaattacgagtatggtcgaaggacaagaatactatctttgggaccaaccattgacgatatga

SEQ ID NO: 6759 - protein, 408 aa, DROSOPHILA
MFSRHFAAFFRFNRYVAQKYSSFIAAGFSNRFSLKVATLLPLVVLRSADCRQKEDQEVKRPVRRRTMSKVKYETSLEGRAQLYLNAMKVRWDQLHKVPGLFSYQLEKSPQSRKIPGYWGFYAELNSDRNRKRRRPQTIESLNPTFKHMMFNFNKVDAQEVIMTIDDAHGSPEVQMIINKSPITKYHTLICPEVGKNHTQRITRDALQFCITFMRNIDDKDMRMGYNSPGALASVNHLHFHLLHMPQDLYIDHVPLDELAGGYVYRLSRRAPTEGICIVFNENDSDEQVAEKVDQLYMLAMWMCKNNMPHNLFLTQDRRPGKSGNIKVFVFARSEYCVNKDLAEFNVGFCELAGYIPLPDADKMENLTELQVLFRIRTITGNAPKAVYEQITSMVEGQEYYLWDQPLTI

SEQ ID NO: 6760 - DNA, 3681 bp, DROSOPHILA
agtgcctgtttttgatcaagagacgcctagcgagattcttcgaaggtcgccacgtcagcagtgagagaggtaaatcatccttacaatttgttagcctggatccttatctttggatttcttaattaagactttaggtatatcagtagagcagtgcgcggtctcattgccctgggagaatatgcctttcgtgagtttattccctacatctacaaactgcgcgtcgaggaaatcccggatagcctgtggccggatctggctccggctgccatcttccttggcggtcatgatgacgtatacctgtatgaatggctggagtacggatgcggtgctgctctgcagcccttcttggtccactatgcgcgtaagaaacacccatgtgttccatgaaaagcggttaagtaactaaaaatcattgcaggagcctacgaaaagatggtaaccagacggtatgtgaaggccaaacaacccgcttacagaatagaatcagtgccgggagtgcgtcggttggaatggagtactcttgcggcagccatgtgccacggagacgatcctagcaaggcactcaaaccgaagcctacgctctgcgaggctttccccgaccttcagtcaccaaatcttcagctcaactgcgcgggcaacatccgctttaagtttgcaggatgccgcccggtgctgctgaagccgaaggttgcgactgttccccactccgaagactcgccttcgtcggcagcgaacggtggtgggggtggcggtgccagctccgacatcctgatcgccaaacgaaaactctttaagcccctgaccaacgtgagaaagtggtcgcccatcagtggctatcactacctaaggatctgaaagggacttgggaaagtattataagaccttctggaggtccaggaggacctggggatctcaataaaactcttcgtttactttagacttcctcttcggtcttccgaaaggtgatacaactttactcgtaatacataaaaacacagaactaaaaggcttcttcctgaggcgtatgtccatttagtgagcccaaagcgggcacgggcattcctgcagctttcatctccgccacaatccgcttgttgataatgtttcggatgttggcattcacatccggcagaagtccacctgttcgagctgcgtgctcaattcgctggacgacgtcgatttcgcggcgcgatgatatcaggttcgtgactagcgccttgtccatgttgcccacccgaccgatcctgccacaacgatggatataatcggagacgtggagcggaaagtcaaagttgaccacatgtcgagctcgtgtggtatccaggccacgacttcccacatcggtggtggaaaggacgtcgcagtgaccgttttggaactgctcgaagcggccaagacggatcttcatcagcatatccccattcagatttaagcagttcactccgctgttgttcaggaagatggaaacgaagtcactggtggtggacttgttgctgaacacgataagagggcgacgtttggcaagatcatgcttcacgagtgacagaagtgtggcgggccgatcggccttcgacagccgcaggaacttctgcgtcacatgagacatcagtcggtgcaggtgcggactgacgacctcacggatggtgtccacgtctatgactttgtgaaggatctctctggtgttcgtgggcatggtggccgaggccaggatcatctgggtgccagcatcctccttttgcaccaagtggaactgtcgaataagaaaaaacaagctgattgaagccattcctttggtaatcgcctagaatgacttacgggaaatctcctgaggaagtaggaaagtttgtctgtgaacgtatcatctaggagggtgtccgcttcgtctagaaccagatgacgaacctgctccatgcggtagatgccagtggtcaccagtttgctaagtgcacccagagtggcgaccagtatgtccacctcctcgaactgtgggttcatcataagctgcttggtattgccgccaagtaaagattgcactttgagattggtgccctgggtgagcttctccgtgaccccagcaatctgcgtggctagttctctgccgggagtgaggatcaagacacggggggtgttgagttttcgttcggtgaccacttctttctggaggagtttgtctacgataggcaggagatatgtaattgtttttccacacccagtttcagcggcaatgaggcagtgctcatttccatggacaacgggcattccctgtttttggattcccgtcagtaatttgatgcccagctcgactcgcaagttctcaaggagttgcggatgaatctgcatccccgtgctctcgaggaactcatcgacggtctgcatttcctgctggagttcctcacctcgcacgctggcgttcaggatgaagaagtctcccttggatttgttgtgcagccagcccttggaggccagcgaaagactcccaaacttggcatccgtctgctcgtattgggttaaatcgaactggcttcttctgcaggagattaggggctcccccttctgctttttgcccttggactttgcctttggtggcttcgtcttaactgccgccgccgccgctgtggcatatgaagccacatggcgcgatgattgcacccggagcaccacggacaagttcagcatgctttcggaatattattcaatgtttttcatttgccggcaagtcagctgtgcacacgcatcgaagtgttggaaagcgccgctcgaattcaatgccacttgtggcggtaagtttgaaattcatatttatttcaagacccagcaactaatataataataataataataataataataataataataatctgtttttttttataaaattacatttcttcctgcacatacgaatcatttattagccgttccatttccattaactgtggcttaatggcctggtactcggccaactgctgcttcatcatacatcccactttcacccgttcagcgtggacatcatgtataagctgtcgatttttaatgcttttggccatagcaatctaaaatcgaagtaatccaagtattacttaattcttcggaggttgaaatacatacctcgagttccttttcctgtttcttaagctgttgctccatgaatgtgatgcttagattcaagttgtgcatgcgcagagggcgagtaagttcctcaggggacagacagttgaagttcctgcggatttacgttaaaaaccatggaaagtgctgctggacaaccaaattcaaaaccattcactaaccagttcttgccctcgtgggcggcaaactgctccttaagcatttccagcgtggtcagcttggtctccacgtcgttgccggagaagaagcactggttcacatccaggacgatcttggtcataagccgacgggtgctgtggattatttgctcggtgtccaggctcgtggattcgtgctcctcgaggatggaggcacacgactcaagatctgaggagctaagcaatagtaagcgtttggtcaatcttttaatcagccattctcctactttaaatccgagaagatctgtccaatggcttcctcgtaggcctgcttcacctgtggaatgacagcctggagccgtttgaaggctgcttcggtgtcctcttcaatattattcatacttttaacacaatt

SEQ ID NO: 6761 - DNA, 1616 bp, DROSOPHILA
aaagcatgctgaacttgtccgtggtgctccgggtgcaatcatcgcgccatgtggcttcatatgccacagcggcggcggcggcagttaagacgaagccaccaaaggcaaagtccaagggcaaaaagcagaagggggagcccctaatctcctgcagaagaagccagttcgatttaacccaatacgagcagacggatgccaagtttgggagtctttcgctggcctccaagggctggctgcacaacaaatccaagggagacttcttcatcctgaacgccagcgtgcgaggtgaggaactccagcaggaaatgcagaccgtcgatgagttcctcgagagcacggggatgcagattcatccgcaactccttgagaacttgcgagtcgagctgggcatcaaattactgacgggaatccaaaaacagggaatgcccgttgtccatggaaatgagcactgcctcattgccgctgaaactgggtgtggaaaaacaattacatatctcctgcctatcgtagacaaactcctccagaaagaagtggtcaccgaacgaaaactcaacaccccccgtgtcttgatcctcactcccggcagagaactagccacgcagattgctggggtcacggagaagctcacccagggcaccaatctcaaagtgcaatctttacttggcggcaataccaagcagcttatgatgaacccacagttcgaggaggtggacatactggtcgccactctgggtgcacttagcaaactggtgaccactggcatctaccgcatggagcaggttcgtcatctggttctagacgaagcggacaccctcctagatgatacgttcacagacaaactttcctacttcctcaggagatttcccttccacttggtgcaaaaggaggatgctggcacccagatgatcctggcctcggccaccatgcccacgaacaccagagagatccttcacaaagtcatagacgtggacaccatccgtgaggtcgtcagtccgcacctgcaccgactgatgtctcatgtgacgcagaagttcctgcggctgtcgaaggccgatcggcccgccacacttctgtcactcgtgaagcatgatcttgccaaacgtcgccctcttatcgtgttcagcaacaagtccaccaccagtgacttcgtttccatcttcctgaacaacagcggagtgaactgcttaaatctgaatggggatatgctgatgaagatccgtcttggccgcttcgagcagttccaaaacggtcactgcgacgtcctttccaccaccgatgtgggaagtcgtggcctggataccacacgagctcgacatgtggtcaactttgactttccgctccacgtctccgattatatccatcgttgtggcaggatcggtcgggtgggcaacatggacaaggcgctagtcacgaacctgatatcatcgcgccgcgaaatcgacgtcgtccagcgaattgagcacgcagctcgaacaggtggacttctgccggatgtgaatgccaacatccgaaacattatcaacaagcggattgtggcggagatgaaagctgcaggaatgcccgtgcccgctttgggctcactaaatggacatacgcctcaggaagaagccttttag

SEQ ID NO: 6762 - protein, 536 aa, DROSOPHILA
MLNLSVVLRVQSSRHVASYATAAAAAVKTKPPKAKSKGKKQKGEPLISCRRSQFDLTQYEQTDAKFGSLSLASKGWLHNKSKGDFFILNASVRGEELQQEMQTVDEFLESTGMQIHPQLLENLRVELGIKLLTGIQKQGMPVVHGNEHCLIAAETGCGKTITYLLPIVDKLLQKEVVTERKLNTPRVLILTPGRELATQIAGVTEKLTQGTNLKVQSLLGGNTKQLMMNPQFEEVDILVATLGALSKLVTTGIYRMEQVRHLVLDEADTLLDDTFTDKLSYFLRRFPFHLVQKEDAGTQMILASATMPTNTREILHKVIDVDTIREVVSPHLHRLMSHVTQKFLRLSKADRPATLLSLVKHDLAKRRPLIVFSNKSTTSDFVSIFLNNSGVNCLNLNGDMLMKIRLGRFEQFQNGHCDVLSTTDVGSRGLDTTRARHVVNFDFPLHVSDYIHRCGRIGRVGNMDKALVTNLISSRREIDVVQRIEHAARTGGLLPDVNANIRNIINKRIVAEMKAAGMPVPALGSLNGHTPQEEAF

SEQ ID NO: 6763 - DNA, 2890 bp, DROSOPHILA
tgaacggaagcatacaggatcagagttcagcaaagtgcaatgccaaagcggactacaacaatgtccacgaggtcgggccatcgaccagtgcggagggggcgctggcgctcaatgccgcctgcaactaggggcgtggctgttggcccatatgcatatacaatacgaagagagccagcaattagggtgtaaggcatttagaggaaacatcaacagtactttaaaatttagcttgaaatatgtttagcgaaatgtagctcttccggtcagccagagtaaccggaaacggaaacgtaaacgccggacgcgcatacaatactcatcgacacactcaagttgccactcggacgaatggactgttgtttattgtgcaattcgcacgagacgaactcacaggcattgcattttcaagaaattagtattacataattgtatccgtatctgttaagtactccgggcgaagagatcaattcaaaatgcggttgtgtcgtcgaaaaaaaaacaaactcgaaaatactcatgcacagactctgaataagttcccctttgcagaacgcaatttactcatcagtcagtattctctatggccactgtattatttttataccttcatttgttagctttaagttttttttacacaactactacttatacttgtgctgccaccagttgggctgccgtagttgcagatcaatgtatccattgtccatacattgcgagaatcttttataattcgtctaagcataagttactgtacgtcgtgttgtatagcgctgtaatatcctgtcacctgcttctgcttaattaataccctatatcgggcgagagcaaggtacgattaaaccattagataatgaaatacaaatacatagtgtataaacagatgaacgacgtgcgtttaaaggggggttctccgatctctcagtccccgaaacaggaatcaaagtgggcaactctgcaaatgcttagtatttaaaaatcaagggttctatcaatatatttcatccacttgaacttttagaaagctgtgataaatcgaaatgaaggacctggacggctccttggacactctggagaatgcccgcttcaactacgtgtatatgaaggacattgctcgcctggcaaaggactcgatcttctcgcataacgagctgattagcattgtaatgctctaccataagtttgtgctggtcaatgggccgagagcaaagtacatgaccattcagcaactctctgcgctgatggagctcttgtttgagatcgtggatcgcgatctcattgcgaccattgtgtatagaatagcccatacaccaggttccaggcctcctgacttcttttccgacaagcatatacacttggagtcctttgtgcggcttttcaccgtatacttcaccaaagatcttcagctgaaaatggaattcgcattctcggtgggcaattcatagtattcatatgaaattagcctagaccatttgcttacattgcaggtctacgataaaagcgattccaagcagttgaatggcgagcaagttgggttcttcgtcggcaagttctttgagagcgaggatgaagacgaatccattgagctgcgcttggtgaggcaccatcccctacacttgttccattgaaacactgacacatttcgcattccttcaggacatgaaggagatgctgttcctcaaattcgacttggacaaggataccaacattggggttgatgagtactacgaggtggtccgccgacagcccatgctgctggagtgctttggtcgcgtgtttcccccgaatccccagatggaggtccttgcgctgtgcgccaatgtaatgtcttggtttgacgattcgcccaatcccaggattatgataaaaccagacggcggcaaggccagctagctaacaggacgtccaggaacgcatttttatctaaccagatacttaaattgtgacacgtctagaaattgaaaagtgcaaataatttagtgcatcataaaggtttacacttttattaactagttttgtacgttacttttgaatattggttctgaacggtaaactcgcttcattgaggctgcttcgataacgataccgattagtcagtgtgtccggattgtctcatccctgctgcacgcgacccaccattttagtaacaccgaagaaacggtagcgaaatggccacggaggagcaccagcgcctggccagcatcgtgaagagctgccacgaaagcctgcgccagttgactaaggagtatggcgccacagcggcctggcaggagcacacgagtcccaggaacgccaagcaactggcggagtacgccaaggcgatgaagcaactggcggccatatgggagaccaacgatgggaaggtggagctgcaggcacgcagccgcatcaagtgggccatcgactacatcaccaagtacttctttaccgagggcatatatttgcagaagcgccagcgggagcagcgactcctggaatcctacagagccgagggaaaactgggcgaggtgcagtgcaggctgatggaggagccgccggacaggctgcacgtcctggatgtgggcagctgcttcaatcccttttccagtgctccgcacttggaggtaaccgccctggacttgtgtcccgccaccgaagatgtgctgcaggcggatttcctcaaagtggaggtggtacccggaatacgagaacctgagctggaggagggcagcgtaagaaggctaccagcaagccactacgagtgcgtcattttcagtttgctactggaatacatgcccagcgccgagcagagactacagtgctgccttcaggcctacgacctgctgctgcccgagggcatccttgtgctcatcacaccggactcccaacatgttggcaaaaacgcccacctcat

SEQ ID NO: 6764 - DNA, 772 bp, DROSOPHILA
atccacttgaacttttagaaagctgtgataaatcgaaatgaaggacctggacggctccttggacactctggagaatgcccgcttcaactacgtgtatatgaaggacattgctcgcctggcaaaggactcgatcttctcgcataacgagctgattagcattgtaatgctctaccataagtttgtgctggtcaatgggccgagagcaaagtacatgaccattcagcaactctctgcgctgatggagctcttgtttgagatcgtggatcgcgatctcattgcgaccattgtgtatagaatagcccatacaccaggttccaggcctcctgacttcttttccgacaagcatatacacttggagtcctttgtgcggcttttcaccgtatacttcaccaaagatcttcagctgaaaatggaattcgcattctcggtctacgataaaagcgattccaagcagttgaatggcgagcaagttgggttcttcgtcggcaagttctttgagagcgaggatgaagacgaatccattgagctgcgcttggacatgaaggagatgctgttcctcaaattcgacttggacaaggataccaacattggggttgatgagtactacgaggtggtccgccgacagcccatgctgctggagtgctttggtcgcgtgtttcccccgaatccccagatggaggtccttgcgctgtgcgccaatgtaatgtcttggtttgacgattcgcccaatcccaggattatgataaaaccagacggcggcaaggccagctag

SEQ ID NO: 6765 - protein, 244 aa, DROSOPHILA
MKDLDGSLDTLENARFNYVYMKDIARLAKDSIFSHNELISIVMLYHKFVLVNGPRAKYMTIQQLSALMELLFEIVDRDLIATIVYRIAHTPGSRPPDFFSDKHIHLESFVRLFTVYFTKDLQLKMEFAFSVYDKSDSKQLNGEQVGFFVGKFFESEDEDESIELRLDMKEMLFLKFDLDKDTNIGVDEYYEVVRRQPMLLECFGRVFPPNPQMEVLALCANVMSWFDDSPNPRIMIKPDGGKAS

SEQ ID NO: 6766 - DNA, 2536 bp, DROSOPHILA
atcccttaatttgtagatcccaaatgcctgcagcccttggacgttggtccatgccgcatgagcctagaaaggttctactacaacaaggattcaaaagcttgcgagaccttcaagtacggaggatgtcgaggcaatgacaatcgttggggattccgacaaacttgtgaggaggcttgtattcccaaaaagtgatccattgatggcggtcacaaaatacgagattgtttttaaattgtaaatgctagatgaaattatttgttgatgtatttttaaaataattacttgaaatgggtttttgctaatgcgaaatatatacgtttaataattaactaattacaagtaagcagtatatcaaatgtttatctataattggaattaagaaattaagtgcattattttccacctatatgcgcaattttgaaaattacctaatgattagaatcgcaaacgagcgattattaggaacatttcttaaccagacagtttattcatttcttctgaagctccaaagcttaccccattcgttagatacacaaaaaacttcaaccgacagttaaccagtttataggtaattcagttagattcccattccgctcgctaaacgtgatttggctgactaaaattgtcacaccgatacggaagccacttggaatatgattttatggccagcattatgattgacttgcgttggtgcgttgatctgcaattgaaggttgggccgcgaaagcttctccgagagctgtcagtgccaggtgatatcgatatggacgtggatatagacgtcagagaggcaccgccgtgatttacatgcggcgacgaatcagttggacaaacaagctggcgctccgataaatgaagtacacaaaaagaggcaaaacggtgggcaaaaacccagttgagtgagtatagtagtacgtgagttaatcagttcggacggatagtatttaagccgcaatatccgagcgagccgaaatcattcgctcatcatccactcaacggactcgaaatgtgctttagatatagcttcagtttcatagtattcgcggctgttctgctcctggcagccggaattcgtgcagctccctcggatgtcgtcgtggagaaggcggaggagcccgcggtggccaaacccctgcctgatgccagtgagctcactgttccggaggactgtcatcagcccaaggaaaccggtcgctgtttcgctctgttctatcgctacgcctacaacgtggatacacaatcctgcgaggagttcgtttacggtggatgtgccggcaacaagaacaacttcgaatccaaggagcagtgcgaacaggcatgtttggtaaagtctgcggtttcctccacggactcaacaaccgaacaaaacagcgaagtggccacagaaactagcacctcgtcttaaaaaattgtagttcttagtttgtaatttatttgtcatccaacttcatcagccttttaaaagcatttctttactgagttgattatttgaataatttgattataaattttaataaatataccattgtgatttatatatctatttcgttttattcgcacatctggtactagcagtacagtatgtagatacatttgtaagtgtcagaagtggttagcagtacatctcggaaagtcattaatttcgaaacccgacggactcacaaaaacttgagtcatgaatagacgattttaattaatcttgggaactaaacagtgtaaacagtaattttgataaaatatgactacttttataatgcacttatatcgcaaagattctgaaaacgaaatgtataaatatattatacaagcaaaagaggaaataaatgaaatttgggaaaaaatcggacaaacccacttccgaatgacaaatcgctgcctaatcgtgtttactttattcagaacgtagttcctagatttatttgctattccggcattattttcagtacaaacactagcactagcacatagtactcgaagtctcgtctgtttatataccaaattcacgagcactcgttaatgaaccgaaagttcatgagcatatagataagatccccagccaatatgtagttcccatctgccgatcggcatggcgtatataacctagtgctacacctccgatttccattagtcgttccacggaagctgggagatatacatagttttcaaaatcgcaatcagtatgaaattcattgctgccgtctgtttgatgttcgccctggtggctgtggccctcggcctcaaggatcgtaagttgggagctgctcaggaaatcgaaaccattctaattcacattctcaatctattagctatctgtggactgcccgctggtattgatggcaatggtctcatcaagtgtgccgcttttatacccagcttcagttatcatcccgaaaccaattcgtgtgaaaagttcatctacggcggatgcggcggcaatgagaaccgatttggaacccaggagctctgcgaacaaaagtgcaaggaataaatttgacctctatgctctacaaaatattcaataaatgattttcgataa

SEQ ID NO: 6767 - DNA, 536 bp, DROSOPHILA
ctcgaaatgtgctttagatatagcttcagtttcatagtattcgcggctgttctgctcctggcagccggaattcgtgcagctccctcggatgtcgtcgtggagaaggcggaggagcccgcggtggccaaacccctgcctgatgccagtgagctcactgttccggaggactgtcatcagcccaaggaaaccggtcgctgtttcgctctgttctatcgctacgcctacaacgtggatacacaatcctgcgaggagttcgtttacggtggatgtgccggcaacaagaacaacttcgaatccaaggagcagtgcgaacaggcatgtttggtaaagtctgcggtttcctccacggactcaacaaccgaacaaaacagcgaagtggccacagaaactagcacctcgtcttaaaaaattgtagttcttagtttgtaatttatttgtcatccaacttcatcagccttttaaaagcatttctttactgagttgattatttgaataatttgattataaattttaataaatataccattgtgatttat

SEQ ID NO: 6768 - protein, 132 aa, DROSOPHILA
MCFRYSFSFIVFAAVLLLAAGIRAAPSDVVVEKAEEPAVAKPLPDASELTVPEDCHQPKETGRCFALFYRYAYNVDTQSCEEFVYGGCAGNKNNFESKEQCEQACLVKSAVSSTDSTTEQNSEVATETSTSS

SEQ ID NO: 6769 - DNA, 2955 bp, DROSOPHILA
gattgttggccacatcaatcaggatgtcatgttctacatgctggggaaaaacatgaacataataattaacgctcataattcgactctccccaaaagtggacaacaattcgcttcttttgctaatgaaaataatctgtcatcaaagccaaaaagccaccccctatggtaacaggtgctcgtgcttcccgctctcctgttttgcctcatcctgttgctttttccaggacacgcctcctggtacactatatgattatatttggttcccagctattaactctgcatagcttgtgggcaggaagggttgaaaggttggcggacggaaattgcatttgtgctggcccaaatcagataagattcaccggcgacgccctcgtccttggccaggatatgacattaaaagcgcatcaaagtcgaatggcgagcagaggctacgcatcagcagcggaaactgttgccgtaattacattcgagtcggatagaaaaaattccaaagacgtatgttcggcaatgcgaacgcctgatacccttttcagtgaggaatttttgaggaatcttatcattagtaatcttgatcttaattaatcttcatcaaggtatctaagtcacgaaatgaaaatgttaacttaaaactctaaggtttgtagataggttttcgtatagttaaacctcctttcgatgtcctttcctttgacaataagaagcacattgctggtcatttgcgcggtcctttaaccctggtcgcttgtgagcttagcttcccccggaggctgaactttgatttggtctttgtttgcgccgttaaattaaatgtccttgcccagccgttcgggatctgtgctcatcctggatgcccagggacaatgcaagcaattccagtcatttccttaatagaaatcttatcttttgtgacgccttcgccgtgtgcctaagccggatatcgcacctttgacatctgcccatggctcctgacaaagcaggtccatgctaagcactcaaatatctcttacttccggtccggctttttgggagaatatcatttggaaaaattgggtgtttatttataccaacactagcagacgaaaccatgaaatcctgttgtgccactcagacgacgcgttgtgagtgtccaacgggtctcagattggggaagaagccgcaggctccactcttcgacatgctgggcccgcatccagatgaggtcatcatgacgatcctggaccgcatcctctatctttcgggcgccacgaaaataattccattgctggagttgtcgaatgaaggtcagtaatcgaaggaagtaatataaatgcgtccatagataaaatatacccgtaggatcagcttttaagaaggaatcctgcccaccaccagcaccctgtgcaccaagcccttgcagttccggaagcagctcggcttatccatcttcatcggcctggagtacatgctgctccaagccgtcgactatctgttgttatcccaagccaacgagatgctgcgccagtccaaaagctccactagtgccctgcagtccaatggatactccgaaatcttcctgcttcaagaccgcgagtcggcttagttccgctgcctgttgtccccgccagcgtactcccagggtggacttcgatcacccggcggaggatattccgttgagaaataaggcgggcagcgccacgataagggaacagataagccgatcaatttccacctgctcggtggcctgtcaacagctgaaagacaagcttacatcccagattgcccaaggacacaaggaccaaaagtggttgtggacccgtttgattcgtggcaacgatgggtgcatggtgtacgaggtgtacaaggattccgatgtagacaactctccctctaagatcgggtcggaggcacccatcatcctttttctagtcatgccgaatggttgcatcatgccctttgagtctatttgtggtccttaggaagatggtactcgttttgtatactttttagcctgtggtcagttaaaaataaactttcacccgtactttgtattttgctatttaatttatacaacaaatactaagctacacgtatgcctttttttagcataaggaagaccactccagcacaaacaaacatatagatggacagtataacaacagactccagatcacttcgatgacccgggttcagggacatgttgaccattcccgtaaggaaattggagatcatgaagtgagtcagaccgttcatgttcagactttcaacaaaggtgggcaaggatatgttcttttgcccgtcatctctaattgactttttagaacaaatatctggccgtacgagtttcagctcaaagaagaacgcgtagatcacaattaggcttagggagacagcgaaaatccagattacatagccaaaactaaaagttacacgtgctatgcccgttagaaaagaacttataaaaaccaatttccaacagagaatggccacgaaaagaatactctttaactttcttattagtccttgataagtcaggctatcacgggaagtataccacttggcaaagtaaatgctgagcaaatagagagccacacatccgtgtagggaacttaagccttcccgattggcactgaaaaacccctcatggggtgcagaagacatgacgaattcggagagtcccagttggagcaccacttcgtgaaggaatagcaaacctaaaatcgtaggaaattaaaatttattgcattattattttttctggacctacctattgcaagtgccaggagctgttcatcagagtttaccaacagactatagcagctgcccagcaatttcgtgaatcccagtatgaagaaggcattcaaatggcggccgtattccgtctcatcctggtgatagtcgatcaaagtgatgacaatggtgcgagcaagccctaggaccagcaacggaataacagatctccttagtttcttaagatca

SEQ ID NO: 6770 - DNA, 900 bp, DROSOPHILA
ctcttacttccggtccggctttttgggagaatatcatttggaaaaattgggtgtttatttataccaacactagcagacgaaaccatgaaatcctgttgtgccactcagacgacgcgttgtgagtgtccaacgggtctcagattggggaagaagccgcaggctccactcttcgacatgctgggcccgcatccagatgaggtcatcatgacgatcctggaccgcatcctctatctttcgggcgccacgaaaataattccattgctggagttgtcgaatgaaggatcagcttttaagaaggaatcctgcccaccaccagcaccctgtgcaccaagcccttgcagttccggaagcagctcggcttatccatcttcatcggcctggagtacatgctgctccaagccgtcgactatctgttgttatcccaagccaacgagatgctgcgccagtccaaaagctccactagtgccctgcagtccaatggatactccgaaatcttcctgcttcaagaccgcgagtcggcttagttccgctgcctgttgtccccgccagcgtactcccagggtggacttcgatcacccggcggaggatattccgttgagaaataaggcgggcagcgccacgataagggaacagataagccgatcaatttccacctgctcggtggcctgtcaacagctgaaagacaagcttacatcccagattgcccaaggacacaaggaccaaaagtggttgtggacccgtttgattcgtggcaacgatgggtgcatggtgtacgaggtgtacaaggattccgatgtagacaactctccctctaagatcgggtcggaggcacccatcatcctttttctagtcatgccgaatggttgcatcatgccctttgagtctatttgtggtccttag

SEQ ID NO: 6771 - protein, 271 aa, DROSOPHILA
MKSCCATQTTRCECPTGLRLGKKPQAPLFDMLGPHPDEVIMTILDRILYLSGATKIIPLLELSNEGSAFKKESCPPPAPCAPSPCSSGSSSAYPSSSAWSTCCSKPSTICCYPKPTRCCASPKAPLVPCSPMDTPKSSCFKTASRLSSAACCPRQRTPRVDFDHPAEDIPLRNKAGSATIREQISRSISTCSVACQQLKDKLTSQIAQGHKDQKWLWTRLIRGNDGCMVYEVYKDSDVDNSPSKIGSEAPIILFLVMPNGCIMPFESICGP

SEQ ID NO: 6772 - DNA, 2623 bp, DROSOPHILA
attattgaatcctatggatttttcgcactcttcaggttcgtagcaccctggccaagtcccagtcggattcgtttaagaccatttgagcggggctaaccggttacgcactccacatggtcttttcgctttcccgctcttaatacaccattcgcaagtcagggcttggcagtcaaagttgctgtcagatgacatcctttagaaatattttatattttaattgaaagactgcaagtcatgtagatgggacaatttgacgctgtggcattaacagcaaataccaagtataattcttcagattcgcttacaaaaaaagctcgatcagattttatagcatttgatcagagctaaagaaagcaaaaagtatgtccttcattataactattcgctgtttctgtctgttttgttctgttctgtccttttatacattttttcctatctatacctctctccttttaccttttcaattgcatgcttcttcataagttacgaccaaaggtgcaacttaataattaccctaatatatgtaggtctttttattcattaaaatatcttttaacgaacgttaaaaggtctgcttcatatatatcggattaatgaatggaaatctattcaaagtagggaaaatattcagtgaatataagaatttaacttaacttcgaaacgtgcaagatggcaatacaagtggaagtaacttcttttagtgatttgtcgtttacttattacttattaatgtccttctctttatattttcagcggcttcttccccgtggccattaatttcctaggccgagtgcctgttttaggatcgctgtttaatttaccatttatacaaaaggtaaggtagcatggagcctcacaaaaaataaaaaatataacatagcaaatagcccatactcatgatcacttaacgcgctcatctcgccttgacgcgaaagcccattgaaataaactgaagggtccacattcccaaacgaccacgcagactcgatttcatagccaattttggtatttatctaagctatgtatttcaacatttacaagtccaaagtagagggatttagtggcgcgtttagtggatcttttcccagtcctcacgctcctcgcgctccttcacgacctccttgaggtagggttccagatacttgacgtcctcctcgtacttggtccactgctccttgggcagaatggtcttggtcatggacagatggagggccctcatgatgcggtagttacgctcatcgtacagcttcctgggcaatcggcgcacggcctccttcacatcctcgttctcatacagacaatcatcgcgatgcagacctgcaaaaatcgatggcatcaagctcagctgttaggaatcactaggttatatagtagtcctaccgtattggttgaatccggagagattgtaggcccatctgcccagatttgctgtggggaaaaattcgcattacatatttacgtaatcataatattccggcgtactgcactacgaaatttgttgcatgcaacgtgagtccgattgttgcccgttcgtattacttacagagaactgcgggtccctttctggcaatatagttcgacatggtttacgtaaaatcagaagtcgggaaagagatattcctccagcctttttattttaggtatgagaacgttggagatgggtctctcgatagctatcgcaccccgttatcgatcaacgagcactacggttgcgtttgtacaaatcgatttccgaaatgtaatacagacacactgcacctatcgatatatcgcactcaagaaaattcgttattctttagttttagagctattaaatatattatcttttaacattttacccttttgtatttgtatttagattgttcaaaaacttggtggagacggcaaccgaactacagtataattacatctccaaagttggtcattttgcaataactttttgtataaagtaaataaaatcaattcaaattcttgtaaacccatttaagcccatgtaaaaatccgccttcataaacaaaatacttgtagtttatcaaaccgaatgattgtggctttctccttttgtaatttgttatgggaaacactcaaaaaaggtttttaatttgggttaagttataatttatgttaaccaataacctcgattaaattaattataaaaatgatgcctgaagatatacaactttcacttaacttgcaacacgggtattgtatattaaacagcaaacaaaaaaggcaaaaatgttggtaattagcggagtgcttcgacaagcggaaatccctacttctcatttaaataatatttccccaattttttgcgataagcccccgccaacggtaaacccttcattaaaatgattgatagcgtttttattttaaagtacataccttcgctttattatgactacaaaatatcaatttatacaaattaaagaacatatacaaattctttatatatacagtgccctcccttaagagtgaacactcgaatatgtgaactttttagtaaaagtgaacgattaatttatgaaattttagaaactttcgcttaacttagtaaaaaaattaaattttttcaaacgtggtgtttttgaaaaatatattaaattgtttattttttctgtga

SEQ ID NO: 6773 - DNA, 445 bp, DROSOPHILA
gaggaatatctctttcccgacttctgattttacgtaaaccatgtcgaactatattgccagaaagggacccgcagttctctcaaatctgggcagatgggcctacaatctctccggattcaaccaatacggtctgcatcgcgatgattgtctgtatgagaacgaggatgtgaaggaggccgtgcgccgattgcccaggaagctgtacgatgagcgtaactaccgcatcatgagggccctccatctgtccatgaccaagaccattctgcccaaggagcagtggaccaagtacgaggaggacgtcaagtatctggaaccctacctcaaggaggtcgtgaaggagcgcgaggagcgtgaggactgggaaaagatccactaaacgcgccactaaatccctctactttggacttgtaaatgttgaaatacatagcttagataaataccaaaa

SEQ ID NO: 6774 - protein, 111 aa, DROSOPHILA
MSNYIARKGPAVLSNLGRWAYNLSGFNQYGLHRDDCLYENEDVKEAVRRLPRKLYDERNYRIMRALHLSMTKTILPKEQWTKYEEDVKYLEPYLKEVVKEREEREDWEKIH

SEQ ID NO: 6775 - DNA, 7451 bp, DROSOPHILA
cacgaatgtatcgagtgcagggcggggaaaagtataacataatttatgcgatatttaacaataaaataaacacaacgcaataattcagccggcgatgcgcacttttacgttttttgaacggcaaacgatcgcaacgatcgcagttttgtgactgaaagcgaccgatttctagagatgcgttcaaccatccacagtgctgtcgactatcgattgtttgtgttcgactaagatatcggagtggaatgtgtttggtttaaagtgtgggcataaatcgatcaatcgatcaacttctattttagtacatattcaaattcaaactcttccgttaacgatctaaacggaaatttatcttgcctgcttcttttaataagtataatcttgaatatattggcttgaagttttcataagaaacacttttatttaaaaacattttggctaaatttcagcgcctaaattatcatcgtatttcgccgccacaccccaaaggcagttctcccaatggccctcaaacctaaactgtgtttccgatgcaggcagctcctccagcttcagctgacttgcgcagaatgaactgtgcgtttacgtgtcgcaccagaagaaggtatacccagtgagtccctttgactcctctggtggttgccatgttataaaattggctctcacgttaaacctgaaatcctaagctaataataagaataactaaatcttcttggctgtgcatttacttggaccaatttaatactttcaagttggctttacataacttgtgtaatttgatcttgcatacataaaagcataaaatatattgcaaaaatacatatgtatacatggtatgtgtgttatataattctctctataaacgttgtaaattttgcgtacggctggtaattagaatatttgtttacatctgaacacttaagatccaccgtcccgattcacttaaaacatttaacctaaatctatttgtttaacgcgttgagtgtttctcttttttttttttagttgagtccgtgtgcattaacttgtaaatctgttcaaaactgcattgttcgttaaaagttgttttttaaaatataaatatcgaaaatttaacaggtaaaaagaataatttcgtaagagtagctggttaaaacaaacaagggctaacaaatccgtaaaatatgtatacacaagctttccgttccaagcgatcataaagacccctgctccgtgaccagcacaacgctctgctcctgcgcaatggcagccagctccttaagccactcgtccatgagcacagcacatagggccagatcgcgtgatcgctcggtgccacttgtgctggcgatgattcccatggaggccaccgagtccagggacgccggctccgagttgaaaccacccgtcgacgggccgccatccagaccgtgcagagtgctcgccgagtgggtggttgtgttcgactgggcggagagcgttagggtggaacctgcgatgctgctgttgcttcccgatgccgctgttgacgtcgcgttggctcctgtgcgtgatgctcccgctgggggctgcgtactcaagctggtctcgcatgtgcctgcggacgtctgagcttgtgatatgcctcttccatcgttgctggcattattccccaccagattcgaggcagctcctaaaaacgtatgcgaggattagcaacagcacatgatattgacattttgggttaattaaaaaacaacaataaccacatgtatatatgggattccacaaatgttttctatattctactattaactatttttttagtggaaagcataatgtacaaagctctacgaaaataaagatactacgcacaaatattaacaagactatgccatattgggttaggtttgattaaaactttaaatattttatcaagcgtgaaatatttaccggtgaagaatgcgtaaatttgtgataagccagatgaagctaagatttgtttgattttttgatcgattcgataaaaataaagaaataaaagaaattaatttattataaacgatgccggcggcattttacagagatgtgtgtcaaccaaatttagccctgaatgagacctgtttactcttataacattaatagttcatttaaatgttaaaatgatttctttggtttactttgcattagctggcaattaaccaggctctaatgcagggctcaagtacgtgtgtgtgaatgtgtgtttttgtgagtgaagtgtgtgtgtaatgtgacccaaaaccaactttcttccaacatccatcgctgcagatttgtaaactgttggtaatatctagtttgtttgcttggtttttcttttttgaaaaatatagaagttgtgcaagagtgtgacaaaagcaggcaaccgattctgttactcaccggaggatccattgggtggcgctgtggacgtggaggcggactttctgctaaacatgctggtaatggatttgctgatgctgcgacgcttgttatcactgcgcttgaacggatcgtaggcactggtgggcgtggcctgcacgggcgtggcggccgagagggtcgcgtaggctgatcgcagttgaccctgctgctggccggagttcgttaccatctgttgctgttggctatgatgcattggagagccctcgttgcccttgcgcgcgtttgccaagcggaactctcgatcaatcagcgacgaacgcgccacatcaatgatctccagcgaatcctccgtcactggcagctcggcatctatttgctgcttcagaatgcgcagcacctggtgaaaagagggcgtatccgatgtgatggctatgtcagagcgcagcagcagcgagtgaatcaacggcaggggataccaggccaagcgagtgatcagcccggtcaagtggagattgacgtacagcgaattgctcgtgaaggtttgcagtttgccccaaatggcattgagaaagggacctggaaataaacattgatacatagcaattatttataaggaattaagaagaacaatttaattctcacctaagcttacggtgccctgcgcaaacaaatcttccgagaagtcaaggtccgtcaatattaattcattgcgattgctgttcgaagtccgccatgactcgcgtttgccggatgcaccaagaacgctgctaaggctgctgctattgtgatccatatccgcctcgctggctgtcgtggccacagttgtatccgtggcttcgctttcctcgtccgctggccgccacttgaaggattcgtagccgcttgactcgccaattgactgcaagctgtccagctgcttttcacccgtctcgttggcggcgataggaccgccaccgaactcactaaagaactgtcgcgccagctccaaggcatgggcatggactcttccttgcccgtgacgaggccacttttggtagcgatagctgttggcccattttaggcaatccttttgacactgggcgattcgccaatgagcctcgaagagatatgcctgtatattcgcatacaaactatcaccggtgtgcactccgtaatagttccagttggctccaatcgtcttgctcatgaccggagaggggagactcggcagaggcgtcagttcactcaccacaggctcgtggacgctcttcggcctggccagatctctggctctcttcatcacatcgggcgagagctcgaggaagaactcactgctattcaaatacggatcgattttgttgatcttgtggcgatgtgagatgggcacatgcttgcccggcagcatgaacttgagcagcagctccagcatcaggtcctcgcagtgcagacccagcagggtgtcaaacaatgccatcgtgaccatgcacagattggcatccggcgagttcaggcgctcgaccagggcatcaagtatccgttcgccgtcaaacttttccgtatcgagcagaaaccgaacgaaggccctcagcagtccgggctccgtgatggagcgcaggatcaggtccaggtacgacattgccgagatttgcgagtcgatgttcgtctgaaaatgtttgcccttcagtgtctgcgaaaatggagcgcaaaaagttgtttcgagatttcgaggtgtgtgtgtgtggttagctacggggaaggaaaaggcacaagaaacacacaagagacggaaagcagaaggcggtgcagttccctatattaaatacgagtcttactaaaaaagaagatatcggttaagcaacacttgcataattccattagttttacgctttcttaaccaatatctaaataatgttctagattaaggacaggacataaatgattcgcttgcaaccaacaccacagaaatgcatcgaagacaaattttcacgaagagagaccgagacgagacaaaagcgtgacttcactcacctgaaggatcgcaggtcccagcacgggaacaataaagccctggtacatgaagtccagcaactgctgcttgatcatctcatgggccacctgcaccaccgcattgcaaaactcgagggcgttcatgaacagcgtcagctccgggatctctgtcacatcgtctggcgttatccggtgccagtcgatggagctaatctcgatgctgttgggcagacgcgagtaaagcccacccagaccggtcaccaacagcgggcagatcgaggagtactgggctatgtacgttccaatgttggagttcttctgcgaaagcgccatgcacagcagcagagcatcgcgcgcttggtgaccaagactgccttcgcgatgcacgtacgggataagcagcgaaaatattatgaagctaaaagaatcaataaaagatttatcagacacggaatataccttataataaagtcttagaatataaatatataaatcttagaagataaatggaacaagtcaagtggattcatcactcgtaattggaatattacagggtcacttttttagtattgccttatctggctaatgtcgctattacgcgatgaatcattacacaaatattcatttatcgctattcttttttatgctgaatgaattggaatgtttaaaagttatgagcttacttggtagtggttccgcttttgggtggcgccacgttgccatttaatatctgctcctgcacctgcgtctgggcggagaagaaaaagaggtccagcaggtggacattctgcataagaaccacgcacagctggttcagcaggatcaccaggcgcttctcgagatcgggcggaaagatctcgccctggctggatgccagtatcttgagcaggggtcgcaggaagggctcgtggcagagcagctggtggcgcgagtggctgacgagcagttcgtacagcttcagctgctccagcctcacagcgttggcataccgtcccgtggtgcaggcccactcgtacagcttgtccagcagattctcgctgagcaggaattccaggcagggcgccgcaggcggaccactagcctcggccgccggcagcgagactttgttgcagtgatgcagctccacgagcagcagggtgaccatgtagtccaagtgcgagaccacgcccagcacgtcgtcgtgcgagggcggtgcactgtgctggatgatctcgaaggcctgctgccagtgcttacagaagctgtcgtagcaagcgcgcggatcgcagtctgtggcagcgtcgatgggtcgctgtcgcagtgggccgacgtgtccgacggaggcaacgcctccaccgctgctctggcgcagccacatcgttgtcggtgcggtgtgtgtgcgattcggtggcttttagtggcgctggtccgctgataactgctccgtgtgcgtttcgtttggcatgaattggtggtgctggtgctctgttatctctcgttttgtgcttttgtccgactgtgtgagtggtgagtatttcaatgttgctcgctttttaaatatttagaagctaaaagaagacgcactttagttgaatattcgctatttacttttctctaatgttcccaagaacaacaagtgacacacttacgcacacagccacacacacacctgtgtacgtgtgcccacctatttgggcactcactgtggttgttgttgctgctgctgctcgctcacctgatgaatttagatttgatcatcgtcatcgtctccgctgctttccgctctccgtgcatcgtgcatctacacccattactgtttagtggcccttcttagatgggttttcacgcttgcagcatttgcagcgtttttttttttggcactttggcaattacaattacaaatacaattaagtggtagtaccaacacttccgcagatttgcggactagatttgcgttcttgcagcacgaaattcgcgcttttggcgcgggttttgaagtcaagaaagggaaggcagtccggcccgcactttattgcctcattttgcactattttcgtagtgtttccaaagcaattctgcgtaaatatttacaattatatctgcacggaaatagaaagttagcgatgagcagctatcaatataacatatcgatgtttcgattatacctgagatacatcgggaatttttgacatcggggtgtagcaattccattttagttttatttttatctaattatctattcacttttaaaacagcgtgctatgatcacaagtattagtttgattaaatgcgttctgtttcattatcccagcgttccacttaccagtatttcttatcgcctgtgtgaccagacttccgcgcttctatcagctgttcgcgctaccgccatttgaatttaatgaaatggtaaatacaaaaatttgatttatttaattccatttccctaatcatttattcctaaagcggcgcagtctggctcccagccaacgtggaccactgcgtcccgagtcccgtcactccttcacgccgccactgctgaagaaaaacaagcgatcctgccagcaggaactggagcgagagcaagaactggacagaagacgactgggcgccctccgagatgccagcaacacatcagagctcccactgcctattcgcttcacggcgaacagcgagtatgagttggccattgccaaggttctggcacggaagttcaaggtgcccatggacaattacgtaccggattacggtggtaaacgggtcctgggcgtgcggcgctgcatttcccgacgacccctacacgatccgatggcctgcaacgccttggtactcttccatccacccgcctacacagaacacgagcgcatgggcatggatccgaccaaggttctggtgcacgtcgtcgtcgatccgctgctgagcaacatattgcggccgcaccagcgcgagggagtgcgtttcatgtacgagtgtgtggagggaaagcggggcaacttcaatggatgcatcatggccgacgaaatgggtctcgggaagacgctgcagtgcgtaacgctggtctggacacttctaaggcaggggcccgagtgcaagccgacgatcaacaaagccattgtcgtgtctccatc

SEQ ID NO: 6776 - DNA, 3896 bp, DROSOPHILA
atcgctaactttctatttccgtgcagatataattgtaaatatttacgcagaattgctttggaaacactacgaaaatagtgcaaaatgaggcaataaagtgcgggccggactgccttccctttcttgacttcaaaacccgcgccaaaagcgcgaatttcgtgctgcaagaacgcaaatctagtccgcaaatctgcggaagtgttggtactaccacttaattgtatttgtaattgtaattgccaaagtgccaaaaaaaaaaacgctgcaaatgctgcaagcgtgaaaacccatctaagaagggccactaaacagtaatgggtgtagatgcacgatgcacggagagcggaaagcagcggagacgatgacgatgatcaaatctaaattcatcagcttctaaatatttaaaaagcgagcaacattgaaatactcaccactcacacagtcggacaaaagcacaaaacgagagataacagagcaccagcaccaccaattcatgccaaacgaaacgcacacggagcagttatcagcggaccagcgccactaaaagccaccgaatcgcacacacaccgcaccgacaacgatgtggctgcgccagagcagcggtggaggcgttgcctccgtcggacacgtcggcccactgcgacagcgacccatcgacgctgccacagactgcgatccgcgcgcttgctacgacagcttctgtaagcactggcagcaggccttcgagatcatccagcacagtgcaccgccctcgcacgacgacgtgctgggcgtggtctcgcacttggactacatggtcaccctgctgctcgtggagctgcatcactgcaacaaagtctcgctgccggcggccgaggctagtggtccgcctgcggcgccctgcctggaattcctgctcagcgagaatctgctggacaagctgtacgagtgggcctgcaccacgggacggtatgccaacgctgtgaggctggagcagctgaagctgtacgaactgctcgtcagccactcgcgccaccagctgctctgccacgagcccttcctgcgacccctgctcaagatactggcatccagccagggcgagatctttccgcccgatctcgagaagcgcctggtgatcctgctgaaccagctgtgcgtggttcttatgcagaatgtccacctgctggacctctttttcttctccgcccagacgcaggtgcaggagcagatattaaatggcaacgtggcgccacccaaaagcggaaccactaccaacttcataatattttcgctgcttatcccgtacgtgcatcgcgaaggcagtcttggtcaccaagcgcgcgatgctctgctgctgtgcatggcgctttcgcagaagaactccaacattggaacgtacatagcccagtactcctcgatctgcccgctgttggtgaccggtctgggtgggctttactcgcgtctgcccaacagcatcgagattagctccatcgactggcaccggataacgccagacgatgtgacagagatcccggagctgacgctgttcatgaacgccctcgagttttgcaatgcggtggtgcaggtggcccatgagatgatcaagcagcagttgctggacttcatgtaccagggctttattgttcccgtgctgggacctgcgatccttcagacgaacatcgactcgcaaatctcggcaatgtcgtacctggacctgatcctgcgctccatcacggagcccggactgctgagggccttcgttcggtttctgctcgatacggaaaagtttgacggcgaacggatacttgatgccctggtcgagcgcctgaactcgccggatgccaatctgtgcatggtcacgatggcattgtttgacaccctgctgggtctgcactgcgaggacctgatgctggagctgctgctcaagttcatgctgccgggcaagcatgtgcccatctcacatcgccacaagatcaacaaaatcgatccgtatttgaatagcagtgagttcttcctcgagctctcgcccgatgtgatgaagagagccagagatctggccaggccgaagagcgtccacgagcctgtggtgagtgaactgacgcctctgccgagtctcccctctccggtcatgagcaagacgattggagccaactggaactattacggagtgcacaccggtgatagtttgtatgcgaatatacaggcatatctcttcgaggctcattggcgaatcgcccagtgtcaaaaggattgcctaaaatgggccaacagctatcgctaccaaaagtggcctcgtcacgggcaaggaagagtccatgcccatgccttggagctggcgcgacagttctttagtgagttcggtggcggtcctatcgccgccaacgagacgggtgaaaagcagctggacagcttgcagtcaattggcgagtcaagcggctacgaatccttcaagtggcggccagcggacgaggaaagcgaagccacggatacaactgtggccacgacagccagcgaggcggatatggatcacaatagcagcagccttagcagcgttcttggtgcatccggcaaacgcgagtcatggcggacttcgaacagcaatcgcaatgaattaatattgacggaccttgacttctcggaagatttgtttgcgcagggcaccgtaagcttaggtccctttctcaatgccatttggggcaaactgcaaaccttcacgagcaattcgctgtacgtcaatctccacttgaccgggctgatcactcgcttggcctggtatcccctgccgttgattcactcgctgctgctgcgctctgacatagccatcacatcggatacgccctcttttcaccaggtgctgcgcattctgaagcagcaaatagatgccgagctgccagtgacggaggattcgctggagatcattgatgtggcgcgttcgtcgctgattgatcgagagttccgcttggcaaacgcgcgcaagggcaacgagggctctccaatgcatcatagccaacagcaacagatggtaacgaactccggccagcagcagggtcaactgcgatcagcctacgcgaccctctcggccgccacgcccgtgcaggccacgcccaccagtgcctacgatccgttcaagcgcagtgataacaagcgtcgcagcatcagcaaatccattaccagcatgtttagcagaaagtccgcctccacgtccacagcgccacccaatggatcctccgcttcatctggcttatcacaaatttacgcattcttcaccggagctgcctcgaatctggtggggaataatgccagcaacgatggaagaggcatatcacaagctcagacgtccgcaggcacatgcgagaccagcttgagtacgcagcccccagcgggagcatcacgcacaggagccaacgcgacgtcaacagcggcatcgggaagcaacagcagcatcgcaggttccaccctaacgctctccgcccagtcgaacacaaccacccactcggcgagcactctgcacggtctggatggcggcccgtcgacgggtggtttcaactcggagccggcgtccctggactcggtggcctccatgggaatcatcgccagcacaagtggcaccgagcgatcacgcgatctggccctatgtgctgtgctcatggacgagtggcttaaggagctggctgccattgcgcaggagcagagcgttgtgctggtcacggagcaggggtctttatgatcgcttggaacggaaagcttgtgtatacatattttacggatttgttagcccttgtttgttttaaccagctactcttacgaaattattctttttacctgttaaattttcgatatttatattttaaaaaacaacttttaacgaacaatgcagttttgaacagatttacaagttaatgcacacggactcaact

SEQ ID NO: 6777 - protein, 1041 aa, DROSOPHILA
MWLRQSSGGGVASVGHVGPLRQRPIDAATDCDPRACYDSFCKHWQQAFEIIQHSAPPSHDDVLGVVSHLDYMVTLLLVELHHCNKVSLPAAEASGPPAAPCLEFLLSENLLDKLYEWACTTGRYANAVRLEQLKLYELLVSHSRHQLLCHEPFLRPLLKILASSQGEIFPPDLEKRLVILLNQLCVVLMQNVHLLDLFFFSAQTQVQEQILNGNVAPPKSGTTTNFIIFSLLIPYVHREGSLGHQARDALLLCMALSQKNSNIGTYIAQYSSICPLLVTGLGGLYSRLPNSIEISSIDWHRITPDDVTEIPELTLFMNALEFCNAVVQVAHEMIKQQLLDFMYQGFIVPVLGPAILQTNIDSQISAMSYLDLILRSITEPGLLRAFVRFLLDTEKFDGERILDALVERLNSPDANLCMVTMALFDTLLGLHCEDLMLELLLKFMLPGKHVPISHRHKINKIDPYLNSSEFFLELSPDVMKRARDLARPKSVHEPVVSELTPLPSLPSPVMSKTIGANWNYYGVHTGDSLYANIQAYLFEAHWRIAQCQKDCLKWANSYRYQKWPRHGQGRVHAHALELARQFFSEFGGGPIAANETGEKQLDSLQSIGESSGYESFKWRPADEESEATDTTVATTASEADMDHNSSSLSSVLGASGKRESWRTSNSNRNELILTDLDFSEDLFAQGTVSLGPFLNAIWGKLQTFTSNSLYVNLHLTGLITRLAWYPLPLIHSLLLRSDIAITSDTPSFHQVLRILKQQIDAELPVTEDSLEIIDVARSSLIDREFRLANARKGNEGSPMHHSQQQQMVTNSGQQQGQLRSAYATLSAATPVQATPTSAYDPFKRSDNKRRSISKSITSMFSRKSASTSTAPPNGSSASSGLSQIYAFFTGAASNLVGNNASNDGRGISQAQTSAGTCETSLSTQPPAGASRTGANATSTAASGSNSSIAGSTLTLSAQSNTTTHSASTLHGLDGGPSTGGFNSEPASLDSVASMGIIASTSGTERSRDLALCAVLMDEWLKELAAIAQEQSVVLVTEQGSL

SEQ ID NO: 6778 - DNA, 3309 bp, DROSOPHILA
aaaaaaaaaaaaaatcgaatcaatcacttggaaaagtgagatcaaaaggtagtaattactgagagagcacttaaatgtaggtcaagattttctcaattgctacatgccatactcgaagtggaaagtataattaaacaatgtttttgctcacattcatgtaatgtgttttccatcagataagaccacatcttgtgcttaagtattcatagataaaccgtgaaataaaataagtagaacatgaatttctgaccgtttaagtgaggttttgcctgtcaaaaggaagtatgagaagtgaggaatgaaatagacggactccttggggctatttgccttaccattgttcgtttcaatggcgtatttgcaaatattcccgtgcgtctagtgcaaacatacaatatatcagggttcatccatcttgccccatcctaaccactttacatgtttattatgtactccaatgtggaggcattcgttttgcgggaatatgatgacgcgtgtgcggcaagtaaaccgcaaaaatatgtcataatatttgctttcgccacagtctgttccacgatccgttttgtattattatacatgctcgtgcttcgccttttcgccggctaacagtcacgtgtttaacataaaatttaaataaaaatcgcatacaatatgtaaacggttatatgtacttcctgtggttgcttcatccctccatgggatatattttccgagctttggaacccatttcccaaacgtttgttgttacaatcgtcgtcgactcgtctgcccgttgtaatttccgtctgctaacgcaatttgcgaattcagtccgactctcgcatcctttggcctggtcattaccatttagcaactaaatcagccgaaatcttgccagataagccacaacatatacacattttatgcaaaacacgctcataaagaattgctgggggggctcttttttgcgggggctcatgggtgcagggccattcggaatcatttttgtgagctaattttactggaactgctcggccagattcatttgtcgcactattgtaatgatgctgaaggcgaacttggccacctaaaatgggtcaaatgtgaagtaggcagttggcaggaaagaagtaatccttacggttatgttgctgttcatagagatgggaaagatgcctccggcaatgaagattatgggctgctgaacatggtgcatgaagagcaccagcgtcgccttgtagcgcggctccgcgtccacccagttggactggaaaatctcgttggacagatcctgggcatcgtcgatcagcatgttgcaggtgtagcagaacgggaaggtctgcagcaggatggtgatgacgaacaggagcgaggccacgcccttccagaagttcgagaagaagaacacgttcaccagggtcaggcccaaaacggaaccaatcagcgcgaattgcacgaagatggtgcgggatatcatggggcgaatcatgtcacagcatctgaaagatacgggtaataactaagaagcgcatcttatagatctgcaagcattcccacttcagtatagtcttgtggtccagcacgcagttcaccagatcctgatagttgtctgcctcactgcgctcgggatccatgcgcaggctccgcacgtgatccttgaggacctccatgtgggcccggaacataatggtgaacatcaggggatacgtgtcggatagctggtcctgcagcacggcgaaggacatggtgatgtactcgaatatggcctggatccacaggctgcccatgccatcgcgccaatcgatgaagggattgtagacggaccacggaggacgaccactgagggcgtaggacaggaaagtggaacccgcgtatccgcagtagatgaagctgtagatgagaaaggcgtagttgcagcgcgccaccatattgtggatcctctcgcgatcgctgtcgttcgccagcctcttgtccagggagtccagaaggatctccgtcttgcgcagtcgccagaggaagaggtaggtgatggtggacttcaccgaggcgccatacacattgatgcacacctgcagcgaggtaaggaactcgcccggcgtgaagttcttgaactcctgcacgtagctgatgatgaagcccacgggcaggtaaaacaccccgaaggcgaagggcacgcaggtccagaagagatacacgtagcgcaggactccctccttcggcggaatccatccgatgagccacatggcacggtacagatatatattcccctggcgggactgcaccttctcggtcaacggagccggtttgattagcttgaacaccgccatgatgcccactgaccggtggtcggtgccagcacctgcactttatacccggataccataacccttcaatcgaacaagtgctccattcccgcgctacagacacgccccatcgttttgtggtctgtaattagacttaaccaacggcagccaggtgttaagtgtttaaggggatttattattgaggtgcaagcagccctgtcaactgccaattaactggcttaatagttaattgtcgggtgccctggttaataaaccaatcaggctattcaattcgacttttaaaggggcaatgttaaactactgtattacggcgaaaattgctgccattcttttaaatgattggtttcaatacaaaaattgaaaaattttaatgggttaactttaatgttgacggcaggtattggggatttggcgcatattcatttggtttttgacccggttttgcttcttattaccacatggcactgaagatgctcggcgtctttgagtgtgtaatcacatctggagtggatgtgcaaacactagggatactacgagtatagagtgaaagtgtcgggcagcaaatatttggttaagcgcttttctttgccgtgcactttaaggatctaaggatttatatcgccattgctcctgtcactgaagaacttctcgcccagattcatttggttcacgattgtgatgattgtgaacgcgaacttggccacggctatgttgctctgcaccgaaatgggaaatatggagccggccgtgaattgaatgggttgctgagcccggtgcaggaaatacagaaccgccgacttgtagctcctgtccgcggttatccagtttgagtggaacagggcgttgctcacatggacggagtcctcgatcagatgctcgcagagcatgcagcatggaaaggactctgtacagatggccacgatgaacgacacgtttgccatgatcgtccaaatggtgttcggaaagaagaggatgctgatggccgccagacccaagtcaatgc

SEQ ID NO: 6779 - DNA, 1197 bp, DROSOPHILA
atggcggtgttcaagctaatcaaaccggctccgttgaccgagaaggtgcagtcccgccaggggaatatatatctgtaccgtgccatgtggctcatcggatggattccgccgaaggagggagtcctgcgctacgtgtatctcttctggacctgcgtgcccttcgccttcggggtgttttacctgcccgtgggcttcatcatcagctacgtgcaggagttcaagaacttcacgccgggcgagttccttacctcgctgcaggtgtgcatcaatgtgtatggcgcctcggtgaagtccaccatcacctacctcttcctctggcgactgcgcaagacggagatccttctggactccctggacaagaggctggcgaacgacagcgatcgcgagaggatccacaatatggtggcgcgctgcaactacgcctttctcatctacagcttcatctactgcggatacgcgggttccactttcctgtcctacgccctcagtggtcgtcctccgtggtccgtctacaatcccttcatcgattggcgcgatggcatgggcagcctgtggatccaggccatattcgagtacatcaccatgtccttcgccgtgctgcaggaccagctatccgacacgtatcccctgatgttcaccattatgttccgggcccacatggaggtcctcaaggatcacgtgcggagcctgcgcatggatcccgagcgcagtgaggcagacaactatcaggatctggtgaactgcgtgctggaccacaagactatactgaaatgctgtgacatgattcgccccatgatatcccgcaccatcttcgtgcaattcgcgctgattggttccgttttgggcctgaccctggtgaacgtgttcttcttctcgaacttctggaagggcgtggcctcgctcctgttcgtcatcaccatcctgctgcagaccttcccgttctgctacacctgcaacatgctgatcgacgatgcccaggatctgtccaacgagattttccagtccaactgggtggacgcggagccgcgctacaaggcgacgctggtgctcttcatgcaccatgttcagcagcccataatcttcattgccggaggcatctttcccatctctatgaacagcaacataaccgtggccaagttcgccttcagcatcattacaatagtgcgacaaatgaatctggccgagcagttccagtaa

SEQ ID NO: 6780 - protein, 398 aa, DROSOPHILA
MAVFKLIKPAPLTEKVQSRQGNIYLYRAMWLIGWIPPKEGVLRYVYLFWTCVPFAFGVFYLPVGFIISYVQEFKNFTPGEFLTSLQVCINVYGASVKSTITYLFLWRLRKTEILLDSLDKRLANDSDRERIHNMVARCNYAFLIYSFIYCGYAGSTFLSYALSGRPPWSVYNPFIDWRDGMGSLWIQAIFEYITMSFAVLQDQLSDTYPLMFTIMFRAHMEVLKDHVRSLRMDPERSEADNYQDLVNCVLDHKTILKCCDMIRPMISRTIFVQFALIGSVLGLTLVNVFFFSNFWKGVASLLFVITILLQTFPFCYTCNMLIDDAQDLSNEIFQSNWVDAEPRYKATLVLFMHHVQQPIIFIAGGIFPISMNSNITVAKFAFSIITIVRQMNLAEQFQ

SEQ ID NO: 6781 - DNA, 3545 bp, DROSOPHILA
cattgttaatgaactccgagtggcaggacacgtagagcagggcggacagcttgatctcgtcgtagctgagcaccgaggtcaaagtgaggggttccttttcggcgggcgtacccactgcctcgaagccctcgttaccaatatttccctgcattgtacggtaatagtcgttagcgccaaagaaccacacacatctcttcgccagcaggcgctgcacaaggtcaaccacagtcatgtccttgtagatggccttctcctgctcgctgcctgtaaaacgatgaccagaaaatataaattctttcgattgtgattgtacccaccgaacgtgagcttgtgctctaagaagctgataaagagtaggagggtccgttcgtgaatcaccggataggcggatgcgatttgttcccgtatgcggtcacttcgatcttccggctgtgccttcactcggcaggaatcgatgccaaactaatgtggggggattatatcaatgtcagaagacaattttgcgaaaccaattccaatgagtatacctcggcgggagactgctccgaaatagctttgaaattatcgagatccaccgaagcgtccggctttgccatttggccacattcttgaagcatccgctgagtgaaagcattttccggcagatttgtacgtttaccaggccatatgataatagattttccgcacaaacatgccaatttgggacgttgggagagcatataaagaaaagatctcatcgcactttttggagtcacttttaggagtccggacaaaaaagttcgccgctgataggaatatatgtcaactgtcactggacgatccagtgctgcacaccgacgtcagatttaataacttatttccactgtcacattaactacccaacactcaaaaagatttgaaacgaatttaatatagcttctgaaaagttgttttatttccattcagatatttcgaaattattatagaatccatttccatttcgaagttgcaaacaaacttttctcttgtcaacctacatttattagaaaacaaatggttcttatcaatttagttcgaaagttcacaagtgtctcttccccccttgaatgtgtgtctgaaaatatttgctgttctgtttccattaagagatatttggtaattaaaaaaaaatatatatattaatttctctaatatagcaatctctgttaataattctcgaaacagaaacatgatcgacatactttcaagcactaattactttttacaaggtattttatttaaattacaaaaggatgttaatcatttaaattaaatctgagactgcaacgcattgcgcacacatttcccccagagcttcgtgtgccgccttcctttgctacttccatcctggttttccgctcgggattacacgacgcgcttgacctcgaagaagcgtttcaggtagtacacctggcccactgtcatcaggaccaggacgagggcttcgaaggtggaccacagcaccactcgcgagttggtgttctcgttcaccgaacgatggatcttgtcgcgcacctgagggagtaaagaaattggaggattagtcgtggattacttcacaaataatgtcaatactgattataaccgatggtgaaaacatgagtgtttgaaaatcgctactagttattgtttatgtggcagctagcagctccattccctcgaacaagtctaccgactccgctcttaaatcttgcgacgtggatctgtacaagtaatgctggaggcatgccagactatgtggcaatagttactcgattgctcccatattccatgtacccctaattctgctacatgttaaactcttccaaaacccccaatcatgattatgtggcagctggatgctccatcttcacctcgtctcttcactcacatgcatgtactcctgttcgtgcttgacactggtcagcgtgccggagagctcccgaatcatgtcctccagcttggtgtggcccacctcctcctcgccgggtgctccgggcgcacgttgcggtgcgtcacccacgtcgatggagaacatgaccagcttgggggtcatgctgctgcgttcgttgttgaagcacacggtgtaggttcccttggcgggggccacaaaggtgtacttgccggacgactccttttcgctctcgtgcatcacatggttatccgggccgctgatcttgatgtccacgtctaggaagccaccgtcgatcacctcgaaggtgacgcctgtaaagtcaccatcattttatcagcatagatcccttgtcaattgaccgaaaatccatatcgctcacgtaccaaacttggtgccgccttcgacgttctcgaagaagcactcctcattgtgggcgtccacgctgacgatgaaggcgtggctggtgcggcacaggatcagcaggctgcccacaaggagcagcaccttggcgagtgtcgattccatcgtttgtcttagtacttttggcctggttttaatcgctattaaacgcactgcagccacgtagttgtagtcgattcgatatactccgatagatgtagacaaatagggcatatcgaagaacagcagtttccgatagattcggcatcgataggtgcacgcgacacgcgataccgaatttttaacggatcactacaaaaaactcacaactcataaaaattcaaaagcaacatgaatgccgcgaaatgtttcggttaaagtattggatatcgtaactaatacattactttatttatgtgcgtacctatatgaaaaactcttggtgcattccatcacagttagttaaagtgttctagtatttttgtgctatgtgttaatcggcgactatcgacagttgcccaccattaggaaacagaaagctaaaaaaaaaaatgcaaaaattggccagaatttcggcataaataatagtatcccttgcaaaacttgcaagctgcgtggcaggacgagcagctgaccaccagatcgtcttgaggattcaacatcaggaacaaaggtttcacattggacgcatttgcaaaaaccgaaagggaaaactgccaactcccacacacaaaaaaaaaggaaaaaaaaaatcatcagcacggaaagtaaaaggtcaagtggtcaaccgaaatctgggtaatccgggggaatctttgcaagaatgcagcagaactcggccagcaatcccttcgccatgtccacatatgtggagcggccccaaatgggactggacgtcgaattcggagcggatcctgccagcggagcagctttcttccaatccgatggacgcaagcatgatgatctcaagcaaatgttggacagcaacaaggatggactaaagctggaggccatgaagcgcatcattggcatgattgcccgcggacgggatgccagtgatctgttcccggcagtcgtcaagaatgtggtgtccaagaatatcgaggtcaagaagttggtctacgtctatttggtgcgatacgccgaggagcagcaggacttggccctgctatccatttccacatttcagagggcgctcaaggatcccaatcaacttattcgcgcctcggctctg

SEQ ID NO: 6782 - DNA, 1118 bp, DROSOPHILA
atgccctatttgtctacatctatcggagtatatcgaatcgactacaactacgtggctgcagtgcgtttaatagcgattaaaaccaggccaaaagtactaagacaaacgatggaatcgacactcgccaaggtgctgctccttgtgggcagcctgctgatcctgtgccgcaccagccacgccttcatcgtcagcgtggacgcccacaatgaggagtgcttcttcgagaacgtcgaaggcggcaccaagtttggcgtcaccttcgaggtgatcgacggtggcttcctagacgtggacatcaagatcagcggcccggataaccatgtgatgcacgagagcgaaaaggagtcgtccggcaagtacacctttgtggcccccgccaagggaacctacaccgtgtgcttcaacaacgaacgcagcagcatgacccccaagctggtcatgttctccatcgacgtgggtgacgcaccgcaacgtgcgcccggagcacccggcgaggaggaggtgggccacaccaagctggaggacatgattcgggagctctccggcacgctgaccagtgtcaagcacgaacaggagtacatgcatgtgcgcgacaagatccatcgttcggtgaacgagaacaccaactcgcgagtggtgctgtggtccaccttcgaagccctcgtcctggtcctgatgacagtgggccaggtgtactacctgaaacgcttcttcgaggtcaagcgcgtcgtgtaatcccgagcggaaaaccaggatggaagtagcaaaggaaggcggcacacgaagctctgggggaaatgtgtgcgcaatgcgttgcagtctcagatttaatttaaatgattaacatccttttgtaatttaaataaaataccttgtaaaaagtaattagtgcttgaaagtatgtcgatcatgtttctgtttcgagaattattaacagagattgctatattagagaaattaatatatatatttttttttaattaccaaatatctcttaatggaaacagaacagcaaatattttcagacacacattcaaggggggaagagacacttgtgaactttcgaactaaattgataagaaccatttgttttctaataaatgtaggttgacaagaga

SEQ ID NO: 6783 - protein, 208 aa, DROSOPHILA
MESTLAKVLLLVGSLLILCRTSHAFIVSVDAHNEECFFENVEGGTKFGVTFEVIDGGFLDVDIKISGPDNHVMHESEKESSGKYTFVAPAKGTYTVCFNNERSSMTPKLVMFSIDVGDAPQRAPGAPGEEEVGHTKLEDMIRELSGTLTSVKHEQEYMHVRDKIHRSVNENTNSRVVLWSTFEALVLVLMTVGQVYYLKRFFEVKRVV

SEQ ID NO: 6784 - DNA, 4875 bp, DROSOPHILA
ccctctatttcctctctctccttcttacgcccagtttcgtgtgctttgcttttgcatttgcttttctttgctttgttcaaactcaaacaaactaccccagaaccgttgatcctgactgccttgttgttgctgctgctgctgttgttgttgttgttttgttttctgttatgttatacactcacagacacacgtacacacacgcacacagtgggctggcagacagacgcttaattttccgttttcctcgggaaatcgcaaacaattattcgcttatttttgcaccgaatctgacacttatatgctcgcacttcgaactgcacttccaattggttcgcgcattccttttccggttagaaaacagttagaagtttgccgctgcaaccgctattttcgccaagtctacgactgactttccgagcgcattttcgttttcctccggtgcgaaagggctttcctatagacaaacaaaaaaccgtaaaacaaccgcgaccgattcgttcgagagtcgagtgtctgggtcagtgtgaccatcgctcgaagctgggaaaatacacctctgtagtgtgaccacgtctaggaaaaatcacttggcagcgaggtcacattcgctgttaaccgttctgcgaatcgggaatgttacctatcatgcaaacttttaaaattgaaaatatggttatttttggcgcgttcgatgttccagttgacataaaagtcaattgaataaaaaaccaaaaattttgttataaaaatttgaagagaataactcatgttttagagtagagttcctaggaaacggaagtgccgaagacattaactaagcactcgggctaaatgagtgttaatttggaaaaccatgaattctatagattgaaaacaaattatataaatttaacgtcgtttactttaaataatggcctctgcatttgctgcaaattcaccttttatgcatagaattctttttaagagtcctattttccgatggtatgaaagtgttcgatataacaactaaattatttatttgttcacgttgttgagcttggtgcaaaagattataaaagtcatcgtcagcattatcacacaagtccacagcttaggaaaatcaacgaaaaaggtgcatatacaaatataaaaacaacttaaacgctttgtaaagcaaacaatacaaaatatgcgatgctccagcagagcctcctttaaagcttgtccacccgttccacactgagtttgatgtccgacttgggcatcaagagcagtctccggttgtcgtactccacgggaatcgaggtctccgcagagggagcgtatctgtgctgcctcagcagagccaccaggcccaccagaagctgctgctctgcaaagcgagcggcaatgcatcctcgcaggccatcgccgaaaggcaggaacgcagctgccgggcgggatcgccttgcctgttcctcaaagcgctccgggtagaaccgctgggggttttcataaatgccaggatccatgtgtatcgccgccgttggtatcagcacattgttgcctttggcaattacaaacaccgatccgggcacttcgaattctttggtagcccggcgtagcaggaagggatgtggagtgtgcaggcgaagcgtttctaaaaaaaaggtgaagtcattggagctataaagagcttttcaatatttggtactcaccattgaggacttgcttcgtatacctgagctcccttaggcactccggtgtcacttggccaccatgctcctccagtgccttgttaatctcgagcctggttcgatcttgcacctcaggctggcgggccaactcgtagaggcagaatgctagggtggcattcagggggcccaagccagccagaacgaagccgaaggcttggcccgcaatctcgatgtcggtgagcggcttttctgcgttggaatatagctgcagaaaggtctggagtggctggcgatcccttcttcgatgcaactgcaactgcgacagggccactttttggaagtaagctgtagcaggttctgcgtagcttttgtactgaagaaggcgagcgatgagcggaaactcaagcgccagataagcctgccacatcctaaagtccgcccagtagttgcgcgtccacttagcgaactccacgttatcctgccctactagtccaaaggccattgacgccataacgtccgtattgtatgcacccacgagttcgcttatattgatagtttgaaggctcttttcgcccaggtccctttgaattctggaggagatttgcgacagtctgaccagcagcttctgcatgttggccggagtgaaaacctctgcagatttggcgtgcagtgaccgccacttgtgaccgtccagctgaaggagattatgcgacagcggctctccactgggattactataaaggcctcgggacgtaaagtgtcccgcgtcggtgaagattatttggtggactagcttcaggtccagcgccaagatgaacggcttgaggcaggcgtagaatcccacaaacggcgccctgcccttgtatgcggtgtagatatcctgcaaggcgtcctgggcatgcctcttcccgctcaccacgcccttaatgttgccccacaggaacttgggcttttcgtgcaggatcccccgccgtttccagtagcccagactgaacttgaccagggcgtagaccactgacagcgcacccagggcggtgagcagggtgcggtgcattagatccatgctcactcagctgtcttttccggcttttacaatatgttcgcgctgtttgatatgcttaacagctggcagtagctgcttgtcgaggttctggggctcaatgccgccggtttatcagcgccattatcgtgcggtccgatttaataattgataaggtccattgagtatcggccgctaaaatggaagagaaacgtggctataaggcaactttcagtaagtaatagtaatcaagagctgagcgggatttattgctaaaataggtacggagagttgcgactacggctgcaagatgaggcagaggttgtacgtgctgccggcgaactcgtcaacgggcacccaacgaacgtagcccagatcgattaagtgctgccgggagctgggcacgcctacgaaatgcggatcctaaaaagggaagcgagcgattagttcaccagttcataaaatgagctaattcgctgactcaccaccacctgcaggaagatgcgaccgcgtgcactgcaatggtagccggtaatagccttggaggcggtgtcactcagaccgcccatggcgacgaagccttggtacttctcaaaatagctccgaagctcgccgaggatctcgtccgagctaagctccttggcgtgaagaatcttgcacggcacctggtgcagcacatcgatcacgtagaactcctcgagcgttccgatccagtcgcgcgagcccacgaactctggacccttgtcgccgatggccaccaggatctgctgaatctcccggatggaaggaacatgaccgctcgacccctgtcgacgttggatccaggaaatggccgattgcagggtgcggtagccacaaccccagccagcatcctggtggccatcgcatccgtagtggaagtagttaaagccaccgcgggtaactagcgtccgcccgccttcagtgggcgtggtcagcgcgccttgcggatcctctagaagtggatatgcatagtcctttggtacaattttcaaggacgccgcggaggagtccccaaactcttctgcacacttttccgccgccataggaattgttttcgaaactgagtaatttgatagcctaggcctgattcacctgctccttttcttttttgtttatttaccttgggcagccgtaatttgttttgtgaaagtgaaatcgcagcaaagaaattggaatgtttttttttttgctctggctagagatggtacaagctgaatcgtcatgcaccaatgacaaagtcagccaaaataaaataacaataatgcggaaaataaaattaacgaatataagaatgagtcatgatgaaaggctattccgcccaaaattttgataaaatttatatttttatattaagcaatgttgtcataattgttttactacaattatccatcaccaactctctcatcgaattatcgataacagcccgtttgtagcgcctaaatttaaacgcatctatttggttttctcttatttctcatgcatttcaaattttatttgaattattaaatgtacattattgtgtttagagttcataaatatgttttcgcatttatgtgtgtgggtgtctcaacgctttatatattaacaccattccccttgaattgtgttcgtttaatttttagtttttggtgaccaaacattagtacatcgtttttaataattggtaaaatttgtagcactccataaactacgatttgtaaaattgaaatatttgcattattggttttcaactattttcggattgctgattgttactgagttgcagttttgttaatgttttaaagttagcttaaaaatgcattttggataacttcgccgagttttacaataaatatatgggatgccgtttgcaatatgtgtctgtgcaccaattaaaataccttaattacgtcgtgcgtctaaatgttttgttatcttctcgtttttggtttgtgccagcaacggtttaaaagaggtcgattgaaaattataagtacaatcataaaatacatttattaaatatatttagcgatatcaccacgatttgttgttattgtgctcttaaaaatcatgtaacagaaaagattaatatgctaaattattaatattattatatttatacgtatatgttatgtatgtatgctataaatattcatacgatttgtgactccttactacatc

SEQ ID NO: 6785 - DNA, 1871 bp, DROSOPHILA
tgcgatttcactttcacaaaacaaattacggctgcccaagcggccgatactcaatggaccttatcaattattaaatcggaccgcacgataatggcgctgataaaccggcggcattgagccccagaacctcgacaagcagctactgccagctgttaagcatatcaaacagcgcgaacatattgtaaaagccggaaaagacagctgagtgagcatggatctaatgcaccgcaccctgctcaccgccctgggtgcgctgtcagtggtctacgccctggtcaagttcagtctgggctactggaaacggcgggggatcctgcacgaaaagcccaagttcctgtggggcaacattaagggcgtggtgagcgggaagaggcatgcccaggacgccttgcaggatatctacaccgcatacaagggcagggcgccgtttgtgggattctacgcctgcctcaagccgttcatcttggcgctggacctgaagctagtccaccaaataatcttcaccgacgcgggacactttacgtcccgaggcctttatagtaatcccagtggagagccgctgtcgcataatctccttcagctggacggtcacaagtggcggtcactgcacgccaaatctgcagaggttttcactccggccaacatgcagaagctgctggtcagactgtcgcaaatctcctccagaattcaaagggacctgggcgaaaagagccttcaaactatcaatataagcgaactcgtgggtgcatacaatacggacgttatggcgtcaatggcctttggactagtagggcaggataacgtggagttcgctaagtggacgcgcaactactgggcggactttaggatgtggcaggcttatctggcgcttgagtttccgctcatcgctcgccttcttcagtacaaaagctacgcagaacctgctacagcttacttccaaaaagtggccctgtcgcagttgcagttgcatcgaagaagggatcgccagccactccagacctttctgcagctatattccaacgcagaaaagccgctcaccgacatcgagattgcgggccaagccttcggcttcgttctggctggcttgggccccctgaatgccaccctagcattctgcctctacgagttggcccgccagcctgaggtgcaagatcgaaccaggctcgagattaacaaggcactggaggagcatggtggccaagtgacaccggagtgcctaagggagctcaggtatacgaagcaagtcctcaatgaaacgcttcgcctgcacactccacatcccttcctgctacgccgggctaccaaagaattcgaagtgcccggatcggtgtttgtaattgccaaaggcaacaatgtgctgataccaacggcggcgatacacatggatcctggcatttatgaaaacccccagcggttctacccggagcgctttgaggaacaggcaaggcgatcccgcccggcagctgcgttcctgcctttcggcgatggcctgcgaggatgcattgccgctcgctttgcagagcagcagcttctggtgggcctggtggctctgctgaggcagcacagatacgctccctctgcggagacctcgattcccgtggagtacgacaaccggagactgctcttgatgcccaagtcggacatcaaactcagtgtggaacgggtggacaagctttaaaggaggctctgctggagcatcgcatattttgtattgtttgctttacaaagcgtttaagttgtttttatatttgtatatgcacctttttcgttgattttcctaagctgtggacttgtgtgataatgctgacgatgacttttataatcttttgcaccaagctcaacaacgtgaacaaataaataatttagttgtt

SEQ ID NO: 6786 - protein, 485 aa, DROSOPHILA
MHRTLLTALGALSVVYALVKFSLGYWKRRGILHEKPKFLWGNIKGVVSGKRHAQDALQDIYTAYKGRAPFVGFYACLKPFILALDLKLVHQIIFTDAGHFTSRGLYSNPSGEPLSHNLLQLDGHKWRSLHAKSAEVFTPANMQKLLVRLSQISSRIQRDLGEKSLQTINISELVGAYNTDVMASMAFGLVGQDNVEFAKWTRNYWADFRMWQAYLALEFPLIARLLQYKSYAEPATAYFQKVALSQLQLHRRRDRQPLQTFLQLYSNAEKPLTDIEIAGQAFGFVLAGLGPLNATLAFCLYELARQPEVQDRTRLEINKALEEHGGQVTPECLRELRYTKQVLNETLRLHTPHPFLLRRATKEFEVPGSVFVIAKGNNVLIPTAAIHMDPGIYENPQRFYPERFEEQARRSRPAAAFLPFGDGLRGCIAARFAEQQLLVGLVALLRQHRYAPSAETSIPVEYDNRRLLLMPKSDIKLSVERVDKL

SEQ ID NO: 6787 - DNA, 3530 bp, DROSOPHILA
tatatatatatagagagagagagagagaaagagcgagaggcaagtgtacatacgtagtgcagtcggtagaacagtgggaattcgagcgagatgcggctatataatgccgcactgctcgccgggggcgtgtgcaccgttacagataaaatgctattgttgataaagaataatattatattatattatatttgagcataatgttgttgtgaatgttatatcactgttttcgatatacgacgctgtttcagaagtataagtatacagaacagaagtgttttaaatacgattcatttgtaataatgaaaatgccaaaaaaaaaagcaaaaaaaaaaaaaaagaaatcaaacacaccaaccacaccaaaatacaaacacactaagattcaggattttaagatataagatggggtactgggaattggattatttaacccatggccgaaaacgaaatgggatcttgtgttacttgttgctatctatatgcagtacattacaataatatcacatttctgtcatttgacagctaataattctattcaatttcaataaacgaactcagtaatggttaacacacacaatcaatttctcattcaatggaattgttggcatgcgggcattgattctttagaagaatatggtggtttgttcgcacagctggctttccatgattccataagttcatatgttcatatgtacatatgtacatatgtacatatgtatcagcaaaaaagctgatctctttattgtaatatattttaaggattacatagtgcttagatacattgtgtttacacaatcagtcgcctagcgtagtcgcctacatggagtagtccgtgttccactgatgcaatgtgcagattggctccgttcatatagtgcacattaatgtggggattttggagttcagagattaaagtggaacaggctgctgctggatccccagtgctgattagcatattctgtagggaaataagcattacaaattgtaaaccttagtagagtcacttcttgcataccgcccaaaattcgttgccaggcagggcatttccatcccaggcgtatgtcaccacgggcaacatgtcctccgttagtttgtctccgggatttcggaccgaattgcgaatgcgaatgccaccctggggatgtttgtccacgggaatgatggctccgtcatgcaagctgcccacacatgccaaatgaaaccatgagaagtgtaccactccgatgtggcttagtcgttctccaagtgcccgcaatcgtccctcaaaagattcaaggaaggtgcgctcctgctgtctagctgccttccaaacgcccagtccgatgccgaccacatggatataggcgggcttaccagccttaaatgctctgtcctgtgcctccaagagcagggtgtcgaaactgatggcatatcgcttgcgcattacctggtgatcgaagatgccctgagaaacctcttcgaaacgcgtagtatcatacggagtgtcggcgtaaatgaagtccctgggctcctcgtagaactcgcgccagattctgcgcaaatctgatgcaggtgtgaccgtctcgctggatatctgttccaaatcgaaaccgtagccattggcctcagtattttgggttttagtaatcatgatatcctggtactccatcacatcgggacgctcgaaacgagctccaattagtccaatcacaacgccctcccgttcgatagtgtccttattctgcagcacctcacccccattgaccctactgccattgttaatgaactccgagtggcaggacacgtagagcagggcggacagcttgatctcgtcgtagctgagcaccgaggtcaaagtgaggggttccttttcggcgggcgtacccactgcctcgaagccctcgttaccaatatttccctgcattgtacggtaatagtcgttagcgccaaagaaccacacacatctcttcgccagcaggcgctgcacaaggtcaaccacagtcatgtccttgtagatggccttctcctgctcgctgcctgtaaaacgatgaccagaaaatataaattctttcgattgtgattgtacccaccgaacgtgagcttgtgctctaagaagctgataaagagtaggagggtccgttcgtgaatcaccggataggcggatgcgatttgttcccgtatgcggtcacttcgatcttccggctgtgccttcactcggcaggaatcgatgccaaactaatgtggggggattatatcaatgtcagaagacaattttgcgaaaccaattccaatgagtatacctcggcgggagactgctccgaaatagctttgaaattatcgagatccaccgaagcgtccggctttgccatttggccacattcttgaagcatccgctgagtgaaagcattttccggcagatttgtacgtttaccaggccatatgataatagattttccgcacaaacatgccaatttgggacgttgggagagcatataaagaaaagatctcatcgcactttttggagtcacttttaggagtccggacaaaaaagttcgccgctgataggaatatatgtcaactgtcactggacgatccagtgctgcacaccgacgtcagatttaataacttatttccactgtcacattaactacccaacactcaaaaagatttgaaacgaatttaatatagcttctgaaaagttgttttatttccattcagatatttcgaaattattatagaatccatttccatttcgaagttgcaaacaaacttttctcttgtcaacctacatttattagaaaacaaatggttcttatcaatttagttcgaaagttcacaagtgtctcttccccccttgaatgtgtgtctgaaaatatttgctgttctgtttccattaagagatatttggtaattaaaaaaaaatatatatattaatttctctaatatagcaatctctgttaataattctcgaaacagaaacatgatcgacatactttcaagcactaattactttttacaaggtattttatttaaattacaaaaggatgttaatcatttaaattaaatctgagactgcaacgcattgcgcacacatttcccccagagcttcgtgtgccgccttcctttgctacttccatcctggttttccgctcgggattacacgacgcgcttgacctcgaagaagcgtttcaggtagtacacctggcccactgtcatcaggaccaggacgagggcttcgaaggtggaccacagcaccactcgcgagttggtgttctcgttcaccgaacgatggatcttgtcgcgcacctgagggagtaaagaaattggaggattagtcgtggattacttcacaaataatgtcaatactgattataaccgatggtgaaaacatgagtgtttgaaaatcgctactagttattgtttatgtggcagctagcagctccattccctcgaacaagtctaccgactccgctcttaaatcttgcgacgtggatctgtacaagtaatgctggaggcatgccagactatgtggcaatagttactcgattgct

SEQ ID NO: 6788 - DNA, 1412 bp, DROSOPHILA
cttttttgtccggactcctaaaagtgactccaaaaagtgcgatgagatcttttctttatatgctctcccaacgtcccaaattggcatgtttgtgcggaaaatctattatcatatggcctggtaaacgtacaaatctgccggaaaatgctttcactcagcggatgcttcaagaatgtggccaaatggcaaagccggacgcttcggtggatctcgataatttcaaagctatttcggagcagtctcccgccgagtttggcatcgattcctgccgagtgaaggcacagccggaagatcgaagtgaccgcatacgggaacaaatcgcatccgcctatccggtgattcacgaacggaccctcctactctttatcagcttcttagagcacaagctcacgttcggcagcgagcaggagaaggccatctacaaggacatgactgtggttgaccttgtgcagcgcctgctggcgaagagatgtgtgtggttctttggcgctaacgactattaccgtacaatgcagggaaatattggtaacgagggcttcgaggcagtgggtacgcccgccgaaaaggaacccctcactttgacctcggtgctcagctacgacgagatcaagctgtccgccctgctctacgtgtcctgccactcggagttcattaacaatggcagtagggtcaatgggggtgaggtgctgcagaataaggacactatcgaacgggagggcgttgtgattggactaattggagctcgtttcgagcgtcccgatgtgatggagtaccaggatatcatgattactaaaacccaaaatactgaggccaatggctacggtttcgatttggaacagatatccagcgagacggtcacacctgcatcagatttgcgcagaatctggcgcgagttctacgaggagcccagggacttcatttacgccgacactccgtatgatactacgcgtttcgaagaggtttctcagggcatcttcgatcaccaggtaatgcgcaagcgatatgccatcagtttcgacaccctgctcttggaggcacaggacagagcatttaaggctggtaagcccgcctatatccatgtggtcggcatcggactgggcgtttggaaggcagctagacagcaggagcgcaccttccttgaatcttttgagggacgattgcgggcacttggagaacgactaagccacatcggagtggtacacttctcatggtttcatttggcatgtgtgggcagcttgcatgacggagccatcattcccgtggacaaacatccccagggtggcattcgcattcgcaattcggtccgaaatcccggagacaaactaacggaggacatgttgcccgtggtgacatacgcctgggatggaaatgccctgcctggcaacgaattttgggcggtatgcaagaagtga

SEQ ID NO: 6789 - protein, 456 aa, DROSOPHILA
MRSFLYMLSQRPKLACLCGKSIIIWPGKRTNLPENAFTQRMLQECGQMAKPDASVDLDNFKAISEQSPAEFGIDSCRVKAQPEDRSDRIREQIASAYPVIHERTLLLFISFLEHKLTFGSEQEKAIYKDMTVVDLVQRLLAKRCVWFFGANDYYRTMQGNIGNEGFEAVGTPAEKEPLTLTSVLSYDEIKLSALLYVSCHSEFINNGSRVNGGEVLQNKDTIEREGVVIGLIGARFERPDVMEYQDIMITKTQNTEANGYGFDLEQISSETVTPASDLRRIWREFYEEPRDFIYADTPYDTTRFEEVSQGIFDHQVMRKRYAISFDTLLLEAQDRAFKAGKPAYIHVVGIGLGVWKAARQQERTFLESFEGRLRALGERLSHIGVVHFSWFHLACVGSLHDGAIIPVDKHPQGGIRIRNSVRNPGDKLTEDMLPVVTYAWDGNALPGNEFWAVCKK

SEQ ID NO: 6790 - DNA, 7911 bp, DROSOPHILA
ttttttatgtgcggtggcggggtttagggggaatacaagtggtcgaaacgggggtggccgaatctccgtgaaaggggtacgaggggcggcaaatgtggcaaacttggcgcccaagtccaattgacctacagcgcgttcatttgaagttcaaaacctgaccatgaagtcgcagatgctcagcggaaatcaaaaccgaaactatgcgcattcatatgaatccgcccccccccccccctccacacacacttgtgctaaggtcgttgatgggatttacccagaaaaaagagaattaagagtcattccgaagatttaataagtcgtctgcaataaaggttttaattgttagatgtttgactgagatttgtacaaacacgaattgatcaaaactctttttattaagcacttgattttttttttttttttatatatattctaaattagacacaaatttaataactattatgtaagtttttaatatatatgtatattgacatgtagaattctttggaaatatttcaaagaagttctgaactttgttcctaatgttatttagtatagtatattcctgctaaatcaacagatggtctggcttaaattatctattatctagaccgcatttcaccgcttggctttctctgttcgattgaagagccttaaggtattcaaatatatgcctggataatcagtaagcctttctccccgtgacaaaaatcccccgcgaaagagaaaatatctaacgatgcgggaacccctttgaaattatagcccattcgaacttgtgatcgaaacaggaaaaaaaccaaccagcgcgatgtgatcagtgtttgtttattgttccccctctaaaacgagttaaacgtgaattttggttttttttttttttgtttttttcgggggtctgtcgcatcgaacaataggcatattgacgattgggcgtcaagtcgggcgttaattattgattagtttaaagcccgattaacaaaccggcaacgggcttagaacgaaacgaaacgtccgacgtccaacaactaacatcgcgctctccaaaaacgcgtaaaaaaaaaaaacaagaaaaaatctttaaggtacacggaaagaaagtttctattaatcttttgtctggtttaagtgctaatatacaagagtgttgaatgtgaaacgtgtataaaaaaataatagaatgaaaggctgtcaagccttccatggattgaggaagtaaatgtaaacaattttttttcagtgcactaagagaagagctacggagcagaactggcggaacaacaaactgaacaacgacaccgcaaaaaacacggcggagagacaataaaagtcgcccagctgccaaaaaggcgctcattgcgtgcgctgttttcgcaacggcaacggaaaattagccacccggttgcggtgcaagcgagatagcgagtgtacggcaacggaatacggattttcagagtgcgggaaagtacgaaaagtacggaatacacgagaaccggaggcaggagcacaaagaacggagaacggcgaacggcaaacggagtggggatacgtagccaggatgcgacacgcatttgttggattaattgtgtgctggctggcagtttgtcaaccgcaaggtaaatatttttggaaaacgccatggcggcgggaatcgggtatagacaggataatgacaggatatatatacccacgcacacacgcacacaagcacacatactcggtgccttttgttattacagcaataattgcaaaattatcgctggattttgcgcctacgtgcgttgcattgtcaacagaaacagaaaaaacataggaatgtgttcgttcacaaaagaagaaagagataggaatatggcggacgaaagagatggttggatggatggagtgacagaaggggactaaaggcttattcatgttataaccgccttttaggtcgcattattgagaatcaacggattgcatccacatcagcaaatgaaagaagatattcacgactgaaatccttaagattccatacaaatagatcgatcgaaatgggggaacattgataaaaatttcaatgtatcattacatgactattcaaaacattcggtaaaaatgttcctcacttgcttctgccaataccttttgctggatatttttaaaataaacaatatcgttgagataaacaccaaataccagttagagatcatccacactttcatctcttttcggcaaccagccatctccttcgtttctgtgcaatctaacaaatataaaagcgaccaacaatacccgagaagtagaataaaataaaatgtgtggaacaagtttggcgagaagattataaatgcatggcattgggggaattgtgtttacttttgactgctgtcagagcaacaacttgcgtaactttccactgatgtttgttaccacttttttacgctcgctttagttgcaagcaaaacgttgaaaagccagacaatcgcatgaaatccaaaaaaccgattaccatatgttgcgacaacgcggcgtatgaacaataaatattacttatacgcaccgtgatacaaaaaaggcaaactggagtcaaatatctttaaactccataaacaacattattttttttttttttagctgaggcgcagtttggcggctttggattccagccacagttcgcctaccagcagccgcagttccaacaggtataccgccaaccgcagttgcaaccgcaggtgtatcgccaaccacaggcttaccaacaacaacctttggtttattaccaacagccccagcagccacagcagttccgccagcgacagggatccgtttccaaggcgaacacgaatgcctacgagcgccaggtggactttggcaacaaccttgagtacacccagggtgtgtccaattcacgagcggttaccaaacagaatggccagcgtgtggtgaccaagagccaggcgcagacgagggatgtcgatctgggtggtctgcagttgggcaacacactaaccaggaccaggacgaatgccaatggtcaggtgtcgcagggcattgccgatcagttccgcatcggaaacgtgggactcggagcctcgctgtcgccacagaatcttcagaatggcttcggactgcagcgtggcgccgatggagaccttcgcctgggcttgggtctgctcaacttggatcttgaccgcaatgtggccaattcgaacaccctgtcgcaggcgcaggtaaatgccaacggcaagggtgcccgggctggatcgaacagcaactcgcagtcgaacacccagcactttggcggcgtcaccgtcaccgatacgcgcgccaactcgaatgcctttggcaaggcgcaaaggggacagacctcggccaccaccggcggcttcggcggcaatgcggccaccaatggccagagtttcggtggtcccttccagcgagttgtgcgccagaataggcggcccaagcgaaaggctcagttcgtccccttcgggtatcctcgaattggtttcggccccgtcttgagtcccttggaaagaccgaggaggcagttcggcaggccgggtttcggtggaccaggatttggaggaggtgagtttggtaattcctagacaacatggtcaacatactgaaaatgtattactaaaaacccaaatatgctcagaattcggtggaggacctgggtttggaggacctggctttggaggtcctggttttggaggacctggcttcgagcaggagttctacgagcccgaacgtcagcaacacaagaagaagggtaacaagaaccaggcgcatggcaatgcgaatgcccaaggtggacctggattcaaccagcaggcctcgagcaataaccacgccagtcccggcaacacgggcagcagttccatcagctccaatttggcccaggacggcagcagtggccaggtgagctcggccaatacaaacacccatcagggccaaacggcgaacggtggctaccagagtgaccagaactcgcagagccaggcgctcaacttccggccgggcgagcagcaggcctccagcgcgaatgcgaacactcagcacacccagcagggcaatcgcgacacctatgactcgaacagtggatccacctccacgaacaacaacaagtttggctccgcgacgaacacggccaacacgaactcgcaggtggtcagggatggcaatcgccaggatgcgaccagcgatgcgaacagtcagagcatcttccagggcaacaatggccagggagacgcctccgctcagacgaatgcgcagacgagcagccagcaggggcccggaggatttatcagcaactcggcctccagcagtgccaccgccaccgctgggaatggacagtcggccaatgcgaattcgaacgcgaatgcgggcggaggtgtaggtggtgcgggcgcaggagccaatgctggcggatttggaggcggtgctgatgccaattccggtgccaatggcggtggcggcagtgctggagcgaatgccggtgccaatggtggcttcggtggattcggtggattcggtggcttcggcgccggcggtgccggcggtgccaatgcgaacagcaatgcctttggtggctacgatggattcggattcttcggacgttagttttagactttaattttctaaagactcacccaacttttttttgtcaccccacgaaaagcacaagaataaaaatgcattttgttaatttaaatcccacaattgagcactgcaaatcgcgtagcgactgtctagcacactccaaataacgatcgttatcactttcacatattacatatgtacttgtttcatcatcgttcggcatgttttttttaaaaaaaaaagcacattgatattggcacaaatgggtggtccaactgacgagcacctctaatatttgccagtgtctattgaaatctctgcagttcgccaacgtgcccagcaaaagattcgcttgcagcgctggcagccacgcacccagaacggaacatcatccaggggcacctcgactaacgaaaactttgagtatgtgtacttcaatcgcacatcgtcgtcgtcccgcctcgaagatctgcagcctgacaatgacgatagctctggccgggatttggaagtggctgggacaccgctgaatacttcggtggatgagttcggaccgtacgatagtacgcagcgtcagggacgcaccttcagcgtgatctatgactggatcagcggatttttcaactcctgcgtctcaccctgcaccttggaggccttccagaagcagacctgctgtgaaacctacgtggttgatccctcgtatccaccaccaccgccaccgcctccgccaccaccacctccacagacttgctgtgcaccggtgagaccaccctacgccccaccagttagaccactgccaccaccaccaccgccgccgccacccgtgccctacccctatacaccgatctatcccaataagaagacgcccgtggtggtggtggccacgcccatcaactgctgcacagtctgcaccttcacgtactacggaccaccgccctgtgggcggctctacaacaacagcagcagcggaagcgatggcaagaaggtcaccatctatgtgccaccaccctattatgggcggtaaaacaagtagacccaaccaaccatagttacctgctcatcgcacgaaacttttatttttaagtctttttttttttcgacaataaaacgtgatttaatacaaaaagcgaagcctgcgatattacatttagcaagaaatttcgtaccctaatatacatttgaagatcatttaagtataataatgatatgaatttcccgcgaacaaacaaattttaaaagccccaaaagtatgctcgagtaatcaaaagaaaacattcatttctgtacttctagggatttcaagtaatgagattaattgctttatacagcagtggaacattctcggaaatttgccattttacatatcgagaaaatcaagattacacgtttgacttctttaaatataagcagaaaagtggatttctaaagtttaaagcggaaggcggaaggccggctgaatgtggcaatatttttaccgtatgtctggcccataaggtccccttttgttttgtttgtttttcgcctggctaattcggaaagcgcttgcataatctccgtggaatggggctttgttgcttgggggaatcctgtcaaaaatgcggcaaataagacacacgactgggcaaaggggcgatgtgcggggtgtatgtaggtaaatgcactcccgtagaaataaagttttgataccctgctacatgtgaaaagttctcaatttccagttgtttcatatgaaaattaattgtggatcgaatatcgctcttattagatttctaattttgtaaaccaaactatgggatttcatagttgttcatagtatgttctagtttcctatttccggcagatttagttcatttttggcatatgtttaaggacattctctattcgtggtttcacattagaatggcaggttaacgtgtcccatctttgtggcgcttttgttgtgcggctgcctttctttgcgcctcgtgtgccgttgacttttgcgcctaagcaaaatttgtgccatgtgttttgtggccgctttgtttgttggctcaaaattgctggcaggctgccacacgaggactctttgggactgcgatttggactgggatcgggacaccgaaaccgaaactgagactgagactgaaactgaggatggggatgaggataaagtcgaggacgaggccgagtacgaaacgagacacagacaggacttgtcacgtcagcggcacaaagcccgagcacaaaggcctgataactgcagtcgcctgataagcagcgccccaaacaaggatctgcccatctacttggcgacactcgaaaaaggggtggatatttaaatgtttataaacataaaacttagattaattgaaccttttaaaaccagtgctttttgttgtaataaattggttggtttaccattgagacaacttttttctttttaaaggttcttctttgacccccaatttatccaagtgtggcctttttaccccagggcccactgaagacccttcgccacccggaagcacaagtcccttcttttgtcatttcgctcataacgttaatttatattcagttcagtctaaaaaaaaaatgtagaatagccagtggtagtgtaagtacacctagtacagtgaagcccgtgtgacagccatcgagagaaggaatgtggaagtttggataggttgcttgtttaaattaaaggatcctagttgtagaactgctggcgacggcgctgtgccggagcggcggccacaaagcgacgtcccgagtttccggcggaggaggagccctcgttggcggagtacagaagcaggggtatctcctccacgctggtctgctgctgctgggcagagttgcgcacgccggagcggagcagctcgtcggcggataggcggcgcagggcggcgggagcgacggctacaggagcggcgactggagcggctccgtctaacagctgatcctcatcgttctctggctgctccagtaccacatcctcgggctgggctacggcaatgctgttgcccacgggggcctcgccttcattgtcggcagccgagatcgagctgctctgcagcagagcctcgatgttctccaggttggacagaccgttgatctgcagctggtcgtgcagctcggcaggaatggcgatggcctggacatccttgtgaccggaaattccattgggtgtcgggatgaactgaacgttctcgggaatctgatcggtgggatagacgggcaccagctcggcctcgttctcgttgcttgacttcagcaggatcagagagatgggcacgatcttcttgaacttaagcagaaccagcttcttaatggccacgg

SEQ ID NO: 6791 - DNA, 3309 bp, DROSOPHILA
acgaaacgaaacgtccgacgtccaacaactaacatcgcgctctccaaaaacgcgtaaaaaaaaaaaacaagaaaaaatctttaagtgcactaagagaagagctacggagcagaactggcggaacaacaaactgaacaacgacaccgcaaaaaacacggcggagagacaataaaagtcgcccagctgccaaaaaggcgctcattgcgtgcgctgttttcgcaacggcaacggaaaattagccacccggttgcggtgcaagcgagatagcgagtgtacggcaacggaatacggattttcagagtgcgggaaagtacgaaaagtacggaatacacgagaaccggaggcaggagcacaaagaacggagaacggcgaacggcaaacggagtggggatacgtagccaggatgcgacacgcatttgttggattaattgtgtgctggctggcagtttgtcaaccgcaagctgaggcgcagtttggcggctttggattccagccacagttcgcctaccagcagccgcagttccaacaggtataccgccaaccgcagttgcaaccgcaggtgtatcgccaaccacaggcttaccaacaacaacctttggtttattaccaacagccccagcagccacagcagttccgccagcgacagggatccgtttccaaggcgaacacgaatgcctacgagcgccaggtggactttggcaacaaccttgagtacacccagggtgtgtccaattcacgagcggttaccaaacagaatggccagcgtgtggtgaccaagagccaggcgcagacgagggatgtcgatctgggtggtctgcagttgggcaacacactaaccaggaccaggacgaatgccaatggtcaggtgtcgcagggcattgccgatcagttccgcatcggaaacgtgggactcggagcctcgctgtcgccacagaatcttcagaatggcttcggactgcagcgtggcgccgatggagaccttcgcctgggcttgggtctgctcaacttggatcttgaccgcaatgtggccaattcgaacaccctgtcgcaggcgcaggtaaatgccaacggcaagggtgcccgggctggatcgaacagcaactcgcagtcgaacacccagcactttggcggcgtcaccgtcaccgatacgcgcgccaactcgaatgcctttggcaaggcgcaaaggggacagacctcggccaccaccggcggcttcggcggcaatgcggccaccaatggccagagtttcggtggtcccttccagcgagttgtgcgccagaataggcggcccaagcgaaaggctcagttcgtccccttcgggtatcctcgaattggtttcggccccgtcttgagtcccttggaaagaccgaggaggcagttcggcaggccgggtttcggtggaccaggatttggaggagctgggtttggaggacctggctttggaggtcctggttttggaggacctggcttcgagcaggagttctacgagcccgaacgtcagcaacacaagaagaagggtaacaagaaccaggcgcatggcaatgcgaatgcccaaggtggacctggattcaaccagcaggcctcgagcaataaccacgccagtcccggcaacacgggcagcagttccatcagctccaatttggcccaggacggcagcagtggccaggtgagctcggccaatacaaacacccatcagggccaaacggcgaacggtggctaccagagtgaccagaactcgcagagccaggcgctcaacttccggccgggcgagcagcaggcctccagcgcgaatgcgaacactcagcacacccagcagggcaatcgcgacacctatgactcgaacagtggatccacctccacgaacaacaacaagtttggctccgcgacgaacacggccaacacgaactcgcaggtggtcagggatggcaatcgccaggatgcgaccagcgatgcgaacagtcagagcatcttccagggcaacaatggccagggagacgcctccgctcagacgaatgcgcagacgagcagccagcaggggcccggaggatttatcagcaactcggcctccagcagtgccaccgccaccgctgggaatggacagtcggccaatgcgaattcgaacgcgaatgcgggcggaggtgtaggtggtgcgggcgcaggagccaatgctggcggatttggaggcggtgctgatgccaattccggtgccaatggcggtggcggcagtgctggagcgaatgccggtgccaatggtggcttcggtggattcggtggattcggtggcttcggcgccggcggtgccggcggtgccaatgcgaacagcaatgcctttggtggctacgatggattcggattcttcggacttcgccaacgtgcccagcaaaagattcgcttgcagcgctggcagccacgcacccagaacggaacatcatccaggggcacctcgactaacgaaaactttgagtatgtgtacttcaatcgcacatcgtcgtcgtcccgcctcgaagatctgcagcctgacaatgacgatagctctggccgggatttggaagtggctgggacaccgctgaatacttcggtggatgagttcggaccgtacgatagtacgcagcgtcagggacgcaccttcagcgtgatctatgactggatcagcggatttttcaactcctgcgtctcaccctgcaccttggaggccttccagaagcagacctgctgtgaaacctacgtggttgatccctcgtatccaccaccaccgccaccgcctccgccaccaccacctccacagacttgctgtgcaccggtgagaccaccctacgccccaccagttagaccactgccaccaccaccaccgccgccgccacccgtgccctacccctatacaccgatctatcccaataagaagacgcccgtggtggtggtggccacgcccatcaactgctgcacagtctgcaccttcacgtactacggaccaccgccctcaaaatttgtgccatgtgttttgtggccgctttgtttgttggctcaaaattgctggcaggctgccacacgaggactctttgggactgcgatttggactgggatcgggacaccgaaaccgaaactgagactgagactgaaactgaggatggggatgaggataaagtcgaggacgaggccgagtacgaaacgagacacagacaggacttgtcacgtcagcggcacaaagcccgagcacaaaggcctgataactgcagtcgcctgataagcagcgccccaaacaaggatctgcccatctacttggcgacactcgaaaaaggggtggatatttaa

SEQ ID NO: 6792 - protein, 945 aa, DROSOPHILA
MRHAFVGLIVCWLAVCQPQAEAQFGGFGFQPQFAYQQPQFQQVYRQPQLQPQVYRQPQAYQQQPLVYYQQPQQPQQFRQRQGSVSKANTNAYERQVDFGNNLEYTQGVSNSRAVTKQNGQRVVTKSQAQTRDVDLGGLQLGNTLTRTRTNANGQVSQGIADQFRIGNVGLGASLSPQNLQNGFGLQRGADGDLRLGLGLLNLDLDRNVANSNTLSQAQVNANGKGARAGSNSNSQSNTQHFGGVTVTDTRANSNAFGKAQRGQTSATTGGFGGNAATNGQSFGGPFQRVVRQNRRPKRKAQFVPFGYPRIGFGPVLSPLERPRRQFGRPGFGGPGFGGAGFGGPGFGGPGFGGPGFEQEFYEPERQQHKKKGNKNQAHGNANAQGGPGFNQQASSNNHASPGNTGSSSISSNLAQDGSSGQVSSANTNTHQGQTANGGYQSDQNSQSQALNFRPGEQQASSANANTQHTQQGNRDTYDSNSGSTSTNNNKFGSATNTANTNSQVVRDGNRQDATSDANSQSIFQGNNGQGDASAQTNAQTSSQQGPGGFISNSASSSATATAGNGQSANANSNANAGGGVGGAGAGANAGGFGGGADANSGANGGGGSAGANAGANGGFGGFGGFGGFGAGGAGGANANSNAFGGYDGFGFFGLRQRAQQKIRLQRWQPRTQNGTSSRGTSTNENFEYVYFNRTSSSSRLEDLQPDNDDSSGRDLEVAGTPLNTSVDEFGPYDSTQRQGRTFSVIYDWISGFFNSCVSPCTLEAFQKQTCCETYVVDPSYPPPPPPPPPPPPPQTCCAPVRPPYAPPVRPLPPPPPPPPPVPYPYTPIYPNKKTPVVVVATPINCCTVCTFTYYGPPPSKFVPCVLWPLCLLAQNCWQAATRGLFGTAIWTGIGTPKPKLRLRLKLRMGMRIKSRTRPSTKRDTDRTCHVSGTKPEHKGLITAVA

SEQ ID NO: 6793 - DNA, 3308 bp, DROSOPHILA
taactgagctgtgtttgaacttaccctcgttgtacgcttcgaaggccttcataaagtcattcagacccgcagcggcagctcctttgcgtgagtaacccttaggccaggtgggattaagctgaatggtcttctccgcatcttctagcgcctcctggaactttccagccttggcgaatgccgccgaacggttgctgtagagcacatggttctggtcgtccagagcgatggcctctgtgtacgccgccaccgcctcgtcgaacttctcggcactgagcgcctggttacccttttccttgagttcgttcacctgcgaaaaccgcaagggtttttgattggaaatgccaacgcctttcctttgtctcgggcacttaccttgtccatttctgataagggagaggatagcgctgtcgaattacagtttttcctgtatttttgtacgactttttaataaaacacgctgcgaaatgtgccgtgccaggtgaaaatgcgaaaaatgccgacttttctagaagcaatcgatagggttgtcaatgcttctgcgactgaatttaatctttttccagactgcggtttagaacttagctcgttctcaagcggggaacaaaaccagcaagccttcttaaataattttttccattgcttatataaattaaaaaaattgttgatcaaatataaataataccttgagctttatagaatttaaatgttattttattgtattgtttatttatgtttatattatattattatttgcgtaaataattttctcaatttcttattttgaattgtaaaatttttctagtcaaatgaaaaataagtcctcaggcttttaagtgcattaatatttaaatatttgaaattaatatttaaaatgttagcatattttaaaacatttaaattaagaacagaggtatcgaaaaacgatgctgccaaaaacactaaatatcgataactaatcatcgattttatttgcaactctagattcgaggctggcaacgccgtgcaaaatacgaccagacgctgcttttttcggtttccgaaaataattgaaaattatcactaaataaacaggcggctaacataattgcagtttgaccgcgttgcagagacaagcgggtagataagttacacattttggccacagcaacaccacagtaaagccgccagcatggccgagtacttggcatccatttttggcacggaaaaggacaagtaagtcgcatggcacatttattttaacgttgccgggattaataactaaatggcgttgcatttcccagggtgaactgttcgttctacttcaagatcggcgcctgccgccacggcgaccggtgctctcgcatccacaacaaacccactttctcgcagacggtgcttctccaaaatctatacgtgaacccccaaaactccgccaaatccgcggatggctcccatctggtggccaacgtctccgacgaggagatgcaagaacactacgacaattttttcgaggacgtgttcgtagagtgcgaggacaagtacggggaaatcgaggagatgaacgtgtgcgacaacctaggcgaccatctggtcggcaatgtgtacatcaaattccgtaacgaggctgatgcggaaaaggcggcaaacgatttgaacaaccggtggttcggtggtcgaccggtgtactcggaactatcgccggtgaccgacttccgcgaggcttgctgtcggcagtacgagatgggcgaatgtacccgctccggcttctgcaacttcatgcacttgaagcccatctcgcgtgagctgcgaaggtacctctactcccgccgccgtcgtgcccgctcccgttcccgatcccctggacgccgtcgcggctcccgcagcaggtcccgatccccgggtcgaagaggaggcggcagaggcgacggtgtcggcggaggaaactacttgaacaacgagcgggacaacatgcgtggcaatgatcgcggaaacgatcgcgatcgccgcaaaggtggtggcggaggaggcggtggtggtggtggacggtattaaatattctggacattttttctgtacggtggcaattgagagagaaagcaacggacaagcagtaacgcaaagcatcgtgtattttagtctctgcgttggttttccacgtttttatatcacttttgagtaaacgagatggaaggaggaggaggaaaatgacgatggggagttccaccacctatgtacaaaccccccgcgaaatattttaccgagcgcccattagaattgtaatttactatacatacattcataataataaaattgagtaatattatactggaagccatagtaagaaatgggtctaattgtcaaaaagtccaggcactcaaaataaaagactcctcacaggtatggataacatccagaagacaccaccccttgttaggcctgcagtcttatttcgctttgtaagattgaatcttaccacgttgttttaattatatttccatgcgcagatggcttcaccaactgaaaacgatcaacagcgtaaatgatgctgtcaactgtcttaagacgaaatcttaaaatcttcaaaaatgcgtacatttgaacaacgaaattcttgttttccccgacttagtcttagattttaataggtgcatatttaggggcatatttgtgatcaagctatgtcagttggcgggcttccatcgtgattagtcgttccaccctgaggaacacctctgaaagcctcgccttcattttgcactgctggcttctccgcttgaagattactctgtgcgcgatgcgtcgatggaggtacgggcgtgtcagaggagttgctagacgcctccctggctttcagttgcttggtcatgtctatttgctgctgcagcgtgtaggtattctcgtgtttgcgccgttgttgctgctcaacgtccctcaggacaccatcgtgcagtctcaggctggaagttagagatcggaggctataactttattccggagtatttggcttacttaccggtctgccgattgtttatagtgcacataacctatgatcgctgtggaaatggagaccgccagtcccaaagtcactcgcgaagcggtcgacatgactgggcaccggtctgccgctggagatttccgcctaaaatgcctgcactaggaatttggctgtcgggttgtgttgttttgaagtcggttcgggttacgacatgactttaaatttgaaagaaaaacaacagcaccacacagctgacaagagagtggccagtttacggaagcaaagttttccctatccagagttagtgcgcgggaaaatcaaattaattcccttc

SEQ ID NO: 6794 - DNA, 1240 bp, DROSOPHILA
gtgcaaaatacgaccagacgctgcttttttcggtttccgaaaataattgaaaattatcactaaataaacaggcggctaacataattgcagtttgaccgcgttgcagagacaagcgggtagataagttacacattttggccacagcaacaccacagtaaagccgccagcatggccgagtacttggcatccatttttggcacggaaaaggacaaggtgaactgttcgttctacttcaagatcggcgcctgccgccacggcgaccggtgctctcgcatccacaacaaacccactttctcgcagacggtgcttctccaaaatctatacgtgaacccccaaaactccgccaaatccgcggatggctcccatctggtggccaacgtctccgacgaggagatgcaagaacactacgacaattttttcgaggacgtgttcgtagagtgcgaggacaagtacggggaaatcgaggagatgaacgtgtgcgacaacctaggcgaccatctggtcggcaatgtgtacatcaaattccgtaacgaggctgatgcggaaaaggcggcaaacgatttgaacaaccggtggttcggtggtcgaccggtgtactcggaactatcgccggtgaccgacttccgcgaggcttgctgtcggcagtacgagatgggcgaatgtacccgctccggcttctgcaacttcatgcacttgaagcccatctcgcgtgagctgcgaaggtacctctactcccgccgccgtcgtgcccgctcccgttcccgatcccctggacgccgtcgcggctcccgcagcaggtcccgatccccgggtcgaagaggaggcggcagaggcgacggtgtcggcggaggaaactacttgaacaacgagcgggacaacatgcgtggcaatgatcgcggaaacgatcgcgatcgccgcaaaggtggtggcggaggaggcggtggtggtggtggacggtattaaatattctggacattttttctgtacggtggcaattgagagagaaagcaacggacaagcagtaacgcaaagcatcgtgtattttagtctctgcgttggttttccacgtttttatatcacttttgagtaaacgagatggaaggaggaggaggaaaatgacgatggggagttccaccacctatgtacaaaccccccgcgaaatattttaccgagcgcccattagaattgtaatttactatacatacattcataataataaaattgagtaatattatactgg

SEQ ID NO: 6795 - protein, 264 aa, DROSOPHILA
MAEYLASIFGTEKDKVNCSFYFKIGACRHGDRCSRIHNKPTFSQTVLLQNLYVNPQNSAKSADGSHLVANVSDEEMQEHYDNFFEDVFVECEDKYGEIEEMNVCDNLGDHLVGNVYIKFRNEADAEKAANDLNNRWFGGRPVYSELSPVTDFREACCRQYEMGECTRSGFCNFMHLKPISRELRRYLYSRRRRARSRSRSPGRRRGSRSRSRSPGRRGGGRGDGVGGGNYLNNERDNMRGNDRGNDRDRRKGGGGGGGGGGGRY

SEQ ID NO: 6796 - DNA, 3685 bp, DROSOPHILA
gcagcacgcccaggtatcacgatatgggaggaggaggcggtggcggcgttggtggtggtggtggttccaatgcctacagcatgcagccgcatcaccagcaacgtgccaaagagaacctcgactggcagctggccaacgatgcctgggcaagacgcagaccgcagcagcatcagtcacatcagtcgtatcacgcccagcagcagcatcatcactcgcagcagcaaccccatatgggcatgagcatgaacatgggcattacaatgtcactgggacgtggcaccggtggcggcggaggaggtggctatggatcgacgcctgtcaatgattacagcaccggaggcggtcataatcggggtatgtcctcgaaggcgtctgtgcgcagtacgccgcgcaccaacgcctcgccgcactccatgaatctgggcgatgccacgcccctctacgacgagaactaggggcggcgaagtgaatggaaaccgaaaaccaacacaagctgcaaaggatgcactatgcacacaccatatgctactatatacatacactatactacaaaaacgagaacagaaccgaacagaacagaaaagtctacaattatatataattcatgcacgcgcagctggcgaagatccagttgcactaatcttagtactttggagtgcgattccgcattgatcctcaacgatatttaggtttaagtcaagtccataactgatccgcagttcacaccacatatataaatatatattatctatgtataattgaaaattgcggaacgcctgccgttggagtgggtgcatcacctggcggtgggggagtaggagtagaacggctgggcaggagctgagacgccggtgggccggggagcaatcaggtttgtgacgacggaagaatgaaaaataaatttcaattttttctgaccagaaatataccgccagctcttcttactaatgggaattcaagattggttttatccgcagcttttatgaataaaacgcccgagttgtgtaatttaagcaatttgtacaatttatttcgtgtcaaatgtgtgaggaaattgatgttcccaaattgggggaatatatctggaatctcgtaatgcagtccggccgcagactagtttctggccacaccgcgtcggatcacatagaccagcgagatgccgatgaaggcggcgcccagggccagtgccacatgacggcagctgttgcatggaatagagaatatgaaaggcggtttaaatcaatgggagtatcatggtcaggataaggcactccgaccgactgggtgtcacaacaacaaaactgggtgcactttggttagctagctaggattacacggttttgcaggcatttctagaggggttgatttaacttaggatgcagcattgcttgggggtggcggcggcatcagtaggcgtggcactttaccaaggcacagaaccaagaatcaaaataaaaacgcaagtcaaggtggggtgccattcacaaaaccaaagagtgaccaattacagcgtgcaaattgttggtattctagattatcacatttatatatgtacataattccagttgcttgacgtgtgctttgggttaatcatgatgggtaatatatgtacacaggtcagtggttagaacttacaagtccaactagcttttgtagaaccttattttcgtgcttgagaaggaattaaatcttgaatggagcaaatatcatacatgcaagttgagattcattagattcattaaatattaagtattgtggctttgttagcggttggtaaagaaaaagttgatactctatatgggaatataaataattgatataatttaaggaacacttctgtatcatcattatcttcttcagggtatccaatcgtatcaaagggtatcaaagtagtacaccaaaaagtgtacgaaatagagactttcaggacacgtgaagcgtgaaactttgggggcttcgaggcaattaatggattacataagagttggctaattgtacttattgattgaaacgcaggccatgctcatgcgaaaccggttgtggtcggaataggagcttcatgcattaaggaaagtggagcgtacgaaatgatgatgatgaaatgccttatcaggaatactggtgttctagcgagataaggagatcaatccgtgtgggagcggagaagggaaatccgcagggctttctttatttacatgatgatatggcattttggcttggttgggtctttgcatgcacttgctggacaggattctcacctaattgggcttttcttcttgatgtccgcagcagccaggtcaccaatgtagtatttcttcaacatctctctgaaaaggcaagtggggaagaaatgtgaatcaggtgatccaggcgcactggctataagatggactctctaacctcgcctccgagctgtgacccacgtcattgaaggccttggtggcatcgcgaccggcctcatccaccagggattcctcgccaccgggatgctggagataagggcatcgaattagatggattcgccacccccccctaaaaccaacaatctgcatcgccacttgcctcgagacggaacttggtcacatcgtagaccttgttgtcgatgaccacccacagatccgtggctttgttgtgttcgttgacggtggccaaacggatttccttgctcatcttgcctgactgcgcctgcctgctcttctccgcaaatttaactaaataacgcaagctaacaggttttcggactattccagtgtggccggctccacttttcgttggagtcagctggtcacacaaaataccccaaatataccacataaggtacctaagcaataattccaatgtacctgtggtacaattccagtaaaatacaatagagtattacaaatttaaatattcaaattaaatccaccactccaacgccatccaatgtttattgcaactttctatcaagaatcccccacaaaattaaaaaccctgggaaacacagataaaaactacatagagtattacattgaacacacaaattgaaaattttattcttcgaataccaataattattgtgattgattattttgtgcctttgaataaaccaatttactaaaacttagtatgaattcttgagttatgccctgtggcacaactaactaacttcaatttttataagggtgaaaaaatctagatggcgccaccacgcagacgcaggaccaagtgaagggtcgactccttctggatgttgtagtcggacagagtgcgtccgtcctcgagctgctttccggcgaaaatcaaacgctgctgatctggggggattccctccttgtcctggatcttggccttaacgttctcaatggtatcggatggctcgacctccaaggtgatggtcttgccagtgagggtcttaacgaagatctgcatgccaccacgcagacgcaagaccaagtgaagggtcgactccttctggatgttgtagtcggacagagtgcgtccgtcctccagctgctttccggcgaaaatcaaacgctgctgatctggggggattccctccttgtcctggatcttggccttaacgttctcaatggtatcggatggctcgacctccaaagtgatggtcttgccagtgagggtcttcacaaagatctgcatgccaccacgcagacgcaggaccaagtgaagggtcgactccttctgg

SEQ ID NO: 6797 - DNA, 482 bp, DROSOPHILA
gcgcagtcaggcaagatgagcaaggaaatccgtttggccaccgtcaacgaacacaacaaagccacggatctgtgggtggtcatcgacaacaaggtctacgatgtgaccaagttccgtctcgagcatcccggtggcgaggaatccctggtggatgaggccggtcgcgatgccaccaaggccttcaatgacgtgggtcacagctcggaggcgagagagatgttgaagaaatactacattggtgacctggctgctgcggacatcaagaagaaaagcccaattagctgccgtcatgtggcactggccctgggcgccgccttcatcggcatctcgctggtctatgtgatccgacgcggtgtggccagaaactagtctgcggccggactgcattacgagattccagatatattcccccaatttgggaacatcaatttcctcacacatttgacacgaaataaattgtacaaattgcttaaattacacaa

SEQ ID NO: 6798 - protein, 117 aa, DROSOPHILA
MSKEIRLATVNEHNKATDLWVVIDNKVYDVTKFRLEHPGGEESLVDEAGRDATKAFNDVGHSSEAREMLKKYYIGDLAAADIKKKSPISCRHVALALGAAFIGISLVYVIRRGVARN

SEQ ID NO: 6799 - DNA, 2947 bp, DROSOPHILA
tcgatcttctcgcataacgagctgattagcattgtaatgctctaccataagtttgtgctggtcaatgggccgagagcaaagtacatgaccattcagcaactctctgcgctgatggagctcttgtttgagatcgtggatcgcgatctcattgcgaccattgtgtatagaatagcccatacaccaggttccaggcctcctgacttcttttccgacaagcatatacacttggagtcctttgtgcggcttttcaccgtatacttcaccaaagatcttcagctgaaaatggaattcgcattctcggtgggcaattcatagtattcatatgaaattagcctagaccatttgcttacattgcaggtctacgataaaagcgattccaagcagttgaatggcgagcaagttgggttcttcgtcggcaagttctttgagagcgaggatgaagacgaatccattgagctgcgcttggtgaggcaccatcccctacacttgttccattgaaacactgacacatttcgcattccttcaggacatgaaggagatgctgttcctcaaattcgacttggacaaggataccaacattggggttgatgagtactacgaggtggtccgccgacagcccatgctgctggagtgctttggtcgcgtgtttcccccgaatccccagatggaggtccttgcgctgtgcgccaatgtaatgtcttggtttgacgattcgcccaatcccaggattatgataaaaccagacggcggcaaggccagctagctaacaggacgtccaggaacgcatttttatctaaccagatacttaaattgtgacacgtctagaaattgaaaagtgcaaataatttagtgcatcataaaggtttacacttttattaactagttttgtacgttacttttgaatattggttctgaacggtaaactcgcttcattgaggctgcttcgataacgataccgattagtcagtgtgtccggattgtctcatccctgctgcacgcgacccaccattttagtaacaccgaagaaacggtagcgaaatggccacggaggagcaccagcgcctggccagcatcgtgaagagctgccacgaaagcctgcgccagttgactaaggagtatggcgccacagcggcctggcaggagcacacgagtcccaggaacgccaagcaactggcggagtacgccaaggcgatgaagcaactggcggccatatgggagaccaacgatgggaaggtggagctgcaggcacgcagccgcatcaagtgggccatcgactacatcaccaagtacttctttaccgagggcatatatttgcagaagcgccagcgggagcagcgactcctggaatcctacagagccgagggaaaactgggcgaggtgcagtgcaggctgatggaggagccgccggacaggctgcacgtcctggatgtgggcagctgcttcaatcccttttccagtgctccgcacttggaggtaaccgccctggacttgtgtcccgccaccgaagatgtgctgcaggcggatttcctcaaagtggaggtggtacccggaatacgagaacctgagctggaggagggcagcgtaagaaggctaccagcaagccactacgagtgcgtcattttcagtttgctactggaatacatgcccagcgccgagcagagactacagtgctgccttcaggcctacgacctgctgctgcccgagggcatccttgtgctcatcacaccggactcccaacatgttggcaaaaacgcccacctcatgaaaaactggcgctactccctggccaggattggactgctacgggtacgcttcgagaagttgccgcacatatcgtgcatggtgttccgcaaggccatcagccgggagctctcacagcactgggcgagcattcaccgggaggaggggatgtgcgaggaaattcggataccgcaggacgatagctagataagattcagcccccataaatcgatgtaaatatgtccacgtctacttatttatggcttaacttatctgtgttaagtgcgagttaataataatggttgacgatttatctactatctatggatgtcgtaaatggacaaatgctattgcttctgttccgactgtgggaacagcgcgccgctggtctggcgcttcttcatcgctgtggtggcgccctgcgaaatcttcatgatgttcggcgggagcggtttcttgcgatccgcctcccactcggctcggtggagccgctgacggtgcttgtacatgttggcgttggaaaagaacgtcatggggcagttaggacaggtgtacagcacctctccggtgtgcgttgatgtgtgctcctgtaaattaggtgtcgaatacttagatttctctgtaagtgagccccacacttaccctcagatcctgtggacgcttaaatgccttttcgcacatcccgcacttgaactttcgctcacagaggtggttgtggtagatgtggcgcttcagggctcgggaattggtggatgtcttgttgcagatatgacagcggtgctcgtcgcccggcggctcgtgtaccgttttcatgtgctgctttagtccggacaagtggcgcagccaggtgccgcagatctcgcactgcacgggatcgggttttggacgcggtttctcggaatgttcaagctcgtgatgctttttgagattcgtttgtgaacgtagcgtcttgccacacttatcgcagatgatggccgcttccgggtcgtgcatgtaacgcaagtgctctttcagtttgcgttccgtaggaatcctgaaagcattaagggattacttggggggttgctcatatgcctcatacctgatggacaattacttcttgttgcactccggacaagagtatttgaactcggatttcgggacatgcttggaaacgtcatgatactccatggccgccttggttgtgaagctcttggggcacttctcg

SEQ ID NO: 6800 - DNA, 947 bp, DROSOPHILA
acccaccattttagtaacaccgaagaaacggtagcgaaatggccacggaggagcaccagcgcctggccagcatcgtgaagagctgccacgaaagcctgcgccagttgactaaggagtatggcgccacagcggcctggcaggagcacacgagtcccaggaacgccaagcaactggcggagtacgccaaggcgatgaagcaactggcggccatatgggagaccaacgatgggaaggtggagctgcaggcacgcagccgcatcaagtgggccatcgactacatcaccaagtacttctttaccgagggcatatatttgcagaagcgccagcgggagcagcgactcctggaatcctacagagccgagggaaaactgggcgaggtgcagtgcaggctgatggaggagccgccggacaggctgcacgtcctggatgtgggcagctgcttcaatcccttttccagtgctccgcacttggaggtaaccgccctggacttgtgtcccgccaccgaagatgtgctgcaggcggatttcctcaaagtggaggtggtacccggaatacgagaacctgagctggaggagggcagcgtaagaaggctaccagcaagccactacgagtgcgtcattttcagtttgctactggaatacatgcccagcgccgagcagagactacagtgctgccttcaggcctacgacctgctgctgcccgagggcatccttgtgctcatcacaccggactcccaacatgttggcaaaaacgcccacctcatgaaaaactggcgctactccctggccaggattggactgctacgggtacgcttcgagaagttgccgcacatatcgtgcatggtgttccgcaaggccatcagccgggagctctcacagcactgggcgagcattcaccgggaggaggggatgtgcgaggaaattcggataccgcaggacgatagctag

SEQ ID NO: 6801 - protein, 302 aa, DROSOPHILA
MATEEHQRLASIVKSCHESLRQLTKEYGATAAWQEHTSPRNAKQLAEYAKAMKQLAAIWETNDGKVELQARSRIKWAIDYITKYFFTEGIYLQKRQREQRLLESYRAEGKLGEVQCRLMEEPPDRLHVLDVGSCFNPFSSAPHLEVTALDLCPATEDVLQADFLKVEVVPGIREPELEEGSVRRLPASHYECVIFSLLLEYMPSAEQRLQCCLQAYDLLLPEGILVLITPDSQHVGKNAHLMKNWRYSLARIGLLRVRFEKLPHISCMVFRKAISRELSQHWASIHREEGMCEEIRIPQDDS

SEQ ID NO: 6802 - DNA, 12692 bp, DROSOPHILA
aatggaagagaaacgtggctataaggcaactttcagtaagtaatagtaatcaagagctgagcgggatttattgctaaaataggtacggagagttgcgactacggctgcaagatgaggcagaggttgtacgtgctgccggcgaactcgtcaacgggcacccaacgaacgtagcccagatcgattaagtgctgccgggagctgggcacgcctacgaaatgcggatcctaaaaagggaagcgagcgattagttcaccagttcataaaatgagctaattcgctgactcaccaccacctgcaggaagatgcgaccgcgtgcactgcaatggtagccggtaatagccttggaggcggtgtcactcagaccgcccatggcgacgaagccttggtacttctcaaaatagctccgaagctcgccgaggatctcgtccgagctaagctccttggcgtgaagaatcttgcacggcacctggtgcagcacatcgatcacgtagaactcctcgagcgttccgatccagtcgcgcgagcccacgaactctggacccttgtcgccgatggccaccaggatctgctgaatctcccggatggaaggaacatgaccgctcgacccctgtcgacgttggatccaggaaatggccgattgcagggtgcggtagccacaaccccagccagcatcctggtggccatcgcatccgtagtggaagtagttaaagccaccgcgggtaactagcgtccgcccgccttcagtgggcgtggtcagcgcgccttgcggatcctctagaagtggatatgcatagtcctttggtacaattttcaaggacgccgcggaggagtccccaaactcttctgcacacttttccgccgccataggaattgttttcgaaactgagtaatttgatagcctaggcctgattcacctgctccttttcttttttgtttatttaccttgggcagccgtaatttgttttgtgaaagtgaaatcgcagcaaagaaattggaatgtttttttttttgctctggctagagatggtacaagctgaatcgtcatgcaccaatgacaaagtcagccaaaataaaataacaataatgcggaaaataaaattaacgaatataagaatgagtcatgatgaaaggctattccgcccaaaattttgataaaatttatatttttatattaagcaatgttgtcataattgttttactacaattatccatcaccaactctctcatcgaattatcgataacagcccgtttgtagcgcctaaatttaaacgcatctatttggttttctcttatttctcatgcatttcaaattttatttgaattattaaatgtacattattgtgtttagagttcataaatatgttttcgcatttatgtgtgtgggtgtctcaacgctttatatattaacaccattccccttgaattgtgttcgtttaatttttagtttttggtgaccaaacattagtacatcgtttttaataattggtaaaatttgtagcactccataaactacgatttgtaaaattgaaatatttgcattattggttttcaactattttcggattgctgattgttactgagttgcagttttgttaatgttttaaagttagcttaaaaatgcattttggataacttcgccgagttttacaataaatatatgggatgccgtttgcaatatgtgtctgtgcaccaattaaaataccttaattacgtcgtgcgtctaaatgttttgttatcttctcgtttttggtttgtgccagcaacggtttaaaagaggtcgattgaaaattataagtacaatcataaaatacatttattaaatatatttagcgatatcaccacgatttgttgttattgtgctcttaaaaatcatgtaacagaaaagattaatatgctaaattattaatattattatatttatacgtatatgttatgtatgtatgctataaatattcatacgatttgtgactccttactacatcggattctcttcataaatgcagtcaaaatacgcttgcgtctaaaaaatactttctgctcctctcgtgttcgcgtgttccagtgtgcttaactgattaactgcttaacttgtgaatctgcactttcttcttaccaaactacagtcaagtctacatctgaatcgttgctttggggtgaaaactactattttctccggttctgagtgtgtctgtgtggctaagggtgggctgattttttttaaaacatgctctaatagtggcaaacatttatctttggctatttggaatcgtgcaacgtcagtgaatctcaagagagtggatttaattacaatttaacaaaattgttattaagtagtaaagtggagtttagcacattagcgcaacgtattaatctttgtatcgttacgaataagtattggcgtttctcttggtaagaccacacagataacttccaaagataactgcttacccctaaagtatttatgttatgttcaatcgtgcaaatcgacccatcccactgtgaggcatcctgcggtgctgggataaatgcaatgacagtccccgttttcttacaaggtgcagtattcggtgagaatgggtatagacttcagcagctcgttgatgttatgctgttccagatgcgccaccagctgctcggaagatttgagcaagttcacgcagttctgcaggttctcgacaatctccttggtcatcgtgtccgacgacttgctgatgagctcggccaacttcttgccgacctcgcacttgaccagctcgtcctgcagcagctgggcctgcgccgcctcgctgggctgcgacaggtacaccacggacaggatgcacagggcaatcagcgcctcgttctgcatgaccaggtgctgagctgtgagcatgctgaccatggcctccacggtgccctcgttggcaaggaactcgctcaagctactgcgatcgtagtcttgcgttagcggaatcttgtcggcaatctgttcggcgggtgcatcgcccttgcgcggcagtgcgtatgcgattttgctgaggtaggcgtgcttgatcagccaggccatgaggcgcagagactcgccggtgacgcccgcatagtccgacgatttgctccagtgcaccagctgctcgatcagagtcttgttcttcagcaactccagtgcgagtttctctggaaaagcagatgttgttagagatgcggatcgcgtgcggttgttgccactactcaccctgtccgtcgacggtcatgcgaagtgtgcccagcagcttgaagacgactggtggctggtgtatttcgagcatgggaagaatggtctgcaccaggcccgcctggattaccgcgttcttgtttggcttcgggatgaccaggttgcgcagcgcggagagaagagcgtgctgcaggcgcacatcgtccttgacgccgttgttcttggccagcacctcgagcagcttgttcatggtctgctgctccacaaagtagatgcagtggctatcggtgcgcgcaaagttgcccagggccagcacgccggtggttagcagatcgatgtccgtcgagtccagccaatcgaccatgttcttcagcagcggcgtggtgtacaaatagtgcattgagtcatctagaacaatagtacaataattagttttgaaatggaacaagttgaagaatttgtcgacaacattctaattcatatgatccgaaacttaccaccagtaaggattaatacgatgagttcgcaggcgagtttcatcaacgccctggcctcacttgtgctggccagagtcttgtacttttccagcaggttgtagatggtttcgcacagaccgtccttggccaaaataagcttgacttcgtcgctctccgcctggtaatggagcagctccaggcacatctcggcaagatcgggattcgtggaagcggccagaatgcgagacagctggatattcagggaagagtcgaagttcagatccgacacgttctcggtgagtatactgagcagtggaagcgtgttcagcagcagatcctcatgctgttccacattggaggcgccaatgtcgatgatgccttgcagcttcttcatcacgcccaactccatggcccgcttggccaagccctcgcctccgagcaaatagttggacagcaagccgccgcgcactttgatgaattgcgccgcattggccacgtcctcgatggttgtgatgtccagcagtcgcagtagaacagcatcgccctccagctcgagtattaagtccctggcttcgtcgtttaggtagcagatattgcccagtgcccgacaaatctgtatgggcagctccatactgccgtcggacgtgggcacttgtcgcaagcactccagaaatgcggctattatattcctcttggtgaacttcttgcgctgcacctcggacttggtgatctccgcaatgcacttggccgcctccttgcgcacgtttgtgtcgtcgcacttggtgaggcccagaaagcactctgccagctcgtgcttatcgaaaagtttggggtccttcgtcgccgagatctcgcagagcaagttggtcgtgttcgccggactgacactggtcgtcttcagcttttcaatcaaatcgtcgatttcagctgcttaaggcggtaagaaaagaacattggttagttagggcacttgaacaacataaagggtcatcttattgttttggcaactaaatgtttccctggtcattggaataaagtttggtgatgatgagtaacgtgagtgagtaagtaagaaaagaaaccatcaattataagtcaagttatgagtggttgtattacatatccagctcccatttaaagtgttcttagtttttaactatttaaatactattgtatttatttagggtattttatgtatactttttcgttccatttgacggagcacgcaatccacctttcccttcctgcaccgaccaagttgagaaccgcaaaattgattgccaatttcgattatcgtcgctgactggacgaagtcaagacaaatgctttcaaagcaagaagttatggctttacggcctggcacaaaagaactttctttctccttcaggaatagaaagcttttttgtgtttttgcatctccagttcgaaccgtttttgatccattggaaacgttcgagaaaactcgtgaagcgtgtgccacattaaagcttcatttggccccaaaaaaacagatggctcggattataaaaggacccaggatgggcgacgatttacataagtcctggtcatggacaaatgaaaaggaaaacggaaaaacaatcgggatttaatgtattgtaatgatgaaggtttaggttcacttattcagcataaatgcttcggaattcagcttttcaggggagttatcttaaatgttagtgggtatgagttggttctaaaatgataaaacttgttattattaagcaacgttatacaattttaatgatagtacccaagccagagataatacaacttttgtgttgaatttaaattgtatatattcgatattaagccagtacgaatagagcccttttgtgaccaacattatcacaatattattatttcagtcagaccttttctgccgacaagcacacacgctggaaaatacattccgatgtggcactccagcaggacgagggccaaaggacgaagggcaaggaccagactccggcgctcgacaactggcgacagttggtggcaacagcaacagcaaggttgtggactggggtcgcaattcaacaaactttgtggagcataaataatgaataagtaaaacaaaaagcaaagtgaacccttcagccgggcgggcaaccatcgtcatcatcatcaacatcatccaacgtaggcaacatccacgatttggcatagaaacagcaacaaaggacgcaacagcagcagcagaagcagcctgcacaacagctcactaactcgcagacaagttgcacttagaaatgtaaccccaactaaagagaacataagtgtataggctgaattcgagggtaccgactataagataccctagtgctgaagcaacaaaacatcacaaattgtacgtcagattgtacaacaacataatagaatacgggttcaacttctgcatccgtttgtaacgactttaagatacaccatctgatatcgaactctctttattataactagctgtttagtgttactcttgagtagtgtgttttccaatggttaaaggatttaaatacaaaagaatcatgcctccgagttcttttctgtttgggtaaataataattaagaataataataagatataggtaaattatgaactcaagtctgtttcaaactatcttattccgaatgaaaactttactaggtatttcagctatttccgtgcagacagacatacaattaggagtccaatataccctttaaatcgaaacgcagccagtggaaatgtgcatatgtattgcgggatgcatctgcatattcaggtaaaaaggggaattgttgtatttgtttgtccgacgcagctgactgaatgcaattggacaggtggcagagacgcgtcgcatcgcccgcccggcggagtggcaggttgacagggatgaggaatgcaggaggacgacaggtgctgtggcagtggcagtggcaatagtagcgtcacttccgtctgacagaaggtggcccagaccagctccgtaatgcgtctcggttgctgcttcgccgccttttgcgtgcctccgaatgtttgctttggtaactggtactcgttggtattcagagtatgccactcgtccatccagccatcaacccatccatccagccatcaatccatccatccatacattccgttcgagttccgtggcaagttcgttagctcttcgttgcggaagcgggattcgttcgaggcatttattcgcctgaatttctggggcaatggcttcattttattttcgtgtttccttttttctgggcatgattggggcctatggcctgcgttttatttccactccgttgtggtattttattttctccattacgcgattcaccaactttggccacgtacaaaaatagcaaatagcaaacggcacagaaatcacaaaaaaactagtgcaaacttattgttgttgcatgcttaattcatgtgcaactggcgacgctaatgtcggttttagttgtattttagctttttgggccctgttgccaagtgaaaaattcgggaaaagtgggttaagttggaggcagaggcatggcacagaaaatggcagccatgggaacgaaccttataattcaaacgaaatgattccttttgcatggataactaggtgatgtaagtgaaaaggtataattcatgatccactcgagttatgataaattgaaaaaaatggaagcttgcaaagtaaaagtgagcccacttttgcggggctcttaaatataccaaaccacaatgtacaatacaataaaccatataatataaggattgcgtatttttaaaactactctttatttacaccgtgcactaatccctacatctatcaatagaaaagtacagagtatcagactggcacgtcctgattcaaagactcgttctcgagcaacagtcgactgtgaccagactttcccagctggagcaacgcctggcaagcgggagtggacatctggctgacatgctggagcaacttctggtcgttgtttccctgcctcgccctgagaaacagattatcccctggaatcagaagtaatttgaagtgcctggtactggacaaagtttaatagttctcactccaactccgctcttgcctgcacttatgtttgaggtccgagatgtaaacctcctcgatttctacttccagttcggccaactgctgttctgtgtacttggacagagtcgtcggattcatgtagtaggcaatgtggttcgtccgactgagccgtcgagcgctgtgggttctggagaagattgggcctgtatacgccagtctcagcatccgagtgagtctagaactcacctggttagcgtaaaactgtaagcaggagcgcctgcgatgaagtgcatggtgacgaagagaaaaaccagagcagccaccactccgatgacgagttgctgtgtttggtagagtgactgcctctggggcatccgctgattggccccccgataaggccttctgaaagcggctcccagatcgttcccatttgcctcattgaattcactttccccgcgataatccttgtactgcgagggatcctggtcgtggcagtcgcccactgccgttgctatgttgtactcaatccttttctggcagtccgtgaggcagtcagccgcctcgctgatccgccggaaggcctgctcagccccaggagatttgttcttgtccggatggaggcgcagggccagcttgtggtaggcccgcttcacctcggagtaggtggcatgatgagagatgcgcagcacctcgtagtgattgcggcaccgcaggaccttctgcaccacgtccagcatctcgagtgtgaacttgtggggcagggcgtcagatttgcgagttgggcctatggtccgctgggcctcgcccttcagcctcagtctcaaaatgatattctttagctccagcagcgccatgatctcatcgtggttctgtaagccttccagatcctcgttgatctgcctcagagcgtgctcgtagtgtcccaggcacaggtcactcaccaccttgtcgacgcagtgatgcctcctcgcctgcaggattcccattgtgaagtcgtcgtcctccagttcttggttactttcttctccttcccagcagcgtgagaagacaaaaaaggattcgtttttctctgttcgtttgcaaattttaaattttggtttgttgttctgggacaatccaccgagttggtgaatttaacaaagtgcttttgtatgtatattagaggtagccgaaatagtttcgaactaagttgactgtatatgtatatgtagctgcaaacttaaatacaaattgactttcgccagtcaacattttgtatgtcaacacaatgaacacttgagaaaagacaacttgaatccgttttttacataccagccagcttattgaacatttaaatcatgcagtactcgtgtaaataccaacgaatttaccaacttaaaagttgacacaagttgtacaagttgcttagtttagagcggaaaaaactaaaagtttgcacacaagttgcacacttgaagcacacaagttagaacgttctgtcgatgggggattccccaaaatgccaaccctcttttggccccgtaaagtatgctccacaacttgtcaaggggacacacatagcctcctcgaaaagactcgaaagttaattgaaattaatttctatgccaatttgaatagggcacgaactcaattaaaacagagctagccaccaaccaccccacaatttcatcttttcaaggcggcctgctcgccccattcattctcaaggccattagaagggccaaaatcttattagcagttaaaagaataaagcgagtggaaggcgctaggcacggggaaatcacaagtcacccagctagatttgaagcaaatgaagcaacgacgccggaatacgcaagaaggaggtggaaaaggacaataaattcgaagccgggcaaactacaataacagccagctaatctgggtaagctgcgtggaacgaatggaaaagcccaaaataataacaataacaataaagaggcagcagctccggaatctagaatctggaatctggcgaggggagcggcctgctttggcagctgatatcctcttccttatcagactcccagcctcggggttgatggtagccacagcctcaaggacagcagtcaaattgcgtcgaagacgccgagcgaaagcgtcgacaaatgcagtcacaaaggaccaattaaagtccaaagtgactgagccgcagggaggacgtggcaagcatctcgcagctgggatctgcacagcgagtaaatcatgccgcaacggtccaatggcctgcatccttgaattttatagatgtcctttcattagatttcaaaacaatctatagtaatgtcgaatagtatttcaatgtactatacttcaggtataaaacttatgtaacacttaatgaatgctccgaatgacaggtcttgaaaatcatatattcagcgcaagtttcccagtgcttgcatatgaattaaaatgaacaagaaccacgaattgttttcagtgtggaaatgggtctcgctacgctgggcgcagctggtgggttctgtagacaagtgaggtgtacagtggtgtggggattgggatgcagcacccctcctgaaaaaggggaagtttcgaggccgggattgccggcgcgttcaagtgctgtttgttgtcgttctgcacaggttcccctcgggaaagggtatacaaacagtacagtctgtggccagtgtttatgtatgtgttgattcggtgcagtcacgtttgaaaactaagaagtttagagacttgtttacgtttaacaattctcatcggtgactgacccaaatataacacatccagtgcgtacgttacacatccaactacactgagaaacacaagaaaaaaaggggtttcttttagttagtcacagctttatcttgacaatgactgcgctttgactgcaaagtagtatcgaattttaagcccttttaagcttaatctgtgaagattgtcctaattgtaatgtttatcaacaattcaacaaagttgccatagatttctcactgtgcatgacttcatcgttttgtttgctatatcaccccccgtggggataaaacgaattgtgaggactgcggggagtgttgcgacacgccggtaaacctggcacctcgcaggaggcatattctcatttattaatgcgtcgtcactgctgttcccagttcccattcctattcctcctgtgctgcggtggagtgggcggctcgggtggcgggttcgtgcaaaacggtggtggccgctgtctcagccgcacttaattcccgccagaactgccggggccattaaaggataaaagagcgggatttctgattgggaagcgctgaccctgttggccgcgataagtgggtgcgcacagcagcaggagcacggcatctgcctaatccgaccggcccactgtgcagtgggatggggagtggggagcataagtattgatttttctcacatgtccccggcaaacacacacatcttgtctagggagccgcatcgcccgcccccaccccactgcccctgctcggagcaacttcctccgacacctggcagcgatttggaagttttcgcagctcgtaaatgctgcactgcagccataaaacggccgctgcaatgactcgcatgaattgcgtttgtttatgctatggaaaaggaatccggggtctgctgtatgtcgtttgggatgctccataggcagagaaatgctcgatgttactcactcgccatgtttgccgcctttgttgattattccgctgctgcttcttccgtttttatgcttttctgcttttcttgctctgcgttggttgcgattccaggcacgttgtatcactgttagcttgtaacaaacactgctgataggctaatgactgctgcgcgcaactgaacacatttcacggctttctttcagtcgcgtctccgttcaacttccgcaatatccgtataattcgtattatccgtgtaatccgtattttccgaatcgcgttcagacgttcacaccaacaactgcaattctagtgtgaccgcagagctcgagctgcacgatacctccaatgagagatgccatatcgatgcttacgcattttattaacatcgatagacatttctagaatgtctagactttaatgcttggattttccaaaaactataatctgtttccaaaaagttatcgataagtatcgatcagtgttgaaactatttgtattttatattaaattctggggtgtgactagtaatattaggaatataagctttaaagaaaaaatcgaattctttataagtgatttagttcgaacgttaacttaagatttgccaccacaatcggaaagtagctattttctagctagctttgcccattaatcgattggtggcaacactggtcggcacatcccactcactcaacaaattgtttaccacaaaaaaccgtgctgaaagtgaacgaaaataaagtgcagcccggcgtcgagcatttgcagtgatcccaagacgcccaaccattgattcccgtagcggtgtccacccggattccagcccaccgccaccagcacgccattccatttggggagcctctcggtcggttcggtcaaacagtcgcgattgcccggtcgtccacgaacgcttataaaattggcaagataactaagcagagcacaaagatgccgccagcatcagcggtaaacaacagcaacgcggccgcccaggcggcgaaggccgagcgggcggagaagctgcgcggggcactgaagggcttcatcgtggcggaccgccagcggcgccaggaggagttcgaggctcagtgcgaggagcagcggctgcgacgggagcgcgaggaggtggagcgccagaaccaggtggccctggatgacacacgcggccagataacccgactggacgagcagctggccgatctgcacagccagaagcatcagctgaccgtccaactcaagaaggtgctcaacgaggacgaaacgcgcaagaagctggccaaggagaacgaactgttcgcca

SEQ ID NO: 6803 - DNA, 3446 bp, DROSOPHILA
agttgttggtgtgaacgtctgaacgcgattcggaaaatacggattacacggataatacgaattatacggatattgcggaagttgaacggagacgcgactgaaagaaagccgtgaaatgtgttcagttgcgcgcagcagtcattagcctatcagcagtgtttgttacaagctaacagtgatacaacgtgcctggaatcgcaaccaacgcagagcaagaaaagcagaaaagcataaaaacggaagaagcagcagcggaataatcaacaaaggcggcaaacatggcgactgaaatcgacgatttgattgaaaagctgaagacgaccagtgtcagtccggcgaacacgaccaacttgctctgcgagatctcggcgacgaaggaccccaaacttttcgataagcacgagctggcagagtgctttctgggcctcaccaagtgcgacgacacaaacgtgcgcaaggaggcggccaagtgcattgcggagatcaccaagtccgaggtgcagcgcaagaagttcaccaagaggaatataatagccgcatttctggagtgcttgcgacaagtgcccacgtccgacggcagtatggagctgcccatacagatttgtcgggcactgggcaatatctgctacctaaacgacgaagccagggacttaatactcgagctggagggcgatgctgttctactgcgactgctggacatcacaaccatcgaggacgtggccaatgcggcgcaattcatcaaagtgcgcggcggcttgctgtccaactatttgctcggaggcgagggcttggccaagcgggccatggagttgggcgtgatgaagaagctgcaaggcatcatcgacattggcgcctccaatgtggaacagcatgaggatctgctgctgaacacgcttccactgctcagtatactcaccgagaacgtgtcggatctgaacttcgactcttccctgaatatccagctgtctcgcattctggccgcttccacgaatcccgatcttgccgagatgtgcctggagctgctccattaccaggcggagagcgacgaagtcaagcttattttggccaaggacggtctgtgcgaaaccatctacaacctgctggaaaagtacaagactctggccagcacaagtgaggccagggcgttgatgaaactcgcctgcgaactcatcgtattaatccttactggtgatgactcaatgcactatttgtacaccacgccgctgctgaagaacatggtcgattggctggactcgacggacatcgatctgctaaccaccggcgtgctggccctgggcaactttgcgcgcaccgatagccactgcatctactttgtggagcagcagaccatgaacaagctgctcgaggtgctggccaagaacaacggcgtcaaggacgatgtgcgcctgcagcacgctcttctctccgcgctgcgcaacctggtcatcccgaagccaaacaagaacgcggtaatccaggcgggcctggtgcagaccattcttcccatgctcgaaatacaccagccaccagtcgtcttcaagctgctgggcacacttcgcatgaccgtcgacggacaggagaaactcgcactggagttgctgaagaacaagactctgatcgagcagctggtgcactggagcaaatcgtcggactatgcgggcgtcaccggcgagtctctgcgcctcatggcctggctgatcaagcacgcctacctcagcaaaatcgcatacgcactgccgcgcaagggcgatgcacccgccgaacagattgccgacaagattccgctaacgcaagactacgatcgcagtagcttgagcgagttccttgccaacgagggcaccgtggaggccatggtcagcatgctcacagctcagcacctggtcatgcagaacgaggcgctgattgccctgtgcatcctgtccgtggtgtacctgtcgcagcccagcgaggcggcgcaggcccagctgctgcaggacgagctggtcaagtgcgaggtcggcaagaagttggccgagctcatcagcaagtcgtcggacacgatgaccaaggagattgtcgagaacctgcagaactgcgtgaacttgctcaaatcttccgagcagctggtggcgcatctggaacagcataacatcaacgagctgctgaagtctatacccattctcaccgaatactgcaccttgtaagaaaacggggactgtcattgcatttatcccagcaccgcaggatgcctcacagtgggatgggtcgatttgcacgattgaacataacataaatactttaggggtaagcagttatctttggaagttatctgtgtggtcttaccaagagaaacgccaatacttattcgtaacgatacaaagattaatacgttgcgctaatgtgctaaactccactttactacttaataacaattttgttaaattgtaattaaatccactctcttgagattcactgacgttgcacgattccaaatagccaaagataaatgtttgccactattagagcatgttttaaaaaaaatcagcccacccttagccacacagacacactcagaaccggagaaaatagtagttttcaccccaaagcaacgattcagatgtagacttgactgtagtttggtaagaagaaagtgcagattcacaagttaagcagttaatcagttaagcacactggaacacgcgaacacgagaggagcagaaagtattttttagacgcaagcgtattttgactgcatttatgaagagaatccgatgtagtaaggagtcacaaatcgtatgaatatttatagcatacatacataacatatacgtataaatataataatattaataatttagcatattaatcttttctgttacatgatttttaagagcacaataacaacaaatcgtggtgatatcgctaaatatatttaataaatgtattttatgattgtacttataattttcaatcgacctcttttaaaccgttgctggcacaaaccaaaaacgagaagataacaaaacatttagacgcacgacgtaattaaggtattttaattggtgcacagacacatattgcaaacggcatcccatatatttattgtaaaactcggcgaagttatccaaaatgcatttttaagctaactttaaaacattaacaaaactgcaactcagtaacaatcagcaatccgaaaatagttgaaaaccaataatgcaaatatttcaattttacaaatcgtagtttatggagtgctacaaattttaccaattattaaaaacgatgtactaatgtttggtcaccaaaaactaaaaattaaacgaacacaattcaaggggaatggtgttaatatataaagcgttgagacacccacacacataaatgcgaaaacatatttatgaactctaaacacaataatgtacatttaataattcaaataaaatttgaaatgcatgacaaaaaaaaaa

SEQ ID NO: 6804 - protein, 634 aa, DROSOPHILA
MATEIDDLIEKLKTTSVSPANTTNLLCEISATKDPKLFDKHELAECFLGLTKCDDTNVRKEAAKCIAEITKSEVQRKKFTKRNIIAAFLECLRQVPTSDGSMELPIQICRALGNICYLNDEARDLILELEGDAVLLRLLDITTIEDVANAAQFIKVRGGLLSNYLLGGEGLAKRAMELGVMKKLQGIIDIGASNVEQHEDLLLNTLPLLSILTENVSDLNFDSSLNIQLSRILAASTNPDLAEMCLELLHYQAESDEVKLILAKDGLCETIYNLLEKYKTLASTSEARALMKLACELIVLILTGDDSMHYLYTTPLLKNMVDWLDSTDIDLLTTGVLALGNFARTDSHCIYFVEQQTMNKLLEVLAKNNGVKDDVRLQHALLSALRNLVIPKPNKNAVIQAGLVQTILPMLEIHQPPVVFKLLGTLRMTVDGQEKLALELLKNKTLIEQLVHWSKSSDYAGVTGESLRLMAWLIKHAYLSKIAYALPRKGDAPAEQIADKIPLTQDYDRSSLSEFLANEGTVEAMVSMLTAQHLVMQNEALIALCILSVVYLSQPSEAAQAQLLQDELVKCEVGKKLAELISKSSDTMTKEIVENLQNCVNLLKSSEQLVAHLEQHNINELLKSIPILTEYCTL

SEQ ID NO: 6805 - DNA, 2894 bp, DROSOPHILA
tgcctcactttgtctggagggataacagaaagtgtaagattgtctgaccgacttgtcctaggattaacctgctcttaaatgctgcactttgtggaggatcaagccaagctgttgcccagctccatcaaggatttgcaggcgaggcggcatttccgcatcccagttggtccgattctcgcactggggcttctgcaattgcccgtctgcatggtgtacaacctggtgatggccatcaccacggacttccagtccaccacgtataccacctgtaatgccttcaacatctttccctccacatcggcggctgccaagtctcagcacaaagtgtgggctctggcttgctacctggagttcccatttctcattgccagtgcatggctgcagttccgattctatcggaggaatctgcgcaggccggtccgaggtttcggctgcctgatggccatcattatggctgtcagtagttccagcgtactgctatggggcaccttcccccaagaggatggcgactcattgctgcacataaccatcgccttgtcgctattcgtatcgtgtgccatttacatggcaggttcctttgtgtgcgccaagtactatatgagcgataggattgggcagctgcatgaggaattctccttgcggttgaagagcggtctggtgctcacctactacgtctgggtggtggtcatgtggattttttactttatacaccagaagttttgctttcccttgggtgagtagaacctaaccgaatggaaggatgtctacaattctaatccccggatcctctgcagcctactccgtattcggtatgggcgagttcatctcctgtgagtgcttctttatctatctatgcacggtctactttgacttctaccacgtctacatatgttacgaccaacgtttgggtttcttcctcagcgagatgtaaacagttcccaattccttataaaatgtattaaacaaaaacaagcaaaaaacataaaaggaatgcttaacgttacgtctcgtagatgcgcaccaggtcgtccagactgatgggatagtgggtgaccgggcaggtgccgtgctccttcatgtggctaacgatgcacttccagcaaaagacgtagccggaaacggagcaggcagtgggcgtctggatggacagcaggcagactgggcactctccccgctggggaaggctctgctgcacttccttgggcagctgctttctcggcatcgcttcgggatttatcagagttccacccactttccgccgctggtcgttggagtaccaccactggacgaactgcaggaagaaggccaagacctccagcatctttaggaccacgtaggtccactgatcctctttgggaggttcgctgggatagcgaagggtcagccccaacaatctgaagatgggcgagtggtttgaggcgtactttacgaggtaaaagaatgtgtgcgccgccttggcggcatggaaagcatggaatgcgcttagaaggcgttgctcccagggactggtgtcctcgtgcctggtgatcctggtccttagcttccgctccacgtaaggcatgaaggttagcagtgtggcagaggcgaactgctgcctgcggttcagcagatccccagtggttgtgaccgtcctttgcaatccgtaaaagctctcaccgaaagaggaggccctcttgcgcagatacaggtactgcagcagccaagtcagcaatggcgacagctcctcctgaatcctcaaactcccccatagtttaaagtccaggcgtagtccaaagtagtcgaatatcttgctcagtgccgggtaaatcaggttgtccagcgtctctgacgctgaaatttcgaagatcgacggcacattttgaaggttctggcgcacatttgccgcttctgccattgtgtttatagcatttaaataaatggaattaaattcgaataccaattatgttgttattcttatcagtactggtgttatcgggcttggcttgaaaacagtcgagtgctcatcaatatatcgataagtcgttggcaccatcgatagttgggttaataatctggcaagatttgtttattttgtggtgcagcttcgttgtttatttaccaactgttgaaaatatatacatttatgaattatacaaaaccaagaagatgaaaacctctggcgccagcaatactgacgagctgaacaagtcatcgcacagcaaagtcagcaaaaagtccactaagtcgcgatctaagtcggcgaaattggagttgactggaaagaattccctgtcggcatccgcatcatcctccatcgcatccgcagtgagcgggggcgttgcagtgggcagcctgccggccacgcccactcacctaaacatggtgacaacgcccaccacgccaacatctagtctgggtaactacaatctgtttgacgcctcatttgcggtagcaggaagtggtgggcacggacttgcaggcggcatcgcgggcgcagaagcctctggcaactccagtcgaatggtaaggatgccaatctcagggccctcttatggtacaagctctctttactgtagggtcatcagaagagctatgctggtttcgatccgcgcagcatcaagatcttttgggagcagcacgaccagaccgatgtggaactctcccaggatgtgtgcgcccgtttggcggaagatgcctcctacaaagtctgggagctgatcaatgtaagtcgaccgtaatacacctctttaatccctctaacctcttgatctctcagaatgtcaaaatatactcgcgccactcgggcggagtggtgacatacgacctggtgaacgaagtgctaaaagatgccgatgtgccgcctatgctgggtgcgatggacagcgactgggaccggatcgactatgacggcagtt

SEQ ID NO: 6806 - DNA, 894 bp, DROSOPHILA
atggcagaagcggcaaatgtgcgccagaaccttcaaaatgtgccgtcgatcttcgaaatttcagcgtcagagacgctggacaacctgatttacccggcactgagcaagatattcgactactttggactacgcctggactttaaactatgggggagtttgaggattcaggaggagctgtcgccattgctgacttggctgctgcagtacctgtatctgcgcaagagggcctcctctttcggtgagagcttttacggattgcaaaggacggtcacaaccactggggatctgctgaaccgcaggcagcagttcgcctctgccacactgctaaccttcatgccttacgtggagcggaagctaaggaccaggatcaccaggcacgaggacaccagtccctgggagcaacgccttctaagcgcattccatgctttccatgccgccaaggcggcgcacacattcttttacctcgtaaagtacgcctcaaaccactcgcccatcttcagattgttggggctgacccttcgctatcccagcgaacctcccaaagaggatcagtggacctacgtggtcctaaagatgctggaggtcttggccttcttcctgcagttcgtccagtggtggtactccaacgaccagcggcggaaagtgggtggaactctgataaatcccgaagcgatgccgagaaagcagctgcccaaggaagtgcagcagagccttccccagcggggagagtgcccagtctgcctgctgtccatccagacgcccactgcctgctccgtttccggctacgtcttttgctggaagtgcatcgttagccacatgaaggagcacggcacctgcccggtcacccactatcccatcagtctggacgacctggtgcgcatctacgagacgtaa

SEQ ID NO: 6807 - protein, 297 aa, DROSOPHILA
MAEAANVRQNLQNVPSIFEISASETLDNLIYPALSKIFDYFGLRLDFKLWGSLRIQEELSPLLTWLLQYLYLRKRASSFGESFYGLQRTVTTTGDLLNRRQQFASATLLTFMPYVERKLRTRITRHEDTSPWEQRLLSAFHAFHAAKAAHTFFYLVKYASNHSPIFRLLGLTLRYPSEPPKEDQWTYVVLKMLEVLAFFLQFVQWWYSNDQRRKVGGTLINPEAMPRKQLPKEVQQSLPQRGECPVCLLSIQTPTACSVSGYVFCWKCIVSHMKEHGTCPVTHYPISLDDLVRIYET

SEQ ID NO: 6808 - DNA, 4025 bp, DROSOPHILA
attgtatttccatttagtagtcgcaatacaatcttcgaattcttacaagacgaaattaaataactttgaatagaattttgaaatgaacgaaatgatttgatataaattgactctcgattcttgatttttttttaaacggaactattttcaataaacataaaacgtttacattaacaagtctgtaagtttaatttgaatggaacatacgaagaaagcgataatttttttttgtaatttaactaagtatttttaaagggctccctctaatttaatgtccaatcctttgaagttatgtatagaaactagcttgtagttcaaaataaactgaggaatgattttccatttattgaaatgaaactaggattcttttttagcattcccaaaatgatgccgtcccgctttttttcgaaacacgtttgttttttggtcttgtaatttgtttagcataaatttattaatatgggaaacatacaagtacagtatttacaatagttttgactactattcattttttactcttcgtctattgaattcttgcctaagcgattttggtttagtcccactgtgctaacttccatttcgtttggtaaaataacttaactttagctttacgtttaaatggttatatttaacgttattttctccttcgtctctttgcttttgcttttgttttttttttttttggttaagcaagacaaacaacaacaaaaaaaaaactgtgaggcatatagtaatagtaatagtaatagtaatagttttaatcaataacgatgtacaagcgaatcgttacgcatcaattttctcgcatttatttaaatttcttttggttttcgatttgtttctttcttttttgtttaccttaaaaaagatgtatatataaaaaaaaataataacataaaaacattctgaactggtttggtttttttgtatgcgtctgtgtgcgtgagtgtgtgtggtgtgtgtgttcgtggtgtgtgcttttttggggtgtgtgtggattttgtttgtttgctgttgttgctgcgcctgctcccgggaagtgtggcccctactagtggtactggtgtctcagctactcctctctccgttccgttgtcgcaactcttgctcctgctcttgatcctgctcctccggcagatcctttatccgatggcgcactgctgatcgacttgttcttggagcgcgccgagccattggtcagacgtgcattccccgaactgtctgtgagatcctcactatcactggaacgtatgtcaccggacatctgcaagggaatggatgagtggatgagtgtttgcaaaattcaatctatgtacgtagacaattgaataataagtaggttaaggttaagataaacagcacagttaagaggataacagcttgatggccacatggctccacacttaccagacccttctgcagagagtcgacaacaatcttgaggatcatgtatgtccagatgacgtgcaggacgagcagcatcagaagcagtgagttgaagatgtagtaggctgggaacatgggcagaatgcgcggtgcttccacggatgagctgccgggtttatcaggatggtgttggcatggaagagcatgtcagttggattgggatcaacgatcaacaaagagagggacttgggcgctgcccaccactcacctataaatgatgcgtggatagaagcccagacgcgtaacaatccacaccactgtgaagatggcaaagattgcatcgcagagcttctgatatttggcatatttggtgagtttggcggcctccaagaagatgtcagcacaatcgtgaacgactaggacgagcgaaccgacgcgatgcagattgcacacccagctgagcgacattaggagcagggtgaccatgtgatggatgaacatctgccagaagtccttgcgtttcacatcgaagaactgggtgccagtgagtgaccagtagaaggacatcgaaatcatgtagtaccaccagatatcattgctgatcgactgcaagcgttagaatatgcattgaattgtatgtataaaaccatgctaacaagagtcgaatccatcgaaatccttacctgatgcgggtagccgtaccagcagctcttcacatcccaaaaccagggcttgtcccacagcacgatcacgccaaagatgaagctgtacagatagtagatgcaacgccacgtgttctcgcagaacttcaccagcgttgacggtttatcctgggccctgcgtagacgccaccagcgctcgatttcgcgctcgctcatatccgtctgcttggacagcggaaccagctggatgggaatcagaatttccacgatcagacatccgggcaggcatatatagtgtgtatgatggactcacctttttcttgtccaatcgcgtcgatttggcataggtcttctccagaataggaacatttgccgctttcttaggcctagaactacgtatgccaagtgatttgcctacgggcgatatccagaaactgcaagtaatattgagtttttgattagtgctatttttaaatgctttatgagttagataaagcagttagttggaggcataggttttaaagtttatggcagatagataaactgagggccagataatgttgagtttcatatgaacttgaacatattgcataatgaaaatacatactcggaccacacacccaaaccaattttattcaaatgaattcaggaactattgtaatcttggctatggaactgctatctatcttcgagacccgacacaacaacatatccaataaaaagttccattgggcttgacacaacatccctaattatgcatgtacgtacgtacgtacacccatggcggaaacgtttcgggattttcagtttctgttgctgtttatgattttgctttattttattttatttatatttatttcgcacacacacctgtcgtcgccccaacgtctggcacgtgtgaggcatggcaacagggacttgttgggatgtggatggggattttgggatcggtttttggtctgcccgtacgcccccatgcatgggtaattagctcccccaaagctggagacaacaccaacaccacgccagacttacgagcatggagtagttgtagctcgtttcggaagttcatttgccaatgaaatcgaaaatcgaaaatgttcgatttgcagatcgcctggctgctcctctacgtttggaattccaagtggtttccaaagtaaccctcattttgtaggcaaagcatgaaagcacaacgcggaaatatcagtttttctattattacttataacaattaattcgaattaatgtcaaatctgggctcaagttcagttcaagttcaagtagtgcgtaattgaattaacgcaccaagaaggatttaattgacccgcattcgaagtggaatattgatctatcttctatgtcttctatatagggagtaaacactgtaattggaggcttcttaaataggaagtgcgtgttggggtgtgtacaaataaattggactatttaagttttatcgaaaatttgttgcgagtgcgtcacaattaatgacgcacactgcacgtttcgttatcagcaataaaggtcattcaaatccgaaatatttctaataaaatattcatcgtcattttatgggtatgttgcccccgtttaaaactacactattctattctaggtttaaatactaaagggttcgatgttcaaagaaatatataagaaaatataaatatccgtacatgctggcaaattcaattagtttattacaattcagttagttgaaaaccatttaattttatttaaagataaattaccgttgccaaaacatcgatatgcacaccggtgcatggctcgaattttgcacgcatatcgatacttgatgccatcgctattgctgtaccatcgctatgaactactatcctcgaacttgtaaacaacaaaaagccacttcatctagtgaccatttggagctgcccgtccgtttggagctatttcacctactggctactgtcaccacctcacactgaaccgctccga

SEQ ID NO: 6809 - DNA, 1092 bp, DROSOPHILA
atgggggcgtacgggcagaccaaaaaccgatcccaaaatccccatccacatcccaacaagtccctgttgccatgcctcacacgtgccagacgttggggcgacgacagtttctggatatcgcccgtaggcaaatcacttggcatacgtagttctaggcctaagaaagcggcaaatgttcctattctggagaagacctatgccaaatcgacgcgattggacaagaaaaagctggttccgctgtccaagcagacggatatgagcgagcgcgaaatcgagcgctggtggcgtctacgcagggcccaggataaaccgtcaacgctggtgaagttctgcgagaacacgtggcgttgcatctactatctgtacagcttcatctttggcgtgatcgtgctgtgggacaagccctggttttgggatgtgaagagctgctggtacggctacccgcatcagatgttcatccatcacatggtcaccctgctcctaatgtcgctcagctgggtgtgcaatctgcatcgcgtcggttcgctcgtcctagtcgttcacgattgtgctgacatcttcttggaggccgccaaactcaccaaatatgccaaatatcagaagctctgcgatgcaatctttgccatcttcacagtggtgtggattgttacgcgtctgggcttctatccacgcatcatttatagctcatccgtggaagcaccgcgcattctgcccatgttcccagcctactacatcttcaactcactgcttctgatgctgctcgtcctgcacgtcatctggacatacatgatcctcaagattgttgtcgactctctgcagaagggtctgatgtccggtgacatacgttccagtgatagtgaggatctcacagacagttcggggaatgcacgtctgaccaatggctcggcgcgctccaagaacaagtcgatcagcagtgcgccatcggataaaggatctgccggaggagcaggatcaagagcaggagcaagagttgcgacaacggaacggagagaggagtagctgagacaccagtaccactagtaggggccacacttcccgggagcaggcgcagcaacaacagcaaacaaacaa

SEQ ID NO: 6810 - protein, 339 aa, DROSOPHILA
MGAYGQTKNRSQNPHPHPNKSLLPCLTRARRWGDDSFWISPVGKSLGIRSSRPKKAANVPILEKTYAKSTRLDKKKLVPLSKQTDMSEREIERWWRLRRAQDKPSTLVKFCENTWRCIYYLYSFIFGVIVLWDKPWFWDVKSCWYGYPHQMFIHHMVTLLLMSLSWVCNLHRVGSLVLVVHDCADIFLEAAKLTKYAKYQKLCDAIFAIFTVVWIVTRLGFYPRIIYSSSVEAPRILPMFPAYYIFNSLLLMLLVLHVIWTYMILKIVVDSLQKGLMSGDIRSSDSEDLTDSSGNARLTNGSARSKNKSISSAPSDKGSAGGAGSRAGARVATTERREE

SEQ ID NO: 6811 - DNA, 3212 bp, DROSOPHILA
aaaaatacagcaacagaagctaattgaatttggccagctatgaaatgaattaccgtaaaaagcgaagaaaaattaagggggctttgacaacgcaattttgacgcaagtttatggctaaacataaagttgtaaaggaaatcttataaatttggcactaatctttgaaagttggttaatgattttccacattaaactaataggctttatgtgatcgttaaacgtaaatgtctctatttcgctgtgcagagcttagaatatgtttgttcacttctaattgaaattgtaaatgtaaattgttacgtaagcctttgctgactttatggcaattacatatatttcgtaaagtattggcgacatttttgagtgcattcacagcggccacatcttgcactcacttgacactcactccattcactgcggccaagtgtgagtgtgtctcagtgaatactttctcaagtaggtgtgaagctcaaaacgcattttcacgcgccaacgcagcttgaatgtcaacgtcgtcgtcgtcgcataatcatcatcgtatcatcatcatcttctcgagggagagagtctgagtttctgcggctgatgacatgctgctgcaaaaatggaaaaattatacaaaaaaaaaaaaaaaaaaagatgtaaaaacgacaaaaaggagaagaacgggggcgtctgttcacctactttcagctcaactgggcgtggaacttgggatcggttttaaccgctaacgggagcttgagacgtcgccacacgtgctcaagtggccaaggctgcttgcccgggctgtgacctgaccttcggccccagatctgtgccctcgattgccaaaagctcggcaaaggtcacaattatttgccaatatgacggcaaagcatatccaaaaacaattcttttgtataaagctacattcgttcgaattctaatcgagattcgattttacacacttaaatgttgggagacctttaataccctgtaaaatgagtatagaactcacctgccgctcttggtgatgaccatttccgtgcccagtttgtggaacttctcccacaggtctttgccctccagcgtgaccttgggatcatcgacgacgccatcgtcctcgggctgaagcgcccgcagcggtcgcatcgccggatgcagctgatgggcgacggccgaggcaaggacgacgtcctcggcggtagtataggcgctgcccagatgatgggcgtgcggatgggcacctgggtggtgcggcgggaagcgcaatccaccgccgggatacagacccggatgcggtccggccggacttccagctagagcggccagtgccgcagctggaaagtacggtggtggtggtggggccgggtgctgttgttgctgctgttgttgttgcaggtggtgcggcggtgtgggtggcggcaagcctgtggcgccggcgggcggtgcggcggcacccgtactgggtgagtgatgtgcggcggttgggtggtgcgacggatgggcggcggctgaagctgagttgttgctgctgctgctactgctgttgttgttgggcggtggtattggcggtagaccaacaattgtgggcggtggtgtgccagcgggcgatggcggttcctcggtggtgctcaagtggtgtccttgcttttgacttgtgttattattattattgttgttgttattcgtgtggttgttgttattattatgggtactgttattattgttgttattggaactggagttgttggtgttgctggtggtggtggtgttgctgctgctgtggttgctttgcggcgataactgcgcaccaccacccgttggtgaaacggccacgagattgttggtgttattggtgtttgaattggtgttgttgttggaattggagttgttgtttccgctgttggtgttgccgctgttgttattgttgctacccgccgtcaacagcgaggaaacgctgaagtcagtgggtcgttgcgttagctgcagaaatggatgatatgccatcccattggcgaacctggcgaatggatcctcagcagactgatgaaatagcagctcctggacgtcgtatctcatccttctcattttgatatgctgtgacggcgatgaactcggtctccttgaagacgtacgtgcgaaacgtggagtacggcagcttcaggatgtcattggctcgcaccaggtggaaacgcggctggtacttgtgcatcgagttcaggatcgtctgcgggcgggcaaataaaaatagatgcaaatggacgggggattagtgaaattgtcagacggccatggctagttcgtttcgaccaaccgagggaaaacaaaaacgggagaccaaggaacggtgcaaagaattcacaaaactctaaactgaacggcgaaaaacttcaagcacaggcacactgagaaaaagatgtggacgtcaggaaacgaagagaattttcacactcaaaaagttgagccattcattgctttctacaaaaaacaattgcgaatgtgcggagtcagttgatattttctcgctcatacactaaatactattatctagtttttctctctgtgcaaattaccttaccgtaaatttgcctaggtaagggaccccgaaaaaatacggcgacattgctgacgatttcccgccgtcgccgttcactttacacgccagcattggcaacagcaacagcaacagcaacatcgactgcagcaacggcggcaacatttgcaacacagccaacgcgaccacccaccaaaaggcacgagaaaatcgagaaggagatatatagtagtcccatgtatgtatgtatgtatatacgactactaggtagaatatgtagaaggcaggggggagaagaacgagggagcccgtgtgccaatacaaagttgttgtcataaaatatgaatttgtcgagaaaaggctgacagagaatgggaatggtggagacgtgtagggagagacagacctcccaggcaagctgcaatattccctccatatatacctatgtatacaatatgtatgtatgtccatacatatattgcccaatccattttgatccgtttcgatccgttgttgcagaaggaacacctttttaattaccataactcgtcggctcgacttcgattaagcgacaaacaggcctagtaaaacccggacaagttgctgctgagtcgttgctgttgctgctgctgctgctgcgtgtggagaccccacacgcagcacccgccgccat

SEQ ID NO: 6812 - DNA, 3023 bp, DROSOPHILA
gatgagatacgacgtccaggagctgctatttcatcagtctgctgaggatccattcgccaggttcgccaatgggatggcatatcatccatttctgcagctaacgcaacgacccactgacttcagcgtttcctcgctgttgacggcgggtagcaacaataacaacagcggcaacaccaacagcggaaacaacaactccaattccaacaacaacaccaattcaaacaccaataacaccaacaatctcgtggccgtttcaccaacgggtggtggtgcgcagttatcgccgcaaagcaaccacagcagcagcaacaccaccaccaccagcaacaccaacaactccagttccaataacaacaataataacagtacccataataataacaacaaccacacgaataacaacaacaataataataataacacaagtcaaaagcaaggacaccacttgagcaccaccgaggaaccgccatcgcccgctggcacaccaccgcccacaattgttggtctaccgccaataccaccgcccaacaacaacagcagtagcagcagcagcaacaactcagcttcagccgccgcccatccgtcgcaccacccaaccgccgcacatcactcacccagtacgggtgccgccgcaccgcccgccggcgccacaggcttgccgccacccacaccgccgcaccacctgcaacaacaacagcagcaacaacagcacccggccccaccaccaccaccgtactttccagctgcggcactggccgctctagctggaagtccggccggaccgcatccgggtctgtatcccggcggtggattgcgcttcccgccgcaccacccaggtgcccatccgcacgcccatcatctgggcagcgcctatactaccgccgaggacgtcgtccttgcctcggccgtcgcccatcagctgcatccggcgatgcgaccgctgcgggcgcttcagcccgaggacgatggcgtcgtcgatgatcccaaggtcacgctggagggcaaagacctgtgggagaagttccacaaactgggcacggaaatggtcatcaccaagagcggcagacaaatgtttccgcaaatgaaatttcgtgtttcgggactggatgccaaggctaaatacatcttgctactggacattgtggcggcggacgattatcgttataaatttcataatagtcgctggatggtggctggcaaagcggatcccgagatgccaaaacgcatgtatatccatccagattcgcccacaacgggtgagcaatggatgcagaaagttgtttcatttcacaaattaaaattgaccaacaatattagtgataaacatggatttgtaagtactacgatcctgaactcgatgcacaagtaccagccgcgtttccacctggtgcgagccaatgacatcctgaagctgccgtactccacgtttcgcacgtacgtcttcaaggagaccgagttcatcgccgtcacagcatatcaaaatgagaagataactcaattgaaaatcgataacaatccgtttgcgaagggctttcgtgatactggtgccggcaagcgggaaaagaattgttacaggcaggcactgatgtcgaaccgagggtccgattcggacaagttgaatccgacgcatgtgagcagctcgcgggcaccgctccacctgggccacgccggccgtccgcctcatctgcatccccatgccgccctgcttgataatcagcaggacgacgacgacaagctcctggacgtggtgggtccgccacagagtccgctactcccgctcagccactcgctgcagcagatgcacgcccaccagcactccgcagctctggctgcctggtttaatcacttggctggcgctggagccggagcctccgaacatgcagctgcggcggcggccaatgccagtgcggaggatgcactgcgtcgtcgcttgcaggcggacgcggatgtggagcgggatggcagcgattcgagttgctcggaaagcgtcggcggcagtaccggcggtgcctttaggcccacctcgacgggcagtcccaaggaggcggtgggcgcggctgcagctgccgcagcggctggcttgaatcccggtggcggtagctatccgtcaccgaatatatcggtgggtccgcccattcacccgtcgccgcatttgttgccttacctgtatccacatggcctgtatccaccgccgcatctgggcctgctgcacaatcccgctgcagcggcggccatgagtccggctggcctgaatccgggtctgctcttcaatgcccaactggcgctggccgcccagcatccggctttgtttggccacgcctacgcggcggcgggtcacacaccggtatcaccattacaaggcctaaagagccatcgcttttcgccgtacagtttgcccggcagtttgggctccgccttcgatgcagtgactcctggatcgaacgcaaatcgctcgggagatcctccaggcggcggcggcggcggcctgggtggtggtgtggtggagaatggtcccaggagtctgagttccagccctcgtccccgacctgcctcccactcgccgcccactcgaccgatttcgatgtcacccacaacgccgccatccctgatgaagcaaccacgtggcggtggtgctggcgccggtgtggcccaatcgcagcactcgccttcggaacttaagagcatggagaagatggtcaacggactggaggttcaacacaatggcagtgcggcggcagcagcggcggctcttcagctggccgaggaagctgcccagcatcatcatcacacccaggcgcaccaccagcagcagcagcatcagtcgcaccaccagcaacagcaccaccagcaaccggcacaaccacatccgcaccaccagacccatctacactcgcaccatggggcgacaacgggcggtacggatcaagttggaggaggatgtcgaggatctggatcaggatccggatgagcaggacgaggatcgcagctcggtcatcgatcttgatctggacgtcgacgtctga

SEQ ID NO: 6813 - protein, 988 aa, DROSOPHILA
MRYDVQELLFHQSAEDPFARFANGMAYHPFLQLTQRPTDFSVSSLLTAGSNNNNSGNTNSGNNNSNSNNNTNSNTNNTNNLVAVSPTGGGAQLSPQSNHSSSNTTTTSNTNNSSSNNNNNNSTHNNNNNHTNNNNNNNNNTSQKQGHHLSTTEEPPSPAGTPPPTIVGLPPIPPPNNNSSSSSSNNSASAAAHPSHHPTAAHHSPSTGAAAPPAGATGLPPPTPPHHLQQQQQQQQHPAPPPPPYFPAAALAALAGSPAGPHPGLYPGGGLRFPPHHPGAHPHAHHLGSAYTTAEDVVLASAVAHQLHPAMRPLRALQPEDDGVVDDPKVTLEGKDLWEKFHKLGTEMVITKSGRQMFPQMKFRVSGLDAKAKYILLLDIVAADDYRYKFHNSRWMVAGKADPEMPKRMYIHPDSPTTGEQWMQKVVSFHKLKLTNNISDKHGFVSTTILNSMHKYQPRFHLVRANDILKLPYSTFRTYVFKETEFIAVTAYQNEKITQLKIDNNPFAKGFRDTGAGKREKNCYRQALMSNRGSDSDKLNPTHVSSSRAPLHLGHAGRPPHLHPHAALLDNQQDDDDKLLDVVGPPQSPLLPLSHSLQQMHAHQHSAALAAWFNHLAGAGAGASEHAAAAAANASAEDALRRRLQADADVERDGSDSSCSESVGGSTGGAFRPTSTGSPKEAVGAAAAAAAAGLNPGGGSYPSPNISVGPPIHPSPHLLPYLYPHGLYPPPHLGLLHNPAAAAAMSPAGLNPGLLFNAQLALAAQHPALFGHAYAAAGHTPVSPLQGLKSHRFSPYSLPGSLGSAFDAVTPGSNANRSGDPPGGGGGGLGGGVVENGPRSLSSSPRPRPASHSPPTRPISMSPTTPPSLMKQPRGGGAGAGVAQSQHSPSELKSMEKMVNGLEVQHNGSAAAAAAALQLAEEAAQHHHHTQAHHQQQQHQSHHQQQHHQQPAQPHPHHQTHLHSHHGATTGGTDQVGGGCRGSGSGSG

SEQ ID NO: 6814 - DNA, 3083 bp, DROSOPHILA
agttccaccttgggcaggggttctagttcgttcacctccaccttgacctcactgggcgcaaaaaaggcctccgccaacgcgtccaactccacagaatatagcggattaatgatggcctcctctgtctgaccgcaaaattcgatgggttcgcttttggaatcgctgctccgctgccggtgcaggcaggagacgcgctggtgaaactcctcgaagctgctaacgcagttccagcactcccgacagacctcagcatcaccgccagccgtaagaacctgtggatggcgaagagttcggtttggtttatccaaaacttgcgattatggcgcagagcttacctcggagaacgcgaagtgcttgtggatggtcgccctaatgttcagacggacgccttcctcggattgtaggccgtagccagcattgctactgtccaggcagagcacacagacagtcatgacgaaaccggatgcactggctgagtcctaatcctgcttcatttccacacaaagtttttgtttacgattttgcaaaaatttgttttccaaagcaaagcagggttgacaggggcgtgcatgaagagctggtgagccgatagtatcgagacaagcagaataatcattagtgaaactgaaaaacaatttgatgtgctgatctttgtattgtattaaagcaatttcaattttgggcgaattatataatttaatatattaatgcaagaaatttatattaactgtacaatgtagttacaccctaacgccttttagattgccccctcgcacagtggaaagggcctcgtgcttgaaaaaaataccaaaacataacgcacattgcggtatcagctgtttcccatagctttgttgagtcgataaagatcagagttttaaccatttaatgcattattcagaagcgattgccccgaatgagcgaaaccaataaaaacaaggatcccacggggaccagtctgaagaagcaaccttggcacaagcgcggatcggcctctgcaatggcctcaaatatcttgttgcagctggcggccgaggatccccaaagggacgcttatcctaaggacacggtggtaagttgcctgttttataaatgaaatccatttttgcgacaatatcaagcccgcgtcggcggcacgcgcagtttctgttttcccgcgagtggtaaccaagtggtggtaggggcttctttgggcagtgcgcaatcgccagcgccctgcaccccacattcccatcgaatagtgaaaagttccagaaagaccagctccagccaactgaatcactgctgccgaaatcagcaagtccgaatccaagaggccaaagtatcacctacaacccaccaagtatggagaagatctggaagaaggtgtgcgagcaccacgatgtgcccgagcaggtggccaacgagtggttcgcccgcattcagcagcacctgagctccgaggatcccgctcgcgcctaccacaattgggaggagatgatgcggcgcaaggagccgcacttggcgggcgtggccaatcccaacattgtgctggccgccttcttccagtactaccacttcgatggtaaccgcagctgtgcggagaagaactgcgaggtctttgaggagttttgcaatgatgccgtcatcgaggatgtgagtaggcgtgcggtgtaactaaacctctatattcggcgtgctctaccttaaacaggaccatgcaaaaagcctggtatgtaatttgctggggcgcaagaccccggagaaccagttgacctggtgccatgacgacgaggccaacttgctgcaggacgtagacctggtggtcctagcgtgagtatttgtgcaatcattgtccgtgtatttcaaaacccatttacactactaaagtgcttcgccggaggagtacaagcactatacaactctccttcgctcggagtacgccaatctcgacgatgccacctacaaggccatgcgcatcaaggtgctggagaccctgctgatgattccctccatctacgccactggagactaccacgacaagtacgaagagctagcccgcgccaacatacgcaacgagatcagcgagctgaagaagcagtaaatcagagttggaggaccaggatgtaacggggctgctttgtttactgctgttgagttgtgtacttactggccgttttacctcggttgactgcaaggcactcgtgtattggttgagcaaccttctctgccgaacatctacttaattttactcctaagtgaagtgtaatcaaaatcattttcctagttagtgtgtacgcctagatatatacgtaagccctgtaaactccagctcagaataaaattgatgtaaatgatgtaacagaaatgcagtttcactcaaagcacttaaagaatcaatgtatttgaaatcgcagtaagtaggaaaagtaaccgtagaaaaacttttccaaaactatgatcaagtcacaaatcaattaattacattccatttttccatttatagatcgcagcacaagaaacaggggcctccagctcaaacaccaaaatgcccaaacaagccgttaagcacaagggcttcaagaagatccgaggccctaagccaaaggtaagcaatcgaaatataaatatatttgtattatagtatgcgatactccacagaacggccagaaaagactgaagcgcaatgcgactcagaagaaggcacttaatcgagaaatggtatccaagttcctaaactccattaaaaaaaagtatgcactgcagaaaaatcatcacattaagcgcaggttggacttccgcagaagggaatcgccagaaaagaaaaacgccctgcccaagccgaagttctacaacccgaataaggtaatgcttttataggtaatatgtttcaacaatataacattctggtcaaccgaacatcagaatgacaacaaaaaagaagaaggagaaatcgtcacagagttggacagcagcgatgatgacgactgcgttttgctggatactccaaacgaatccattagcattctagatgacgaggatgacgagcccagcaccagtgaccagctactaaaacagatagttatggattgcaatggcgaggc

SEQ ID NO: 6815 - DNA, 843 bp, DROSOPHILA
atggcctcaaatatcttgttgcagctggcggccgaggatccccaaagggacgcttatcctaaggacacggtgtgcgcaatcgccagcgccctgcaccccacattcccatcgaatagtgaaaagttccagaaagaccagctccagccaactgaatcactgctgccgaaatcagcaagtccgaatccaagaggccaaagtatcacctacaacccaccaagtatggagaagatctggaagaaggtgtgcgagcaccacgatgtgcccgagcaggtggccaacgagtggttcgcccgcattcagcagcacctgagctccgaggatcccgctcgcgcctaccacaattgggaggagatgatgcggcgcaaggagccgcacttggcgggcgtggccaatcccaacattgtgctggccgccttcttccagtactaccacttcgatggtaaccgcagctgtgcggagaagaactgcgaggtctttgaggagttttgcaatgatgccgtcatcgaggatgaccatgcaaaaagcctggtatgtaatttgctggggcgcaagaccccggagaaccagttgacctggtgccatgacgacgaggccaacttgctgcaggacgtagacctggtggtcctagctgcttcgccggaggagtacaagcactatacaactctccttcgctcggagtacgccaatctcgacgatgccacctacaaggccatgcgcatcaaggtgctggagaccctgctgatgattccctccatctacgccactggagactaccacgacaagtacgaagagctagcccgcgccaacatacgcaacgagatcagcgagctgaagaagcagtaa

SEQ ID NO: 6816 - protein, 280 aa, DROSOPHILA
MASNILLQLAAEDPQRDAYPKDTVCAIASALHPTFPSNSEKFQKDQLQPTESLLPKSASPNPRGQSITYNPPSMEKIWKKVCEHHDVPEQVANEWFARIQQHLSSEDPARAYHNWEEMMRRKEPHLAGVANPNIVLAAFFQYYHFDGNRSCAEKNCEVFEEFCNDAVIEDDHAKSLVCNLLGRKTPENQLTWCHDDEANLLQDVDLVVLAASPEEYKHYTTLLRSEYANLDDATYKAMRIKVLETLLMIPSIYATGDYHDKYEELARANIRNEISELKKQ

SEQ ID NO: 6817 - DNA, 4305 bp, DROSOPHILA
cttacaatctacagctgccaacgcagagacggctgcgcaggcgctgctgcttttgctggatctgccggagcatgctctgctggagccggtggtcgagaatctgctggagtgcaccaacaagtcgcaggctatggactacatttcgctgttaagtccccccaagcgcaatgttttcatgcacctttgtatgttcctgcgcgcgggcatcgagagtcagttctatgatctgcatcaagtcggtaggtagagaagctccagcagcattgtaccaccatcgtaacgccattcctcccacacagcatccacctttggccgcattctgttgcgaagcaccgagcgtgccgcctggatggactaccacagccgatgcatacagttcatgcggctcttcatcgacaccgacgtcgaggcaatgggcaacggcaatgagggcgccggaactggaacaggctcgggatctgggacccgggcgggtctgcaggcatagtcgccgcagctgtgccgccgaatcggaagcgagcgatagatgtactactctgttgatagttacgcatagtgttaagctatttattttatttgttggtactttgttggcacttagcatttatatcttctctgttttaactgttaattgtttgtgcccgccctccgttcattccaactcggttgtccccgcctgcatcacaaatccatggagacacgcaaccagcaacgcaaagataaatgaattgtgtaaataagtaattcgtttagcacgattgtttgttagtttaaattaatgaagtgaccctcttacatccccgtttcagttgcaactgaaaataaataacaccgttacatacagtatcaatattctgaaaaatctctacattggctgttcacatatttggccacgcccgccaaaattttcaaaattaaaagacgcgctacggatttgtgagtacggatggtatcgattaaattcccaaagttatcgacagtgtaaccagatctaaagtggcgacttcagttgacggcagagacgacagcagaatgcaaaggcaacggattactcccaggatttaaatagcatagattatcgttgaaaccgctgacgacgcgcccagatgagctccatggactgcgccacgttcccaatgcatcctaaaatggacgagcaactggcccgaaccttcgtcatcaacgaggaggaggaggagaagcacattcagaaggtgcagaacgccttcctttactatgggtaattgttattgtttttgcgctgtgttctggagcacatgctccaaacggacgcttgccaaccgatcgtcgttgagggggggcggtgcggtgacagcgacatgtgcagacaagctgccgacaaactaccgtttcgtttggcgccagtgctggcggtgcaggagtaatcacgccaaatctggctagtgttttcaaatggctcaccgttccttagaagacgcatcttctaaagtatccaatagagccaaactacaactgagtgttcattaccaccattactgacatttgggtgaaaaatatctgcataccaaagatatcagattgcccatacagcgtttgtaaacactgtagtgtgtcatcactggtgataagcgtgcttgctgataatggaaatcaattaatttctcccatgcaggccatatgcgtgtcagcggctaaagcgctccatggattacctgaacagcctgtctggcgaggaccaaatcatgctagccaagtaccgagggcatctggagtgcgtgcgcacgtgcatcgatcgcaaccaggcggttatccgggaaatattgcgcgggcgtgtcctctatccgacggatgaggcgactggtgatccctcggagtttgacgagccgccgccaaatgtgcggcacggtgacatggaccaggtaattgactacatctgcggttcaatgcggaagctagacggcgctccttcatcatcccacaaatcccaatctaatagaatttatgttcctctttttactttatcttctatttttcctaccgctttgtaaatggtcagttgaatttgtccctctttatattttcaaatattagaattacttttggtaaaacaagggaagagtaatatgtatctttaaactggtcattcttgtgcttaaaaattgtttctacatgtcaatagactactcaccttacgtatagtttaatgtgcttggttatcctccaatatcttcagtttctcttttaattattgattggaactattcggtattgtttcttttccatatctgtgcacgacacccaaaccatgcatctcgcacccgctctaattcaactcgcagattgatattccattcgatgaagctgacgttgaacctctaaaaattttaaaggcccagtcgacgttgaagttgattgcgcgcgactggagcactgaaggagccttagaacgggagcaatcgtataaaccgatcatcgacagcatcgttgcgtacttcaagcacagcgatttgtgagtgactactacactaagcgtactttagtggtcttactaattaattattcatctgctttatcttaaacagcgagctgaaggatataaagatcctagtgccgggagcggggttgggacggctcacctacgagcttgcctgcttggggtactcgtgcgagggcaacgagttttcctacttcatgctgatcgcctccaattttgtcctcaacctgtgagtccagctcagtacgttgctttctaatgctgggtattgaacgtgctctgttgtctctttcggcagctgcgacaacgagaacaagtacgtgttatatccgtgggtgcaccagtatgtgaataacttaaggcgtgaggatcaggtggcccccgttcgtttcccagacgtctgcccgcttaaaaatccacccaagggccattttgaaatagcagctggcgactttctggaggtctacaagacgccgaacgcctacaactgcgtggctacgtgcttcttcatcgattgtgccaataatgttattgacttcatacgcacaatttacaagtgagttgcacacatttgaacgggtataccggcgatgttgattttaacattatcgttgcagaatcctcgtgcctggtggcatttgggtgaatctcgggccgctgctgtaccattttagcgacgtcagcgggcaaaacagcatcgagccggctttcgaggacctttgcattatcatggaaagcgtaggattcgttatcgagaaatcacgcaccggcatccgtaccaagtacgcacagaacccgtcttcaatgaaacagagcgagtaccagagtcttttctgggtctgccgcaagccggatctatttgaggagcagcggggcaaacgcaaggcctccagggagccacacgatcttattgtgcgcgaggacagcgaggaggagggggagcaacagccggaacgaaatgaaacggaagaaaaacagcaactgaaaccgctggccacagccaactgcgagactgagataaaggagcagccatcgtgatagccattgaaccaaactcaacaacacatccaaacaccacaatcaagtccaagtgcaaacccacctacagatggcatcacgaacatcttaattaccacgtcacaggcaagacagggaatcgacactgcagtgcttcgatgttatagattacactttatacctattatttactcctacacactgttatatatgccagttttaatttttcaaaggatgcaaattttaggacaatttctcgctcattatgctcatcatgctaacttaaatgggaaaagcgtcccaactaggtcaaccaaatatatcaaaagaaaatttttaaaaattaagataaaaagtttttatttgttcaattactagtggctttaaaccgatacctaccaattcgatagccttattaaagttaacgcaagttccacttgcatcagggttctcggcactcgctgccgcatacctcaccttgatatgacaaccaacatgctgtggttctccaaataatagtcaagatagttaagagggttcgagtttacgattagctttattttaagattcagttcgcgatctgctagcggttccgttatgtgtccgttcgagactgggcctcttctcccgccccgctgcttttatatccgcttcccccgttgacccctcaccctgagtgcgaccaacggcacttgttccgaatgcacacatacacaaacatgttcctagacaggccccgagtcgcctgctgacggggcccgaaaacacgagagccgagcgctggtgagtcctgacgaagatcgcaagaagag

SEQ ID NO: 6818 - DNA, 1770 bp, DROSOPHILA
cgacttcagttgacggcagagacgacagcagaatgcaaaggcaacggattactcccaggatttaaatagcatagattatcgttgaaaccgctgacgacgcgcccagatgagctccatggactgcgccacgttcccaatgcatcctaaaatggacgagcaactggcccgaaccttcgtcatcaacgaggaggaggaggagaagcacattcagaaggtgcagaacgccttcctttactatgggccatatgcgtgtcagcggctaaagcgctccatggattacctgaacagcctgtctggcgaggaccaaatcatgctagccaagtaccgagggcatctggagtgcgtgcgcacgtgcatcgatcgcaaccaggcggttatccgggaaatattgcgcgggcgtgtcctctatccgacggatgaggcgactggtgatccctcggagtttgacgagccgccgccaaatgtgcggcacggtgacatggaccagattgatattccattcgatgaagctgacgttgaacctctaaaaattttaaaggcccagtcgacgttgaagttgattgcgcgcgactggagcactgaaggagccttagaacgggagcaatcgtataaaccgatcatcgacagcatcgttgcgtacttcaagcacagcgatttcgagctgaaggatataaagatcctagtgccgggagcggggttgggacggctcacctacgagcttgcctgcttggggtactcgtgcgagggcaacgagttttcctacttcatgctgatcgcctccaattttgtcctcaacctctgcgacaacgagaacaagtacgtgttatatccgtgggtgcaccagtatgtgaataacttaaggcgtgaggatcaggtggcccccgttcgtttcccagacgtctgcccgcttaaaaatccacccaagggccattttgaaatagcagctggcgactttctggaggtctacaagacgccgaacgcctacaactgcgtggctacgtgcttcttcatcgattgtgccaataatgttattgacttcatacgcacaatttacaaaatcctcgtgcctggtggcatttgggtgaatctcgggccgctgctgtaccattttagcgacgtcagcgggcaaaacagcatcgagccggctttcgaggacctttgcattatcatggaaagcgtaggattcgttatcgagaaatcacgcaccggcatccgtaccaagtacgcacagaacccgtcttcaatgaaacagagcgagtaccagagtcttttctgggtctgccgcaagccggatctatttgaggagcagcggggcaaacgcaaggcctccagggagccacacgatcttattgtgcgcgaggacagcgaggaggagggggagcaacagccggaacgaaatgaaacggaagaaaaacagcaactgaaaccgctggccacagccaactgcgagactgagataaaggagcagccatcgtgatagccattgaaccaaactcaacaacacatccaaacaccacaatcaagtccaagtgcaaacccacctacagatggcatcacgaacatcttaattaccacgtcacaggcaagacagggaatcgacactgcagtgcttcgatgttatagattacactttatacctattatttactcctacacactgttatatatgccagttttaatttttcaaaggatgcaaattttaggacaatttctcgctcattatgctcatcatgctaacttaaatgggaaaagcgtcccaactaggtcaac

SEQ ID NO: 6819 - protein, 456 aa, DROSOPHILA
MSSMDCATFPMHPKMDEQLARTFVINEEEEEKHIQKVQNAFLYYGPYACQRLKRSMDYLNSLSGEDQIMLAKYRGHLECVRTCIDRNQAVIREILRGRVLYPTDEATGDPSEFDEPPPNVRHGDMDQIDIPFDEADVEPLKILKAQSTLKLIARDWSTEGALEREQSYKPIIDSIVAYFKHSDFELKDIKILVPGAGLGRLTYELACLGYSCEGNEFSYFMLIASNFVLNLCDNENKYVLYPWVHQYVNNLRREDQVAPVRFPDVCPLKNPPKGHFEIAAGDFLEVYKTPNAYNCVATCFFIDCANNVIDFIRTIYKILVPGGIWVNLGPLLYHFSDVSGQNSIEPAFEDLCIIMESVGFVIEKSRTGIRTKYAQNPSSMKQSEYQSLFWVCRKPDLFEEQRGKRKASREPHDLIVREDSEEEGEQQPERNETEEKQQLKPLATANCETEIKEQPS

SEQ ID NO: 6820 - DNA, 6664 bp, DROSOPHILA
tttgagaatgcagaggaacttacggaggagggtctgccgttcctaattctcttccaccacccaaccgatcataattctatcaaggattacaagtcgatcattgagcgtcaattgctggatgagaaacgtaagatgaatcatcgtgttgtttactttgcatataagcatttggtttgacattgtattttcgaaattttgcagagaacgtcaactttttgaccgccgatggcaagcgattcgcgcatcctctgcaccatctgggtaaatccgaggatgacttgcccttgattgccatcgactcgttcaagcacatgtatctgttcccccacttcagtgacatgtactcgccgggtaagctgaagcagttccttcaggatctctacagtggcaagctgcacaggtaattgttatacagccgcctttgctaacaccatggggctcaattactaaacggtctgctgctttgctttccagggaatttcattacgggccggatccctcaaatgatattgaacctgacccacacactggcaagggtacatcgccaccagagtccaaattcaaggaacttggcccatccaagcatcgctacaccctgctagaaaaagatgaactgtaatataataataataatgtatattgaaaataaaagaaaataatacaaaaatgtaataatgagcaaccttctctgaaagcagatcagcaggtgagcggttatccatgcaaatagcgggcgcagcagcctcaattctcttcaatgcaattctaaaaataaaaagtctggatttaaccacctttgttattgcaaaaagaaacagttgctgaattatccacaaattgcacgcgtcacttttcaagttttcctcgttttgttgttaaaaattacgctggagatttcggcgaggcgaacttattgaattctttggaatccccttcttagtcagctaagctggaaatgaatgatgtcaacttccgaattcaaagcagtgattttgattttctctatatatatatatatatacacatatatatgagctatatatgtatacatatatatatgtttattcgtatgtaccatgttacagttacagttgttaaattagattacataattatataatataattcagtcaaaacgagcgataaccgtgtgtgtgttgggataaaaatcggttcaaatgaagtcgtgtgctggcaattatcatttaaaagttgctctgactgttaattttaaaagtacatttaaaagcgtactctcgctacaattaataagtaaaagtgaaaaaaataggtgccgcgttcggctggctaccatgcgcttaatatggtctcgagcgcatgcctccatcgtttctcatcggtccaccatcgcggcgattgccgccaccacctccacggccaccgcgtcctccgccattgttgtcattgaagcgggagtagccaccaccaccgccgccgccgcctccgcctccctgcgagttgccaccgcgatctctgttgtgatatccaccgccgccggatccacgatcatttcctcggtcgtagcctcctccgccaccaccgccgccgtagccgccgcctccaccacctccgctagagccctcgtcgtcgcccttgggagtcttacatctgcaaatggacgtgattattattatcgtagcaagccaaagattgtaaaatttgtagttccccaaagataaagacttatggcaattatgtggcgtatcagcaaaaattgcttgctttcaaacactgataagtttttcgtctacactttgggttctccacgatatttacaagcaagtgtggagttttaggaattatgatggaatggaatgttgaaagcaattatatctcaactctcaactcacctattgcattcgttgcgccaggcaaagttggtgttattacagctgttgcatttccagtcaccatcacggggctgcacgttgccaccgccgccgccaccaccaccgcctcctccgcgatcgtagcgtccgccgccaccgcctcctccgcgatcgaagcgacctccaccgccgccgccacctcctccgccgccaccaccaccgcgacgtccgccaaatcctccgcgaccaccaccaccgccgccgccgcctccgcccttgttccagttgttctggcgctgggccagcgacaccttgatcgcattgccgttgaagtcgcgtccatcgaaccattcaatggcggattgtgcagcattggtgtcgtcgtaggtgacagtggcctctcccttggaggcgccggtctccttgttcttgtacagccaaatcttgggcttcattgtacgcttgtctttctgttgttagatcagttgcaaaggaatagaaagatacaaaggttaaaacgtagctacagatacataaaatacattactacttgccttgatgatgccaattgctccaaagtgtgtctcaatgtcctgctcggtggtcgagggatccatgccggagacaaagatggtgtcctcctgggtgatcatgtcgttgccaccggacccaccgccgccgcctcctccaccaccaccgccgccgcccgagtatcctccgtgtcctacaaaagcgaatgggaaataaggacgagctggcacggcagggtatagcttagaatgcaactgctactttatttaattaatatttggttttttcattttcttttttttgttttgtttttttcttagaacttctcgcctcactgcaaccaccaaaaaatgcaacgaaggtgaggaccaaagtagacggctgttccgtgacattttaaccaggacacttagatgtgaaaccagaattttgaggtgtatttcaaaaaacctttagtgggtggacgaccgtgggagagacgacatggggacactttgaacgggtttcggtcggcttttgagctatcaaagccagactgactggtacacaagaacacaaacaggtgaccccaaattgccaggagttagcccgaccgaccaacccttgatttgattcgtgacaacgctttgacacatgtatacaacactttacagaaattaaatactaaatacccgtgggctgaccgagtcggtcgttaaccattatatattgatcaaacagagatcaacgatttggaaaagtacgctaaatacactttataggtaacgatgcgtggacttttcgacgaaatttcaaatgggcaaggccccacaatgaaaagaatgccgccaggaaaggaggatgtttgtttaatatgcatattcaattatttactcttttggtttggaattagactctgtttttatgttctaatcggtttgggttttcttttttgtgtttaaaattttgttgttctacttcgattttagattcaagttcaatatgtagaaaaatattggtatacattactcgatatgtttgcaattgtttgcattatttttacctttgttgtagctgtccttgctggcgcctccatttctaaaagaggatattgaataacttatttaatgctttgattttggttttaatgcagtatggtgaggtatacgcctaggatcccttgttagaatacgtattgctttgttcgatcttatggcatctaataccatctatagagcacccggcacagttcggtcagtgacgacgacgttcaaacagcgaatgtccgttttgttgctttccatcacaaaattagagccaagtgcggcggcagtcactgatcaaactgccaaggaggacaacgtacatactgtttgccatacatacacctaactcttatacacataatcttaacgtttgcattagtctactattggaaaagcatttgtttaccaaattcacagaaatgagagggaaggaaggagttcgacccagttaaatacacttatgtatgtagtaggtatatcgcagcaaaataccatcgttattaaacacacaacactacctacatacctacattcttgcttaactactataaaacaagcttaaatgataaataattcaaaagtttagtagtttagtagttgttaaaatcacaaacaaaaaaaataccttaaaaacggtcaatgagattgaaactatataaaacaaattgcttaaaactatcttacatttagattgttagaggtaagctctctcttaggcgcaaaatcattgctttcttatgtgtataaacatatgtaataaccttaatagctaataattaaaatttgttattatttttgtatacgtaaataccttaagatgattagagtctcagaaccataccaattcctccgaactgtgcattaataatatatcgaatttttttattgtttattgtttttgtctcgagccacaatttatttaattttatgattgctggttgatattttttatattctttttagctttatatcttcgattacacttgtgtcatgtttgatctggttttcataaccatcctgttgggaacacacacattttttgaatgttcattttggaacatgtttatgctagcattgtatcgtattaaggcaggaatggatgatatagtgtatggtttaaaacgataataataacatgtgcgcgattctctatgcaattatcacaaattcatcatagatttcattaggcgaccattattattccgattgcaacgactgtggtattacttattattacttattcagtataaccagtattatttatgcattgcagatatttgtttccccagggcatcatctgtttttttttttaccattatactcatttgactcgtcaaaaccattttgaaataccattttctaatatttttacacagattttcgatgaaaaaaaaacaaacgtacatgaaatacagtcatgcggataaataataatttgccaaattgggagatacgtttttttttgttgttataattttatgttttctgcgtttttaagcagtcggaacaagtcgtagttgcaggaatagcttcaagcagtttcacactctgatgcagcacagtgcatctcttgcatttcaataatatctttaaaatacgcttcatgtttcaaggagtggctcggtgtcttttctcattggtttggctggattgatttgtaaatatttatatatgcgtacacttctcttataacacttaaaaaacctccgtgaaagactactacccatgatctaaatagcctcgctgtaactcaacagcagcgaaatactaaaagtggataacatacccgtaggaattgcctcctctgtcgttccatgatccgccgccgccgccaccgttgccgctgccaccagaaccacgatgaccggaaccggaatcataaccttaaaaacataagtttgtgagtattggtgtgttgctcgcaacacaaagttcgcatgcacgccttaccaccgccttgtttgccgtagttcggaggtggctcgttgtagttacccgttttatttggcatttgctggtaatttggtggggggacagcgaaattattatatccctgtcccgaaccaccaccataaccgccacctagagtgcacatatttcatcgttttcaattcacgttgcgacttatgcgcgtgttaaaattatacttacgttccatgtttaataaacgttgcgtgaagtctttttttaatcaatagaattgcaggagtttcaataactcgctgcgtacaaattgctcgaattgaagaaagcgtcagatcgtcacaaattctattgtaaaatggcgtgtgaaaattaattagggatgtgcgtcgaagggggctggtatgtgtgggtcttgtagcgcctatcgaaatatctatctatatatcattgaaatgtgtgggaatggaacacaaatatgccgaatattatatttgtgggaaaatacgtattaaatggtaaaaatagttttatttaatacattttatcatttatttgcatccaaatggactgaatccaagaggttttaaataattaatcggcagcttgatcgctttacaacactaaagcgcttgcatccctgcaaacattgtttacagtcgttagcacgtaactttgaatgaaagtcgaaatcagctgtttgtgctttgaaattgaattggtgtttacgtggatttaattttttctgaaatcaaattaaagcagagccaaatacaaaatgattgaaatatcagatttgcagagtaagtagccattaatatgcgaaagccatcagcgcaactaaaccgcctattgaaatcttcccgcagaaattggcatcggcttggctggttttggcattttctttttgtttctcggcatgctgctgctgttcgataaaggactgctcgccattggcaatgtacgttacccacatgcacatgcaccatatgccccatatagcacacccttcgagctctataataatagcaatcgcctctttcccgcagattctattcatatcgggcctggcctgcgtcattggcgtggagcgcacgatgcgctttttcttccaacggcacaaagtcaaaggcacaacggccttcttagggggaatcgtcatcgtcctgctgggattccccatcttcggcatgattattgaatcctatggatttttcgcactcttcaggttcgtagcaccctggccaagtcccagtcggattcgtttaagaccatttgagcggggctaaccggttacgcactccacatggtcttttcgctttcccgctcttaata

SEQ ID NO: 6821 - DNA, 1619 bp, DROSOPHILA
ctgacgctttcttcaattcgagcaatttgtacgcagcgagttattgaaactcctgcaattctattgattaaaaaaagacttcacgcaacgtttattaaacatggaacgtggcggttatggtggtggttcgggacagggatataataatttcgctgtccccccaccaaattaccagcaaatgccaaataaaacgggtaactacaacgagccacctccgaactacggcaaacaaggcggtggttatgattccggttccggtcatcgtggttctggtggcagcggcaacggtggcggcggcggcggatcatggaacgacagaggaggcaattcctacggaaatggaggcgccagcaaggacagctacaacaaaggacacggaggatactcgggcggcggcggtggtggtggaggaggcggcggcggtgggtccggtggcaacgacatgatcacccaggaggacaccatctttgtctccggcatggatccctcgaccaccgagcaggacattgagacacactttggagcaattggcatcatcaagaaagacaagcgtacaatgaagcccaagatttggctgtacaagaacaaggagaccggcgcctccaagggagaggccactgtcacctacgacgacaccaatgctgcacaatccgccattgaatggttcgatggacgcgacttcaacggcaatgcgatcaaggtgtcgctggcccagcgccagaacaactggaacaagggcggaggcggcggcggcggtggtggtggtcgcggaggatttggcggacgtcgcggtggtggtggcggcggaggaggtggcggcggcggtggaggtcgcttcgatcgcggaggaggcggtggcggcggacgctacgatcgcggaggaggcggtggtggtggcggcggcggtggcaacgtgcagccccgtgatggtgactggaaatgcaacagctgtaataacaccaactttgcctggcgcaacgaatgcaatagatgtaagactcccaagggcgacgacgagggctctagcggaggtggtggaggcggcggctacggcggcggtggtggcggaggaggctacgaccgaggaaatgatcgtggatccggcggcggtggatatcacaacagagatcgcggtggcaactcgcagggaggcggaggcggcggcggcggtggtggtggctactcccgcttcaatgacaacaatggcggaggacgcggtggccgtggaggtggtggcggcaatcgccgcgatggtggaccgatgagaaacgatggaggcatgcgctcgagaccatattaagcgcatggtagccagccgaacgcggcacctatttttttcacttttacttattaattgtagcgagagtacgcttttaaatgtacttttaaaattaacagtcagagcaacttttaaatgataattgccagcacacgacttcatttgaaccgatttttatcccaacacacacacggttatcgctcgttttgactgaattatattatataattatgtaatctaatttaacaactgtaactgtaacatggtacatacgaataaacatatatatatgtatacatatatagctcatatatatgtgtatatatatatatatatagag

SEQ ID NO: 6822 - protein, 399 aa, DROSOPHILA
MERGGYGGGSGQGYNNFAVPPPNYQQMPNKTGNYNEPPPNYGKQGGGYDSGSGHRGSGGSGNGGGGGGSWNDRGGNSYGNGGASKDSYNKGHGGYSGGGGGGGGGGGGGSGGNDMITQEDTIFVSGMDPSTTEQDIETHFGAIGIIKKDKRTMKPKIWLYKNKETGASKGEATVTYDDTNAAQSAIEWFDGRDFNGNAIKVSLAQRQNNWNKGGGGGGGGGGRGGFGGRRGGGGGGGGGGGGGGRFDRGGGGGGGRYDRGGGGGGGGGGGNVQPRDGDWKCNSCNNTNFAWRNECNRCKTPKGDDEGSSGGGGGGGYGGGGGGGGYDRGNDRGSGGGGYHNRDRGGNSQGGGGGGGGGGGYSRFNDNNGGGRGGRGGGGGNRRDGGPMRNDGGMRSRPY

SEQ ID NO: 6823 - DNA, 15948 bp, DROSOPHILA
tttcaaccttcttcgctctgttttttttttttttctttttgctagttttattattaaaggcccatataaggcgtagcgtctaattcgtttgattgtctaacaatgaaaaaaaaataagcaaaaacacagaaaagaaacataataaagatgaaataagaaaaaacacttttcaatggcaaacggaaatggaaacattcagtgaatttgatgtgtatattagtgggcaaataatggatgtcatcatatatggcaagcacatcctgttcgcgatgatatagaaaaaaagtccgactttgggccgtttcacattccacagagaaagaaaggcaagaagcagatttttggtttaaataattgttttttttttattcattttgcactttatttatttttagttaattcatttagtttcgttttaggtatacatatatcttgattgattcaacaacagacaaatttttgcacaaagctcaacataaagacatagatcgtaatatatatattcgtaagcatatcaattaccatactgtcgaatgtcttgtatatcgtataataataataattaattgatttaaagcatataatagatgtatataatatatgtatgtatatatatatatatatcttgtatctgtatagtagtgtatagtatatagtctgtttaggaaatactcaaagaacatgaaacgaatcaagcgaatcgagtcagacacaagcttcggtttttcgtttcgtcgtttggaaaaacattaaatagcaaatcggaaacgggcacaaaaaaaaaaacaatacattatgcaaataaaagtagcaatacaatatgtatatatatatgtgtgtaggaaattgaaatacaattaaaaatgttacaataatcaacgattaacagagaatacacatatcgtaggacactcgaatggcgtccccttttgccgcggcacacataaaaacagacgagcacgggagcagaaacacggacttggctgcggcaaatggacaccggtttgggcacggaatccgcggctggatccgcgccagaaatgtaacggatagaatacagctttcaatacacggagtgaacaatgttgtctttctccaccagcagacggaccttcatgcagccatcggagccgcacgagaagagccgtccgaaggcatccacgtacacctggctgacgccctggccagtgtgcttaaagaatccgttcttggcatgctcatgcgggaacgtattgatcagcatgaactgattcatgtcccagatctgcgagataaacactgattaataaaaacgttctcaacgagcagttacgccactgaaattcaccttaatgtcaccctcaatggagccagtgacaaagaactcctcgtgcggatccagagcaatgcacttgatggtgctatcatgggcctgtcgaggaattaaacatgattatcacccgtttaaaccgatatctaaccgaacaactcacctgatagcgatgacgcagcgtacgttgtctcacatcgaagacgcaaacatcgccgcgtttgccgcacgagatgagcacctggtgctgcggagcaaacaccagacaggacgagccctggtcgtggcaggtgaaggctgcaaagggaatctcttagacgtcgaaaacttcatgaccttgatcaatggcaatcttacccgatacacaggactttttgtggggaagcaatgtgtcccagatgttgatgttcttgttctcggaactttgaccagctaaaaaaaaagagatgcaatgtaacaaggactcttttgagaacagacggtgtgttaccacatcacaactcaccgctagccaggagactgcacgagccgaggaacacgaaatcggacaacgccttgttgtggcactggtagctctgcaaagttagggattgcatggattaggatgtgggtcacgaatggagccagatcatgtgccaactcactataaacgaacgattattctgcgaggcgatgcccgcctgccagagactgagctttccgtcgccatcgccgatgccgaacttattgccctgctcggagaagcggcagcgcgtcaccttggcaaaggttcccgaagtccggggcgagcagacaggctgctggtgaccccactcccagatctgcacggatccgtcctgacctccagtaagatacagcggcatcagcggatgggcgctcatgcgcttcacattgtccaccttgtggcgcagcacctgttttcggtttaaaggcctcgttatatttaatcataaaatgctttccaggattacccaccatggatgtgccgcgtcccgattgcgaagcactttgtgtgctagcattggactcgctgtaggcattgctattgcttccaaattggtttctgtacataaagacgattgttacattcaacatactggaatttctttgccttcacttactgctcttgcgtttgaatgatcaggaaggacgagctgttggtgtccgcgtccttggacaagttcatcatgtcgtagtcgcactcatcctcgtaccaattcggcgactccagcagcagtgagatgtcgaactcctggatctcacgcggattcgcaaaggcaatcattgaggagctgttgttcttcaaacagaaggacaatatggactcgtggtccttgtgaatgatgcggatgtggtcggtattctcgttggtcgaatgagattgacctgcacagaaaatgaaaaatgaaaacgaatcacacaatgtgactgcctaaagactcaccctcatccgtctcgttgtcgttgttggtgtggtgcgatcctcgcgtgctgggctccatgttcttgacaaagatgctcttgatgaagacctcctgggcaggctcctggcgcaccaaatagttccacagtcgccttatgggtccagccgatgaaccggaaacgaatggtgtgttgtccttattcaggagcgagcggtacttgtggatggccaatccgttgatgccgctctccgcatagcagcctggtatataattacgggacggtggcccacgagctatgaggtcactcagggcaaagtcctgccagcgattgagggtcctcagcacctcgtgggagagtggactgatcacaggcaaatctgcacgaagcggggagacaatatagagaggagcatttagtggatgttggcgagtggatggatgaaatgttacaactaccctgcagttcgatgccggccaccttgaccagctcctggatcttgtgcgtgctgatcttgatgagcgccaggcgcaggatactccacgagtacgacgtgggattagtgtgctccgtgttatccttggccttcagctgcgatcgactcacattcacatcatcgtcgtcctcctcctcctcctcgttgtccgactcgtgcgagtcgtccgtatcgtagtcatcgcattctgtaagagatttaccatcttactaagtgtgttattacttggagaattaaaaacctaccggttgtgggcggtttggtaaggaagtaagatagcatggacgtctccggtggcataaactgctcccggtatgtcggcttgtcctctttcatgttgcttgaagtgctgttctggctaaagctgcctagaattttcatgttcagtttcatgcgttgctttgtaatggaagtaaccgtgttccaaacgctattctcatcggtcggctcttcggatgtggaaccagtaccaccacttgctccgccagctcctgctcctccggtcaccatttgggtgggaggcggtgcagcagcgggctttataagcaacttcttcatgccgccgccgaaaagagtggaccaggtctcgttgttgaaactctggccactcaggcggtacaacaaacgactatcgcaggtggatagcgagtaaatgaagagcgccatataggtggaaacaaaggactccagcagcagcacatttagcttaggcacatcctcatccttttcccgcgccaaaagcgcacggagattggttacacccggccacttggaaggcgtggtgcacacgcctgctggctcatccgtagagtacttgcgcctgcggccataggcattccggctgcccaccaaatagctgcactcgaacgatgagtttatcttagctatgttctccattcccggactggggtaaccgttgaaggccgagttgtttaccacaaagctctcggaatcgcagagcgactggtaaatgcaggatgacagcgccacggcaagatcccgcaaaacaaagatctcgctcaaagcactgggctcgattcctgggaagggcagcaccttaatgatgctctgcagcatgtccaccgtctgggactgcaggtacttgatgggatcggcgatcaccgtcttgttgcccgccacacaggcgcttagcagaggcaaagtggttgggaagggtagcggactcagaagctgctgttgggtcttctcctgttggagctcctgcaggagcagtaccagctccatgcgcacggatgccaggccaccaccactggcgccgtgtagggaacaataactcagcagtgtgcggagtagggtttcatttgctaaaaaaaagaaggcaatccattagttacgtacacaagaatgtatcgaagatgatcatacccttgagccatcgcttgcgtttggccgcccgcatcaccttggcctcaaagtcttgcttgtcctgcatgaggatctcgtgaagcgtaggtcgctcggtgctgggatagatgctggcgttcatctccttgtccctggcctccgcatcagcatcaccagattcgtgactcgactgctccgcttgactgcagtagttgcacagctgcttaagtgcctccacctcccgctccagccacatgtacagctgatagcgcaactggccgccatccacctcaaaaccggtggccagcgtagacaactcctccataagaatcttcagacaggcgacgaacttaagctgctgcgccatgatgtccatctttgtgtcgttgccattcgatttgcctctgccaagaattggggcctgcggctgtggcgtggctagctccggttcgtctggctccaaatctgggtcttcttcctcgtcctcatcatcccattttatttcaaacttggcttccggctcgctggacacgggtgcgccccagtcgaaggcatccgcagtgtttgacgcagcggcaggagttgctccccactggtccataatgcccgtgttgatcagctcctccttgttctgctgggcacgctcctgcgcctggctgccggccacactgccaccagaatcgtcgctgatcttctggggcagcttgttgagcacctcgagcgccagcgccgggcacccgctcttgaagtgcccatgggcggtggtgaagtacaattgccgttcaatgggcgttattgaatcctccagttgcaactgtttgtcacaggccacggcactgggagcagcatcgccggcataattgaaaccggacaagaccacatgcgcaatgcgcttctcctgcgccgacaaagcgatgttctgccggatgagcagcggatgggtgcgcaaatagatgtaaaagttaaagacattgggatttgtggcctgttgttcgggacgcagtagatcctcctccctgtagctgctgtgcaggctgcccacgttgttcaggagcagggtgttcaagctttcctgatacttcttgatcgtccagtaggtcatcgagcgcaagaagggatcgggatgcgcgcgactgagatcacagcgcccagttgccgcatccgtgcccaaaatgtgctcgtgcagcaagtggtggtagtagcagccctcgccgtcgccctcatagagtcgagctatgatcagggccagttggaagtcctccagcttgttcatgcacacttcaatggcgtcgttgaggctattggccagcaggaagaaggccaccgcgtgctcgaatctctgcttgcccaatagcacaaaggcattcttcaatgccgccttgcgccagcgatcctcggcaaaattgttgccaaagaaggcggtcatcttctcgtcccgacgtgaacggaacagaccccagaccagggacttcttcttcatggccaggtaatagatggccgcgtccagtggctcctgcttctgctggtaggcgcacttggccagcttctcgacgcatctcctcagcgtgttaatgttcttcagccagtagccgacgcccagatcccgcagcgttgcccagcggagatcgcctttggtgtagctaggaatgaggttaagcagctcctcctcgctctccgagtggaaggcccacacgatgttggaggtgcccacgccctggcgctggaactgcgccctctgctggagcggcaggcatcgcagcaggtaggtgaagtgcttcatggccagcagaaagcgtagaccgcaatcatctagggaatcagtactggtgctaccgtccttaacggctcccgatccagctccgccggccattccgcccgacttgccctgatcggcggcaaacttgtcggaaaagtccgtattgcacgtggccaccgtatcggccagagccagcagatgcatctggtccagcgaggagagtcccggcaaatgggtgtgggtcagcaggcgcgaaagaagctgtccctgccgcggaccaaagtgcgaaatggagtgcttctcgggcagagagagacggcgctcctggcgcttcttctcatcaccctcgctgagcagctcatccaggttgtcctccgagttgtgcatgtcaaagagctcgtcgtagtccttgtcgccctcagcatagttgttgctctgacccggcgtctcacgatccgcattgaggagcacccacaagggtaatggcggaatcgaattgatctctgcgtagtccagcatcagctcctcgggaatttgggtggtgctgccgcgatgctccgcctggatgttctgatccgctgtgtagctaatgctcagggtacgagatctcgaccagctgcgctgtctggcatagccatcatcgtcctggttcactgtactcgaactattgccactcatgcagcgcaccagatgcgccaggatggccttcacccaacggatcttgccacagttaagcagctccatcagctgcttgggatggtattgcggcaacactggacatgcgatgcgagaggcctggaacagaccgaagtccgtcatgtagtcatcgttgccgccgtcatcagcgccaccgccatacgttccagttcctcctgcaccgccggctccgttcatattggccatgctggtgttgcccagacgacgcttcttgtcgtgcgacagcagctgcagattggccgtgctcaccttgctgattagcggcatggacgccacgttcttgaggcgcagctgcgtggactcgttggccagcgaacgcagatcttcgtccctcaggttacgagtatccggtacatcttcgccagcagcagccgctgcagcggcaaagtgcgaggaataatggggcttccactgtgagtaaacgtgcatctcggagtccatggccaccactagaatgccatcgcgcacccaagagatctgcatgggcagcggcggcagaccatcggcggtctggaggtctatctgccgcaacttcatccaacggatctcgtctacaaaattgggctgcgccagcgaactagcctttcgcaggatgggacgattcactgaacgcgactccttcatcgccttgatgttcgcctgggcaatgtccgagctcactggggtgtacagcagaatcttgctgcccaccgcaacggtaaggatgtgtgaaccatcctccttgctcacccagtccagttggaccaaatgcttctgggtcagcggacaggtgttcccattttcggctatgctcttgcgaagagattgcagcgtactgaagctgggcacggttagcaatccggatgcagcggccgacggttgcctattgacggccaactcgggtgtggtctcgccactccgcggcgatctgctttccggatcgtgtgcgaaggtgtgcaggacctggttcagccgttgcttcttcgccagcaggcgactgtcgtgcaggtaactcagatcgatgccatgaccaatattgattcgcggcaaatggacattcttcaggtgaatggtgtcttccagcacccactcactgccgccggagctctcgcactcgtagatggccacgcagaggttaacgtaacgcgaatccggatcgggtcccttattgggtcgggtaaaactcttgccgtacttgtaggcacaggctatccggccggaataggcggcactgatgttcagcggctggcccggaatctcgatggccgaatgctgaatgcgactaaacatcttccactcgctccagtgataggcatcgccttccggattcggatcatcctcatcaccgatgggctcgcacttccagaaacgcgaaatggaatccgagcaggcggtcacaatgatgtacggcgcaaagcaggctgggtaaatgctggagctgctcagatgaccggcggccggagaggcatggatgacgtccacgccctcgggcagtggcagctcttgagtgcacaccttcttggtggtaatcgaaatgtgaggcgcctccacttggggaccaaagtgctcggctcccgtcagtgtttccgctccctgcgacattcgcctgggattaggattaccaccggcgccatcctcatctggctcctgggtaagattactatccggcacatacatggccgtctcggaaaggaacgagctctgctgcttcgagctgatgactatgcgccacatgtgtatggtgctgccgcgcagggttttctcgatgttcacaatgtagaagggctcctcgaagtccgcattccgctgcaaatcgacgatggcatccatgtccgactcgagcagagcgttcagacgtggctcctccaaatcatggggatccgcctggggcgtcctctggccacccgttatcaactgcgcctggaacacgtgcaggaactgcgtattttgccagtcgtgcttggcatccgagatggcgtccagctgcaagatgcaaccgggtctcgccgtcgactgttgcgacacaaccttgagcttgtcgtgcagcgccgatcgctgggcccgcatcgtagacgaagcattcgagatcatcgacgacagcgaatgcgatttgtgcagcgtgtttaggttctccgagcaggagatctccgccagcagggtgcgggcatcgatcactgcctgatagacgcgcagattttcgccatcgctggccacgaagcaggcggacggggagttactgtagctgcccagtgtggtgctcggcaggagggtgggaatccaggctacattgctgaaggccgagatctccggcgagttaatcctcgccagctcgctgacaccgcccgaatggcacagcggtcccacggagtccacacgccagaggattaactccgaacaaaagcccgtgggcgtaaatacatctttgtctccattggaaccaacagagggaccggctccagtcccgccgcccgagggaagtccaccactcaggggttgctcaaacagtgacattggtgacttggcctccgaatcgggcaggttgtggtgcgaggtggagacgagcagcggtaacaccgggtggcaggtgatgtcgttcacccggaaccgatggccggaggcacgacttacgtggccaatgcttaatacttgggtaaacttcgtcttgaaggcaaacgtcagctgccaaaggttaagggttccatttgagtgcttggtcaccatggaaaccgagggagaaacgttcaggggcaatgcactggctccagttgcagccgaatcttgcgagctactgctgtgctcggctgctccgcctccactagccgcagcactgcgatcgccaccaccctcatcttgatctgcgtcgccttcgcgatctccatctccatcgtcatcggcagcatcctcctgctcttcgtcgtgcctctcgaaggtctgccccgaatgctggtcactcttcagggaggaatcatccgcgtgtcccttgtgaaactcatccttgctgcgcacattgttcgctatgtcgcggaaggccagcggatgcgtgcccgtgttgaagaggctgaccgtggtggacatggacatggcgtcgcccagagggaaggccgaaggaatccgagtggagaaggagacctgcgcctgcctgaacgagcccggatagtagtcatccagccactcgatcacccagatcaggtagctcccgtccaccggatgaatggcgaagagcagatccgggctctggtgccagtcgcgcaacaaacactcgatcttattgtccaacgaatccactagctgcgtaatcggatgggccggctcattgttgagcgagttctgtgacgtcgtattggacatggagttcagatgcagcccggcgccgccacctccgccacccattcccgtgcccgccgtgtgctgcgaataccggctaaactcctcgccgctatcgtccacggacaccgatttggatgagcgcaggtacttcttgtgcgcatgtgcctgcgaatgggaaccgtgggcatcgtccggtagatcgacgccgccgctggaggcattcccatgaccgttttcctcgtcgatcaccttcttggtgagctcctggagtatagcctccgcctgcagcgtgaaatgcatctccttgttgttcagccagtgcaggataaagacattctgattggccggatcgctggtctgcatcgatggcaccagcgggatgtccgtttccgcgtttatcgacgcggccaggtggaagtgcataccgggtgtaacgcccgatccctggaatccgtaagagtgaaaatcgtggacgctgcacgaggatggtagcgagggtattggtcccaggtagtttgtatagctagccggggagctacccatgccgcccattgctccggcggttccaccgccactggcagcgcctgcactggctgcacccggcacggcactcgctccggccttcatgtgccgacggatatggaagcaggtcttcatgtgcttcagcctctgcatgaaccgatgcttgtgccgatgcgtacggaacttggggttctgcgatgccatcggatcgaactgggtcatgttcaccattccgtcatccggcagcaccgtctcgatccagatgcgacatatgttgtccagacaggacgtgaccagcatattggcaaccgaacccttgggcatatacttgctcgtcttgcgccacacaatattggacacggctcgcggatgggcgatgtacacgtaggtgaagtttagctcaccgccagaacttgaggtggtaccatcgtccactccgtggcgacatgatggcgtgggtccggcattggaggaacccttggccgggaatagaacctgtttgttctcataccagatctttaccagccgatcgttgcgtccgcaggtggcaaagagcgttccatccggactaaatgccatgtggtaaatgggtatggccgtttggcaactccaaatgttctcccacgtggacacatcctccgattgggcgttgctcgtctgcttgggctccttgctctcgccaatctcgaacttgacacctatttgaaaaggtgatactgattagtatcaagtcattgacaaaggaatatcgtcaatgaaaactttttcattcacagtgctctaatatcaaataaataattataaatggaaccagaaatggaaaccagactaaacaagaaaccgagcatatcgctcttaattacaaagccaaacaaacgtatggagttattagacaaaatacagtacgaaagatgagaactacaaccttgcaattgtttataatagctccataaaataggaaaatggaaaacggaaacaccccactgacgacatcacaaaacgtaaaaaacaaaaacccattgcaagtaatttgcatttgtgattcatctccgcccacgcaaatcgataggtggccacacagagacacatagaaatggggtgttgggcagctattggcttacccgtgtgctcctcctcctgctggtgagtgggcgacttgctcttccacagctggatgttggtgccgccagtgaggaggcgggtgccctccagattccaggacagggtcaccacgttcgagtggctggtgaaggagcccgtttgcacccatctatgggggtatgaaaaaataagttagtatgtctttgggcttcttaataccatcgctagcttacctgtaatccagaaagtgggtattgtgtttgctcgactcaatcaccggcgtgggctcaaaaatgcatatcttattctcataggctgctgctatttttccggtatcggtgctgcagtccagggcggatatcttgacatagccatggttggcgcccggaatgatctggacgcgctcgaaagtgcttgccaggatgaccacattgcagccggcggcgtaggcctgataataggaggggcgaaatggggattttgtgagtactgcagttaatctaagcgttatacgatcggtatgtgttttctcagttatttgtttttgagtggctatgtgtatatagggcgggtgggtatatagctttatatcgataacaataccccaactgtccagttaactggcttatcaggctggctgatgacaaggctcttgccacatcatgtttggttacctggttagctaaagtgtgtttgatttatttgttgagctgtcgctgatatgctcattatcgtggccagaaatttgaataccctgttcgagtgggctagggagggggtacactatttatagtggaaacactattcatgttaattatctctaaaacattaccgcatgacgatctgtggcaaaggatcattagtgcgggtgtaaagggttgagtcagcaggctttatctttataattggctcattgatgcgggagattacagataccccgtttagttacaatagcgataaatggggaatatcaacagagaatctgtttgcaatggcttatcgcgatattggaatgtgagccttatttagctagttaatgaataaaaacatcatttcataaaaacaagggtattaacaacttcgtcactacacactacacacctgctaactttttgacataaaaaggttcaactactctgcttttctgtcgtgtttatatttagctttttgctttccggttttcccattgctttaaatgtcagcttatgatgggtttatgcgtttaactgagaatattacccattaagtaaacacaccgatgatacttttcaatggagggttttccgaacttttcgcttaccaacccattagtgttcccgcggataagattactttatataaaactttgttacctgctgaaaataaacagtgatttttttacggtatcctattgtagtattgctatactattaaaatttgactttaaatgcggttttaatgagtttattatttttggtttccccttccaaacgctaggtggcgccaggggagtgtgttcgtgccgatcatatactaaataaatatatgcatacacacatacatccacacatatgcaaacactcgaaattaaacaaattgaaatgatggcaaatgatatggcgcaaggcggtgggcagtgggtgggtgttgggtggttggtggtcggtctgtgaacgggggactgtgtcaacggcggtgctgattacagaatagaatatagtagaatatagaatatatatataatgtacacatacgccccgtggggcctctcattagaatggcaaaatgtgcacagtagttaattatgcttccttgggtttttgcaggaaaacacagaccttgttctctacatcggataaacattctgagtaaacatatagtacacatgtctcaatgggtgtaatgtttataaactcgaagttgacatagcgaagtttatagtgagctcttcaactttttcctgttaccgttaaaggttttagacacgaaaatggccagattgctaagagtatttggtagtatatagtatagggatcgaataaggcacattataaatgcgtgctcacgtttttttattatggccgtttataattccaatttgccattgacgtgggttggcgaaaggggttgcggggcggggggtgctgccatagagaaagggttcgtgggaaggggaaggtgggcagcctgcaagctgcgaaattagggcatcaaaggccacctgaccaatcgaagggtatacacacacacatactcgcacttatatatatatacatgcgtatatactttcaagcacacactctcactgcaactggcgcatgtgtgtgtgtgtgtgtgcgtgcggcttgtttactgccagcacttgaccttaaaaaaataaaaatgtaattaattgctggccaggtatgtaaatgcaggtgaaaacaaacattgtgttgtatttgttgtgccacacaacatacacacacacacactcgagctgcacactttgttgttatcgaatttttgcacagcgccagccagcaaacacgaaaagttctctatctcatcatttgcatttgattttttaattgaccaccaagtgtggcaaaaaaaaacgatataaaattcaacacacattcacacacaccgcacacacgcacaccacacacacgcaaatatgtaaataaaaacattaaagacgtgctccgatcggttcttgttggaatgacgacgatggtgatgatgatgccccgtttccaattggaaacggttcaaccttttgaaccaagtgtgcgtgggggggttggggggcgtgtccggctggttgggccgataatggtgcacattccgccaccgattttcacccaattcgatccggattcggattgggatggctctgtgcttactgtaaatggtattccttccacggagccaatggcgaagcaccggtcgcctgcattgcaagcgccgctcaaaatctgatgacaattcataatttacacacagttgattatcacatcacagcgcacggatattggggtcttggttctttggtttctagcacgaattttccttgcttcttgtaacaaacgacaacaaagtgacattacataaaaattagagttgggttcttggccagcgcggccaatcgaactatcgatattagggatggcacggcatgggaggcgaaatatcgcctgagtaatttaaatacggttactccaattaaccgaaaaactgtttatcatttaattaaaatattattattaaaatatttcattttattttcaaaaaatagaggtgaatattttaacctattgaaattatatttaattattctgcttcgtctatatttagtattttttctaatatccgttcgatttgattcgatttcgatatcaatttcgattgccaataaaaacgaaatcgtggaatatatatcgattcatggtatcgataggctgtttcgatattcagggttgtgttgcgagcatttttgcatgttgaaaacgccgaaaattagtttttggttttgtttataaaaatagctccgaaatggcggcaggtccaattgctgaacgcaaccaaggtgggtttgacctccactccacatttgcaccacttgggagacgctttaacccgccttttccgttccttccacagatgccaccatctatgccggcggtcttgacgacaaggtgtcggaaacgctgctttgggagctgtttgtccaggcaggaccagtgggtaagtcccggacacacatgtatagtgcctagcagctccctaatcgtcatgcttgcagtgaacgtacacatgcccaaggatcgtgtcacccaaatgcaccagggctatggattcgtcgagttcctcagcgaggaagacgccgactatggaataaagatcatgaacatgatcaagctttacggcaagcccattcgcgtgaacaaggcgtcggcgcatcagaagaacctggacgtcggcgccaacatc

SEQ ID NO: 6824 - DNA, 10353 bp, DROSOPHILA
atgaattgtcatcagattttgagcggcgcttgcaatgcaggcgaccggtgcttcgccattggctccgtggaaggaataccatttacagcctacgccgccggctgcaatgtggtcatcctggcaagcactttcgagcgcgtccagatcattccgggcgccaaccatggctatgtcaagatatccgccctggactgcagcaccgataccggaaaaatagcagcagcctatgagaataagatatgcatttttgagcccacgccggtgattgagtcgagcaaacacaatacccactttctggattacagatgggtgcaaacgggctccttcaccagccactcgaacgtggtgaccctgtcctggaatctggagggcacccgcctcctcactggcggcaccaacatccagctgtggaagagcaagtcgcccactcaccagcaggaggaggagcacacgggtgtcaagttcgagattggcgagagcaaggagcccaagcagacgagcaacgcccaatcggaggatgtgtccacgtgggagaacatttggagttgccaaacggccatacccatttaccacatggcatttagtccggatggaacgctctttgccacctgcggacgcaacgatcggctggtaaagatctggtatgagaacaaacaggttctattcccggccaagggttcctccaatgccggacccacgccatcatgtcgccacggagtggacgatggtaccacctcaagttctggcggtgagctaaacttcacctacgtgtacatcgcccatccgcgagccgtgtccaatattgtgtggcgcaagacgagcaagtatatgcccaagggttcggttgccaatatgctggtcacgtcctgtctggacaacatatgtcgcatctggatcgagacggtgctgccggatgacggaatggtgaacatgacccagttcgatccgatggcatcgcagaaccccaagttccgtacgcatcggcacaagcatcggttcatgcagaggctgaagcacatgaagacctgcttccatatccgtcggcacatgaaggccggagcgagtgccgtgccgggtgcagccagtgcaggcgctgccagtggcggtggaaccgccggagcaatgggcggcatgggtagctccccggctagctatacaaactacctgggaccaataccctcgctaccatcctcgtgcagcgtccacgattttcactcttacggattccagggatcgggcgttacacccggtatgcacttccacctggccgcgtcgataaacgcggaaacggacatcccgctggtgccatcgatgcagaccagcgatccggccaatcagaatgtctttatcctgcactggctgaacaacaaggagatgcatttcacgctgcaggcggaggctatactccaggagctcaccaagaaggtgatcgacgaggaaaacggtcatgggaatgcctccagcggcggcgtcgatctaccggacgatgcccacggttcccattcgcaggcacatgcgcacaagaagtacctgcgctcatccaaatcggtgtccgtggacgatagcggcgaggagtttagccggtattcgcagcacacggcgggcacgggaatgggtggcggaggtggcggcgccgggctgcatctgaactccatgtccaatacgacgtcacagaactcgctcaacaatgagccggcccatccgattacgcagctagtggattcgttggacaataagatcgagtgtttgttgcgcgactggcaccagagcccggatctgctcttcgccattcatccggtggacgggagctacctgatctgggtgatcgagtggctggatgactactatccgggctcgttcaggcaggcgcaggtctccttctccactcggattccttcggccttccctctgggcgacgccatgtccatgtccaccacggtcagcctcttcaacacgggcacgcatccgctggccttccgcgacatagcgaacaatgtgcgcagcaaggatgagtttcacaagggacacgcggatgattcctccctgaagagtgaccagcattcggggcagaccttcgagaggcacgacgaagagcaggaggatgctgccgatgacgatggagatggagatcgcgaaggcgacgcagatcaagatgagggtggtggcgatcgcagtgctgcggctagtggaggcggagcagccgagcacagcagtagctcgcaagattcggctgcaactggagccagtgcattgcccctgaacgtttctccctcggtttccatggtgaccaagcactcaaatggaacccttaacctttggcagctgacgtttgccttcaagacgaagtttacccaagtattaagcattggccacgtaagtcgtgcctccggccatcggttccgggtgaacgacatcacctgccacccggtgttaccgctgctcgtctccacctcgcaccacaacctgcccgattcggaggccaagtcaccaatgtcactgtttgagcaacccctgagtggtggacttccctcgggcggcgggactggagccggtccctctgttggttccaatggagacaaagatgtatttacgcccacgggcttttgttcggagttaatcctctggcgtgtggactccgtgggaccgctgtgccattcgggcggtgtcagcgagctggcgaggattaactcgccggagatctcggccttcagcaatgtagcctggattcccaccctcctgccgagcaccacactgggcagctacagtaactccccgtccgcctgcttcgtggccagcgatggcgaaaatctgcgcgtctatcaggcagtgatcgatgcccgcaccctgctggcggagatctcctgctcggagaacctaaacacgctgcacaaatcgcattcgctgtcgtcgatgatctcgaatgcttcgtctacgatgcgggcccagcgatcggcgctgcacgacaagctcaaggttgtgtcgcaacagtcgacggcgagacccggttgcatcttgcagctggacgccatctcggatgccaagcacgactggcaaaatacgcagttcctgcacgtgttccaggcgcagttgataacgggtggccagaggacgccccaggcggatccccatgatttggaggagccacgtctgaacgctctgctcgagtcggacatggatgccatcgtcgatttgcagcggaatgcggacttcgaggagcccttctacattgtgaacatcgagaaaaccctgcgcggcagcaccatacacatgtggcgcatagtcatcagctcgaagcagcagagctcgttcctttccgagacggccatgtatgtgccggatagtaatcttacccaggagccagatgaggatggcgccggtggtaatcctaatcccaggcgaatgtcgcagggagcggaaacactgacgggagccgagcactttggtccccaagtggaggcgcctcacatttcgattaccaccaagaaggtgtgcactcaagagctgccactgcccgagggcgtggacgtcatccatgcctctccggccgccggtcatctgagcagctccagcatttacccagcctgctttgcgccgtacatcattgtgaccgcctgctcggattccatttcgcgtttctggaagtgcgagcccatcggtgatgaggatgatccgaatccggaaggcgatgcctatcactggagcgagtggaagatgtttagtcgcattcagcattcggccatcgagattccgggccagccgctgaacatcagtgccgcctattccggccggatagcctgtgcctacaagtacggcaagagttttacccgacccaataagggacccgatccggattcgcgttacgttaacctctgcgtggccatctacgagtgcgagagctccggcggcagtgagtgggtgctggaagacaccattcacctgaagaatgtccatttgccgcgaatcaatattggtcatggcatcgatctgagttacctgcacgacagtcgcctgctggcgaagaagcaacggctgaaccaggtcctgcacaccttcgcacacgatccggaaagcagatcgccgcggagtggcgagaccacacccgagttggccgtcaataggcaaccgtcggccgctgcatccggattgctaaccgtgcccagcttcagtacgctgcaatctcttcgcaagagcatagccgaaaatgggaacacctgtccgctgacccagaagcatttggtccaactggactgggtgagcaaggaggatggttcacacatccttaccgttgcggtgggcagcaagattctgctgtacaccccagtgagctcggacattgcccaggcgaacatcaaggcgatgaaggagtcgcgttcagtgaatcgtcccatcctgcgaaaggctagttcgctggcgcagcccaattttgtagacgagatccgttggatgaagttgcggcagatagacctccagaccgccgatggtctgccgccgctgcccatgcagatctcttgggtgcgcgatggcattctagtggtggccatggactccgagatgcacgtttactcacagtggaagccccattattcctcgcactttgccgctgcagcggctgctgctggcgaagatgtaccggatactcgtaacctgagggacgaagatctgcgttcgctggccaacgagtccacgcagctgcgcctcaagaacgtggcgtccatgccgctaatcagcaaggtgagcacggccaatctgcagctgctgtcgcacgacaagaagcgtcgtctgggcaacaccagcatggccaatatgaacggagccggcggtgcaggaggaactggaacgtatggcggtggcgctgatgacggcggcaacgatgactacatgacggacttcggtctgttccaggcctctcgcatcgcatgtccagtgttgccgcaataccatcccaagcagctgatggagctgcttaactgtggcaagatccgttgggtgaaggccatcctggcgcatctggtgcgctgcatgagtggcaatagttcgagtacagtgaaccaggacgatgatggctatgccagacagcgcagctggtcgagatctcgtaccctgagcattagctacacagcggatcagaacatccaggcggagcatcgcggcagcaccacccaaattcccgaggagctgatgctggactacgcagagatcaattcgattccgccattacccttgtgggtgctcctcaatgcggatcgtgagacgccgggtcagagcaacaactatgctgagggcgacaaggactacgacgagctctttgacatgcacaactcggaggacaacctggatgagctgctcagcgagggtgatgagaagaagcgccaggagcgccgtctctctctgcccgagaagcactccatttcgcactttggtccgcggcagggacagcttctttcgcgcctgctgacccacacccatttgccgggactctcctcgctggaccagatgcatctgctggctctggccgatacggtggccacgtgcaatacggacttttccgacaagtttgccgccgatcagggcaagtcgggcggaatggccggcggagctggatcgggagccgttaaggacggtagcaccagtactgattccctagatgattgcggtctacgctttctgctggccatgaagcacttcacctacctgctgcgatgcctgccgctccagcagagggcgcagttccagcgccagggcgtgggcacctccaacatcgtgtgggccttccactcggagagcgaggaggagctgcttaacctcattcctagctacaccaaaggcgatctccgctgggcaacgctgcgggatctgggcgtcggctactggctgaagaacattaacacgctgaggagatgcgtcgagaagctggccaagtgcgcctaccagcagaagcaggagccactggacgcggccatctattacctggccatgaagaagaagtccctggtctggggtctgttccgttcacgtcgggacgagaagatgaccgccttctttggcaacaattttgccgaggatcgctggcgcaaggcggcattgaagaatgcctttgtgctattgggcaagcagagattcgagcacgcggtggccttcttcctgctggccaatagcctcaacgacgccattgaagtgtgcatgaacaagctggaggacttccaactggccctgatcatagctcgactctatgagggcgacggcgagggctgctactaccaccacttgctgcacgagcacattttgggcacggatgcggcaactgggcgctgtgatctcagtcgcgcgcatcccgatcccttcttgcgctcgatgacctactggacgatcaagaagtatcaggaaagcttgaacaccctgctcctgaacaacgtgggcagcctgcacagcagctacagggaggaggatctactgcgtcccgaacaacaggccacaaatcccaatgtctttaacttttacatctatttgcgcacccatccgctgctcatccggcagaacatcgctttgtcggcgcaggagaagcgcattgcgcatgtggtcttgtccggtttcaattatgccggcgatgctgctcccagtgccgtggcctgtgacaaacagttgcaactggaggattcaataacgcccattgaacggcaattgtacttcaccaccgcccatgggcacttcaagagcgggtgcccggcgctggcgctcgaggtgctcaacaagctgccccagaagatcagcgacgattctggtggcagtgtggccggcagccaggcgcaggagcgtgcccagcagaacaaggaggagctgatcaacacgggcattatggaccagtggggagcaactcctgccgctgcgtcaaacactgcggatgccttcgactggggcgcacccgtgtccagcgagccggaagccaagtttgaaataaaatgggatgatgaggacgaggaagaagacccagatttggagccagacgaaccggagctagccacgccacagccgcaggccccaattcttggcagaggcaaatcgaatggcaacgacacaaagatggacatcatggcgcagcagcttaagttcgtcgcctgtctgaagattcttatggaggagttgtctacgctggccaccggttttgaggtggatggcggccagttgcgctatcagctgtacatgtggctggagcgggaggtggaggcacttaagcagctgtgcaactactgcagtcaagcggagcagtcgagtcacgaatctggtgatgctgatgcggaggccagggacaaggagatgaacgccagcatctatcccagcaccgagcgacctacgcttcacgagatcctcatgcaggacaagcaagactttgaggccaaggtgatgcgggcggccaaacgcaagcgatggctcaaggcaaatgaaaccctactccgcacactgctgagttattgttccctacacggcgccagtggtggtggcctggcatccgtgcgcatggagctggtactgctcctgcaggagctccaacaggagaagacccaacagcagcttctgagtccgctacccttcccaaccactttgcctctgctaagcgcctgtgtggcgggcaacaagacggtgatcgccgatcccatcaagtacctgcagtcccagacggtggacatgctgcagagcatcattaaggtgctgcccttcccaggaatcgagcccagtgctttgagcgagatctttgttttgcgggatcttgccgtggcgctgtcatcctgcatttaccagtcgctctgcgattccgagagctttgtggtaaacaactcggccttcaacggttaccccagtccgggaatggagaacatagctaagataaactcatcgttcgagtgcagctatttggtgggcagccggaatgcctatggccgcaggcgcaagtactctacggatgagccagcaggcgtgtgcaccacgccttccaagtggccgggtgtaaccaatctccgtgcgcttttggcgcgggaaaaggatgaggatgtgcctaagctaaatgtgctgctgctggagtcctttgtttccacctatatggcgctcttcatttactcgctatccacctgcgatagtcgtttgttgtaccgcctgagtggccagagtttcaacaacgagacctggtccactcttttcggcggcggcatgaagaagttgcttataaagcccgctgctgcaccgcctcccacccaaatggtgaccggaggagcaggagctggcggagcaagtggtggtactggttccacatccgaagagccgaccgatgagaatagcgtttggaacacggttacttccattacaaagcaacgcatgaaactgaacatgaaaattctaggcagctttagccagaacagcacttcaagcaacatgaaagaggacaagccgacataccgggagcagtttatgccaccggagacgtccatgctatcttacttccttaccaaaccgcccacaaccgaatgcgatgactacgatacggacgactcgcacgagtcggacaacgaggaggaggaggaggacgacgatgatgtgaatgtgagtcgatcgcagctgaaggccaaggataacacggagcacactaatcccacgtcgtactcgtggagtatcctgcgcctggcgctcatcaagatcagcacgcacaagatccaggagctggtcaaggtggccggcatcgaactgcaggatttgcctgtgatcagtccactctcccacgaggtgctgaggaccctcaatcgctggcaggactttgccctgagtgacctcatagctcgtgggccaccgtcccgtaattatataccaggctgctatgcggagagcggcatcaacggattggccatccacaagtaccgctcgctcctgaataaggacaacacaccattcgtttccggttcatcggctggacccataaggcgactgtggaactatttggtgcgccaggagcctgcccaggaggtcttcatcaagagcatctttgtcaagaacatggagcccagcacgcgaggatcgcaccacaccaacaacgacaacgagacggatgagggtcaatctcattcgaccaacgagaataccgaccacatccgcatcattcacaaggaccacgagtccatattgtccttctgtttgaagaacaacagctcctcaatgattgcctttgcgaatccgcgtgagatccaggagttcgacatctcactgctgctggagtcgccgaattggtacgaggatgagtgcgactacgacatgatgaacttgtccaaggacgcggacaccaacagctcgtccttcctgatcattcaaacgcaagagcaaaaccaatttggaagcaatagcaatgcctacagcgagtccaatgctagcacacaaagtgcttcgcaatcgggacgcggcacatccatggtgctgcgccacaaggtggacaatgtgaagcgcatgagcgcccatccgctgatgccgctgtatcttactggaggtcaggacggatccgtgcagatctgggagtggggtcaccagcagcctgtctgctcgccccggacttcgggaacctttgccaaggtgacgcgctgccgcttctccgagcagggcaataagttcggcatcggcgatggcgacggaaagctcagtctctggcaggcgggcatcgcctcgcagaataatcgttcgtttataagctaccagtgccacaacaaggcgttgtccgatttcgtgttcctcggctcgtgcagtctcctggctagcgctggtcaaagttccgagaacaagaacatcaacatctgggacacattgcttccccacaaaaagtcctgtgtatcggccttcacctgccacgaccagggctcgtcctgtctggtgtttgctccgcagcaccaggtgctcatctcgtgcggcaaacgcggcgatgtttgcgtcttcgatgtgagacaacgtacgctgcgtcatcgctatcaggtgagttggcccatgatagcaccatcaagtgcattgctctggatccgcacgaggagttctttgtcactggctccattgagggtgacattaaggatctgggacatgaatcagttcatgctgatcaatacgttcccgcatgagcatgccaagaacggattctttaagcacactggccagggcgtcagccaggtgtacgtggatgccttcggacggctcttctcgtgcggctccgatggctgcatgaaggtccgtctgctggtggagaaagacaacattgttcactccgtgtattgaaagctgtattctatccgttacatttctggcgcggatccagccgcggattccgtgcccaaaccg

SEQ ID NO: 6825 - protein, 3429 aa, DROSOPHILA
MNCHQILSGACNAGDRCFAIGSVEGIPFTAYAAGCNVVILASTFERVQIIPGANHGYVKISALDCSTDTGKIAAAYENKICIFEPTPVIESSKHNTHFLDYRWVQTGSFTSHSNVVTLSWNLEGTRLLTGGTNIQLWKSKSPTHQQEEEHTGVKFEIGESKEPKQTSNAQSEDVSTWENIWSCQTAIPIYHMAFSPDGTLFATCGRNDRLVKIWYENKQVLFPAKGSSNAGPTPSCRHGVDDGTTSSSGGELNFTYVYIAHPRAVSNIVWRKTSKYMPKGSVANMLVTSCLDNICRIWIETVLPDDGMVNMTQFDPMASQNPKFRTHRHKHRFMQRLKHMKTCFHIRRHMKAGASAVPGAASAGAASGGGTAGAMGGMGSSPASYTNYLGPIPSLPSSCSVHDFHSYGFQGSGVTPGMHFHLAASINAETDIPLVPSMQTSDPANQNVFILHWLNNKEMHFTLQAEAILQELTKKVIDEENGHGNASSGGVDLPDDAHGSHSQAHAHKKYLRSSKSVSVDDSGEEFSRYSQHTAGTGMGGGGGGAGLHLNSMSNTTSQNSLNNEPAHPITQLVDSLDNKIECLLRDWHQSPDLLFAIHPVDGSYLIWVIEWLDDYYPGSFRQAQVSFSTRIPSAFPLGDAMSMSTTVSLFNTGTHPLAFRDIANNVRSKDEFHKGHADDSSLKSDQHSGQTFERHDEEQEDAADDDGDGDREGDADQDEGGGDRSAAASGGGAAEHSSSSQDSAATGASALPLNVSPSVSMVTKHSNGTLNLWQLTFAFKTKFTQVLSIGHVSRASGHRFRVNDITCHPVLPLLVSTSHHNLPDSEAKSPMSLFEQPLSGGLPSGGGTGAGPSVGSNGDKDVFTPTGFCSELILWRVDSVGPLCHSGGVSELARINSPEISAFSNVAWIPTLLPSTTLGSYSNSPSACFVASDGENLRVYQAVIDARTLLAEISCSENLNTLHKSHSLSSMISNASSTMRAQRSALHDKLKVVSQQSTARPGCILQLDAISDAKHDWQNTQFLHVFQAQLITGGQRTPQADPHDLEEPRLNALLESDMDAIVDLQRNADFEEPFYIVNIEKTLRGSTIHMWRIVISSKQQSSFLSETAMYVPDSNLTQEPDEDGAGGNPNPRRMSQGAETLTGAEHFGPQVEAPHISITTKKVCTQELPLPEGVDVIHASPAAGHLSSSSIYPACFAPYIIVTACSDSISRFWKCEPIGDEDDPNPEGDAYHWSEWKMFSRIQHSAIEIPGQPLNISAAYSGRIACAYKYGKSFTRPNKGPDPDSRYVNLCVAIYECESSGGSEWVLEDTIHLKNVHLPRINIGHGIDLSYLHDSRLLAKKQRLNQVLHTFAHDPESRSPRSGETTPELAVNRQPSAAASGLLTVPSFSTLQSLRKSIAENGNTCPLTQKHLVQLDWVSKEDGSHILTVAVGSKILLYTPVSSDIAQANIKAMKESRSVNRPILRKASSLAQPNFVDEIRWMKLRQIDLQTADGLPPLPMQISWVRDGILVVAMDSEMHVYSQWKPHYSSHFAAAAAAAGEDVPDTRNLRDEDLRSLANESTQLRLKNVASMPLISKVSTANLQLLSHDKKRRLGNTSMANMNGAGGAGGTGTYGGGADDGGNDDYMTDFGLFQASRIACPVLPQYHPKQLMELLNCGKIRWVKAILAHLVRCMSGNSSSTVNQDDDGYARQRSWSRSRTLSISYTADQNIQAEHRGSTTQIPEELMLDYAEINSIPPLPLWVLLNADRETPGQSNNYAEGDKDYDELFDMHNSEDNLDELLSEGDEKKRQERRLSLPEKHSISHFGPRQGQLLSRLLTHTHLPGLSSLDQMHLLALADTVATCNTDFSDKFAADQGKSGGMAGGAGSGAVKDGSTSTDSLDDCGLRFLLAMKHFTYLLRCLPLQQRAQFQRQGVGTSNIVWAFHSESEEELLNLIPSYTKGDLRWATLRDLGVGYWLKNINTLRRCVEKLAKCAYQQKQEPLDAAIYYLAMKKKSLVWGLFRSRRDEKMTAFFGNNFAEDRWRKAALKNAFVLLGKQRFEHAVAFFLLANSLNDAIEVCMNKLEDFQLALIIARLYEGDGEGCYYHHLLHEHILGTDAATGRCDLSRAHPDPFLRSMTYWTIKKYQESLNTLLLNNVGSLHSSYREEDLLRPEQQATNPNVFNFYIYLRTHPLLIRQNIALSAQEKRIAHVVLSGFNYAGDAAPSAVACDKQLQLEDSITPIERQLYFTTAHGHFKSGCPALALEVLNKLPQKISDDSGGSVAGSQAQERAQQNKEELINTGIMDQWGATPAAASNTADAFDWGAPVSSEPEAKFEIKWDDEDEEEDPDLEPDEPELATPQPQAPILGRGKSNGNDTKMDIMAQQLKFVACLKILMEELSTLATGFEVDGGQLRYQLYMWLEREVEALKQLCNYCSQAEQSSHESGDADAEARDKEMNASIYPSTERPTLHEILMQDKQDFEAKVMRAAKRKRWLKANETLLRTLLSYCSLHGASGGGLASVRMELVLLLQELQQEKTQQQLLSPLPFPTTLPLLSACVAGNKTVIADPIKYLQSQTVDMLQSIIKVLPFPGIEPSALSEIFVLRDLAVALSSCIYQSLCDSESFVVNNSAFNGYPSPGMENIAKINSSFECSYLVGSRNAYGRRRKYSTDEPAGVCTTPSKWPGVTNLRALLAREKDEDVPKLNVLLLESFVSTYMALFIYSLSTCDSRLLYRLSGQSFNNETWSTLFGGGMKKLLIKPAAAPPPTQMVTGGAGAGGASGGTGSTSEEPTDENSVWNTVTSITKQRMKLNMKILGSFSQNSTSSNMKEDKPTYREQFMPPETSMLSYFLTKPPTTECDDYDTDDSHESDNEEEEEDDDDVNVSRSQLKAKDNTEHTNPTSYSWSILRLALIKISTHKIQELVKVAGIELQDLPVISPLSHEVLRTLNRWQDFALSDLIARGPPSRNYIPGCYAESGINGLAIHKYRSLLNKDNTPFVSGSSAGPIRRLWNYLVRQEPAQEVFIKSIFVKNMEPSTRGSHHTNNDNETDEGQSHSTNENTDHIRIIHKDHESILSFCLKNNSSSMIAFANPREIQEFDISLLLESPNWYEDECDYDMMNLSKDADTNSSSFLIIQTQEQNQFGSNSNAYSESNASTQSASQSGRGTSMVLRHKVDNVKRMSAHPLMPLYLTGGQDGSVQIWEWGHQQPVCSPRTSGTFAKVTRCRFSEQGNKFGIGDGDGKLSLWQAGIASQNNRSFISYQCHNKALSDFVFLGSCSLLASAGQSSENKNINIWDTLLPHKKSCVSAFTCHDQGSSCLVFAPQHQVLISCGKRGDVCVFDVRQRTLRHRYQVSWPMIAPSSALLWIRTRSSLSLAPLRVTLRIWDMNQFMLINTFPHEHAKNGFFKHTGQGVSQVYVDAFGRLFSCGSDGCMKVRLLVEKDNIVHSVY

SEQ ID NO: 6826 - DNA, 4831 bp, DROSOPHILA
tctatctatctatatatattaacgaatctattatcttatcaattgtcgaacttatggttaaactatttcaatattcttttaaaatgataatacattttttctctctgccggatcggatatcgcgggctctacaattagtactacatgcaactgcaactgcatctccaacgtccatcgcactgcgagagtcggaggatgcatccaaaacgggcaagtggccgtctagcagctcgtacattcgtgtaatgttggccaatgctcccccccaaaattggcgtgcagcggaaaaatgagacaacgtgatccaaaggctctccagcgatctagccgcagattccagctagagctacagctacagctccagctccatgcagcacgcacataattcataaatgttgccacagctggcggggatcggcggtatctgcatctgtatcggtgtctgccggcttgggagattcataggcacgcacttggtcggtccactctgtgcgccccgatctcctccagtctttggtctctgctcgccgcattggccatcaacaccaatcgccaaatggcgttcgtgtgtggcaagtgacacacgaggcgctgcagcacagctggatgcgttctcctcagccactcgcatctggatctctggaccaggtggatgtggtgtgccaacaatgcctacaaatggggaccatccatcagtgctgatggagctggcattcccacatcccggagagctaagatcgggataagccgtaaagacattaaatataatcttcacaatgaaaatggattttttttatggtgtctcctttcagttgttgtacacaggatacacaacggataatgcttaggatttacaagccattataatcaaaccaggtaaatagtttatacatatatatatatgtaaatatgggtaatgggtaatcacaactactacacactaatagatttagttattatctagcgaaatttcctttgaaataataaagctgatcaatttgataatgcatttatgtttattgcttctcgtttagtttagcttagtttcagattagtttagctacgcactagacgacgtcgttcgttcgtttacactttaaaatttaggttaatcactaatagcagaatgggtggtccttagctctacaggtggttagatccactctggccgctgctatgagcggatgctacccaaaagcggcgtgctctcggcagcctttgaggtaatcacggtatggcgggagccgaagccagtatcagccgacggagcagctggtggtcgcggtggccaatggctcgtaccaggacgctcgtcctcggcctcgtcgatgcgagactggcgcgcttggcgcttctgctggttcagctcgtgcaaatagagggcactgaggcacatgtcggccacgcccacattcaagggagtgctgcccacgcgcgggtccacaccacagagtccgtagagcagtgtatccgtcggaccctccaagcggccttcagcccggctgaggcgcaatcggcgcatgctgtccagcgggccgacactggcggacagattctgctgcaacatctggcggaagtcgctggctgcgacggggaatcctccagataccggtcctagacccggacgcaacgactgcgaaatctccagttgctggggcgtcacctgtgcggtcagcacagagttcgcaatggaacaataatccgctcccatggtgccaaatgagatgaggctgttggtcagcgggttctcctgcaccatcgacgtcttggcctggactagttcaccaacggcgtgctctctaacgccgcgcaggaactgcttggcctccttgggcatctgccactcgggattgttcagggtgaagcgaagaagcgacatctccgttttgccgccggccaaactttgctgctgtggctcctgctgcggctgttgagctgtagcccgggtcatctcctccagttcgctggttaactgccagtcgggattgccatgcttgcgaacatccatctgggcaaaggagcatacgttgcccactcctcgcacggatacggtgaacgtcctgaagaaacgcaccagctctatggcctttggcctgaacacaaagatcagcacgaagggtgtgacgaagggactgaagatttcgctgagtaggtagccagccttaaactgaaagaagttgctaaactcctggcgaacctttgtcgtgtgcgcctgctgccgccactcggagggcaggtagtgaacgtgcgccagaatggcggtcattagctgctctgggcaccaaacgagattctcatccggtattagagttctgcagaccacacctatggcgccgagccctgcaaggatggcaagcaaatgctccacctggaagacgtgttcctcgtaaatgcccaatgcaaggattagaagtagtagtcctccactgataaagagtaggtttttggctatcacagcggccagtggcgaggaaaaggagttgagatagcggtccgcgtagtcatatgcccgattcagcctggcatctagttcgtggtccagttcattaaagtggcgcaggtagaggcggccgtaattggaccatgtacgcaggccaagggcaccaggctccttacgaagaatgttcgcataggagaaactgaagtagataagttgccatacgaagatcacaggcgctaggaccaaatttaacaacgccacccccaatatcagtttggagagtcgctgcgccagctccgtttgattgcttcttaccgcaaactcatcacgcagctgccaattgttctggaagggagatccagggccgcgaaacaagatgaagtcaatgttgaacaacatacctctactcagcgagaccacttcgccatacagcggtatgtggaaccttacaggcagcagttgcttgttcatcagtgccactaggtagttcttgaagcgcagaactcggtgatagatgtccaattccgtaagcgactccttgtcgatgcacatatgctgttcggcctggacgcgacgaatccgctgttgcacctcgtgccacgtaaagttgtccagatccgaatcctcgatatgaagcgcagagttgtagaatctctttatatcggcgtactgggtaatatggtacaccattttcagaagccttatgcccaaatagatagcggctatgaacacaaccaggtacgtgacccaagtgaagttggctaagcactcgcctgtggggtacatcacatcggataaagttgtcttgttggggttaagtccccctggaggggtgtccccaaagagcacgtcaaatcggacgcagtgcatcacaaaggcaagtagccagacgacgaaaccaaactccagaacctgtagcatttcgtccactacaatcactgtgaatccgtgcttctgctggtactgatacattcgcgagaagaacgagtcaaggtcctcgatgtggttccaccgcgcacgccccgtctccggaaccatgtggatcatgacgccactgtttcgaggcgtgtcctcgccctcatgctcggtgtcgtgctcatccagcggctgctccagcccgtgttcaccgagggggtctaaatgcgcagcagctgcgttcgcttttgcgtcttgtgttttggatgggccttggcctgtggagggatggtgctccaggaacggactggccgcctcctcggccagggagcggtagttgatatgtgggctagacatcgcccaacgtcaaggtcaaccgttctgactatttatatcgctgtatagtataagttggaaaattctttgttgtttgattctgctgaaccttctcagcaaacagctgactctcctaagagaagtgttggccaacgtcaaaatactgggtaatgaataagtaaggcgaacctcttgcagcgcccaatgtgcagtgttcacactgccagggcatctctaaataacacacattggagaatcaaaggtatcttataaaattaatacttataaataattaaatttgcatttttcttgttatttgtttttatattcgtttttaactttttgaaatactcgatacttttgtttatggtacccgaagtgtgaacagcctagatatccatcaacataaatctgcacagagttggcagttctctcccgcatttgtaaacaaactatttgtagctcttactttattgcaaatttaatttaaaaaaacaaacagccaagatgggtaaaaggcagcatcaaaaggacaaaatgtaagtatttagcacatccagcgagttatggaaatgaagactacccattgctttaacaggtacctcacgtacacggagtggagtgagctgtatggcggcaaaaaagtggaatccttggagaacgaccatgtcaagttcaagcggctgccattcgagcactgctgcattacgatggcgccctacgagatgccctactgcgatctacagggcaatgtgttcgagtacgaggccattcttaagtttctcaagacctttaaggtgaaccccatcaccgggcagaagatggactccaagtcattggtgaagctgaacttccacaggaatgcaaacgatgagtaccactgccccgccttgttcaagcccttcagcaagaactcgcacatcgtggcggtggccacaactggaaatgtatactgctgggaggcaatcgaccagctgaacattaagacaaagaactggaaggatctggtggatgacacgccattccagcgtaaggatatcatcacaatacaagatcctcagaagctggaaaagtacgacatctcgaccttctatcatattaagaagaatctacgagtcctgacggaagaagagcagcaag

SEQ ID NO: 6827 - DNA, 2831 bp, DROSOPHILA
ctcttaggagagtcagctgtttgctgagaaggttcagcagaatcaaacaacaaagaattttccaacttatactatacagcgatataaatagtcagaacggttgaccttgacgttgggcgatgtctagcccacatatcaactaccgctccctggccgaggaggcggccagtccgttcctggagcaccatccctccacaggccaaggcccatccaaaacacaagacgcaaaagcgaacgcagctgctgcgcatttagaccccctcggtgaacacgggctggagcagccgctggatgagcacgacaccgagcatgagggcgaggacacgcctcgaaacagtggcgtcatgatccacatggttccggagacggggcgtgcgcggtggaaccacatcgaggaccttgactcgttcttctcgcgaatgtatcagtaccagcagaagcacggattcacagtgattgtagtggacgaaatgctacaggttctggagtttggtttcgtcgtctggctacttgcctttgtgatgcactgcgtccgatttgacgtgctctttggggacacccctccagggggacttaaccccaacaagacaactttatccgatgtgatgtaccccacaggcgagtgcttagccaacttcacttgggtcacgtacctggttgtgttcatagccgctatctatttgggcataaggcttctgaaaatggtgtaccatattacccagtacgccgatataaagagattctacaactctgcgcttcatatcgaggattcggatctggacaactttacgtggcacgaggtgcaacagcggattcgtcgcgtccaggccgaacagcatatgtgcatcgacaaggagtcgcttacggaattggacatctatcaccgagttctgcgcttcaagaactacctagtggcactgatgaacaagcaactgctgcctgtaaggttccacataccgctgtatggcgaagtggtctcgctgagtagaggtatgttgttcaacattgacttcatcttgtttcgcggccctggatctcccttccagaacaattggcagctgcgtgatgagtttgcggtaagaagcaatcaaacggagctggcgcagcgactctccaaactgatattgggggtggcgttgttaaatttggtcctagcgcctgtgatcttcgtatggcaacttatctacttcagtttctcctatgcgaacattcttcgtaaggagcctggtgcccttggcctgcgtacatggtccaattacggccgcctctacctgcgccactttaatgaactggaccacgaactagatgccaggctgaatcgggcatatgactacgcggaccgctatctcaactccttttcctcgccactggccgctgtgatagccaaaaacctactctttatcagtggaggactactacttctaatccttgcattgggcatttacgaggaacacgtcttccaggtggagcatttgcttgccatccttgcagggctcggcgccataggtgtggtctgcagaactctaataccggatgagaatctcgtttggtgcccagagcagctaatgaccgccattctggcgcacgttcactacctgccctccgagtggcggcagcaggcgcacacgacaaaggttcgccaggagtttagcaacttctttcagtttaaggctggctacctactcagcgaaatcttcagtcccttcgtcacacccttcgtgctgatctttgtgttcaggccaaaggccatagagctggtgcgtttcttcaggacgttcaccgtatccgtgcgaggagtgggcaacgtatgctcctttgcccagatggatgttcgcaagcatggcaatcccgactggcagttaaccagcgaactggaggagatgacccgggctacagctcaacagccgcagcaggagccacagcagcaaagtttggccggcggcaaaacggagatgtcgcttcttcgcttcaccctgaacaatcccgagtggcagatgcccaaggaggccaagcagttcctgcgcggcgttagagagcacgccgttggtgaactagtccaggccaagacgtcgatggtgcaggagaacccgctgaccaacagcctcatctcatttggcaccatgggagcggattattgttccattgcgaactctgtgctgaccgcacaggtgacgccccagcaactggagatttcgcagtcgttgcgtccgggtctaggaccggtatctggaggattccccgtcgcagccagcgacttccgccagatgttgcagcagaatctgtccgccagtgtcggcccgctggacagcatgcgccgattgcgcctcagccgggctgaaggccgcttggagggtccgacggatacactgctctacggactctgtggtgtggacccgcgcgtgggcagcactcccttgaatgtgggcgtggccgacatgtgcctcagtgccctctatttgcacgagctgaaccagcagaagcgccaagcgcgccagtctcgcatcgacgaggccgaggacgagcgtcctggtacgagccattggccaccgcgaccaccagctgctccgtcggctgatactggcttcggctcccgccataccgtgattacctcaaaggctgccgagagcacgccgcttttgggtagcatccgctcatagcagcggccagagtggatctaaccacctgtagagctaaggaccacccattctgctattagtgattaacctaaattttaaagtgtaaacgaacgaacgacgtcgtctagtgcgtagctaaactaatctgaaactaagctaaactaaacgagaagcaataaacataaatgcattatc

SEQ ID NO: 6828 - protein, 845 aa, DROSOPHILA
MSSPHINYRSLAEEAASPFLEHHPSTGQGPSKTQDAKANAAAAHLDPLGEHGLEQPLDEHDTEHEGEDTPRNSGVMIHMVPETGRARWNHIEDLDSFFSRMYQYQQKHGFTVIVVDEMLQVLEFGFVVWLLAFVMHCVRFDVLFGDTPPGGLNPNKTTLSDVMYPTGECLANFTWVTYLVVFIAAIYLGIRLLKMVYHITQYADIKRFYNSALHIEDSDLDNFTWHEVQQRIRRVQAEQHMCIDKESLTELDIYHRVLRFKNYLVALMNKQLLPVRFHIPLYGEVVSLSRGMLFNIDFILFRGPGSPFQNNWQLRDEFAVRSNQTELAQRLSKLILGVALLNLVLAPVIFVWQLIYFSFSYANILRKEPGALGLRTWSNYGRLYLRHFNELDHELDARLNRAYDYADRYLNSFSSPLAAVIAKNLLFISGGLLLLILALGIYEEHVFQVEHLLAILAGLGAIGVVCRTLIPDENLVWCPEQLMTAILAHVHYLPSEWRQQAHTTKVRQEFSNFFQFKAGYLLSEIFSPFVTPFVLIFVFRPKAIELVRFFRTFTVSVRGVGNVCSFAQMDVRKHGNPDWQLTSELEEMTRATAQQPQQEPQQQSLAGGKTEMSLLRFTLNNPEWQMPKEAKQFLRGVREHAVGELVQAKTSMVQENPLTNSLISFGTMGADYCSIANSVLTAQVTPQQLEISQSLRPGLGPVSGGFPVAASDFRQMLQQNLSASVGPLDSMRRLRLSRAEGRLEGPTDTLLYGLCGVDPRVGSTPLNVGVADMCLSALYLHELNQQKRQARQSRIDEAEDERPGTSHWPPRPPAAPSADTGFGSRHTVITSKAAESTPLLGSIRS

SEQ ID NO: 6829 - DNA, 3809 bp, DROSOPHILA
attaaattgcccgtctgatcggagcctcccatttgaaagcagcagttgtggcggcgcagtaggtgcagccagtcgtaggcttggaaaatctggtaggtgaactcggtgaagctcattccgtcctccgactccaggcgggactgcaccgaggatctggagagcattgaccccatgcgaaagtgtcgtcccatgttggccacaaagtcgatgagctgcaggtccgcataccagtcggcattgttgacgattctgcggagattagaaagagattaacacgacctgatgtaggctacacactcacattaggggagccagtggcaatttctgtttcttagagtcccaaaggcagttctcgtgattttcgaacacccggcgaagctgttgctcgatagcctttagattggtctcgatcaccgtctcgcccagttggttgcgctctgtcttgcgtccactgggatcccctatgagtccagttgctcctcctactagggcaataggtctgtggccggctctttggcagtggatcaggcccattattacaagcagattgcccacgtgtagactgtcagcggtgggatcgaatcctgcgtagatgctctgttggcctctggtaaaaagctgtttcatcctgggactgtggagcagcggttttcatagataaaatggaaatcttctctctttgtagatggtccaatacttacgccgctgtatcaggaaatatgccgtggaaaaagcctcgatctgtgagctccaagaggttcttctgcgacatctggcggtggctatgtcggagtacatcctggagcggtttgagcaaactccggcgcagaggcagcattatgcgaagttcgttggaaattttaaattcctagagggactgattttgaggttggagccatcagctgatcggcgcgcggtgaatgacaaaatctgacttgttttggcttgcaaacagctggttgtcgctgcgaatggcaacatcggagtccaaacacaaaggttccatttggagccaacgcagttttccatgacaaggggctattcataatcaaatctagagataatgctgctgaagatacgccacgccctgttggaggtcaccagtccaccggctgcaaaacagtccgcgatcattattaacaacgaactcatcatcagttctggaagcattctgcaaccacatttggccgtagacggggacaaaggagcgcagaacaaggcaattgttgccagattgcagaggggtcaactgctggatgttcagaatgaggagcaggaagaggatgcgcagatccgctcactacattttgtggccaccttcgatccgcagcaacgacggccgaggccaatcgcagcacctgggtcgaggcaaccacacatcctctcccgcttcactgcccatccgctgtacgtgttttgtgcgaacgaagtttgccgcaacctgcaccacatactactcaccgctgactccggcgatgcgggtgaggtgctgcgctccagtttcgtggtgctgggcctgcggaagcccgaaaaggagaagtccttcaagcgcttcctcgcgcacatcgctaactacttgcgatacctgcagcccatgcacactttggacgacgtgctggtcatgtgctcgccctttggcctggagaacttttacaagaccatcagcattggaaaggtgtctaatgttatgggacgaagtggctgcttgtttgccatttcaaacgctttgcccctgggctgtgaaggctctgcagtgttcaacaacaagctgtaggtgatgaatacgttacaaaaccgtaatataccaaaaatttccgtttatcaggcggctcgttggcattgtgatatgcacctcatttcaacgccatcacgaaaacgtcaacctcactctggccgcaaactttggctaccttttgcgcaactttatggaacaactgggcatgtctactacagcattccagctgagtcgagagccgtcgagctttgcctgtaagttaagactaattccacgttgttcttatagtaactacacaccgttctaggggagcgcaccattgtggtcatagagtcggcgggtcaacaaggtaccgggaccttcataagagtacacaacaagcgctttatcctcacttgtgcacatgtggtgggacaggtatgcaagcatgggctgcccgaaaccttggcgcactaaataatgtctttcacgcagaacattgagactgttaattgccgtgctgccgatcgcgagttccagtctgaggtgatttggtgcaatccggacagcgataagcccttcgacttggctctactcacagctccgcaggatgtgccggagcaatgctgcgtgcgactggccaggagtccggccaccgtcgggcaaatggtgtacaacgccgggtttccctactacgttaacttcagcttcaggcacgacttcaacccttcgatttttcaagggagggtcatcaagtgcgacaccggggccattatgtccgatggcagcgtgcaggcgggccaaagtggaggaccgatgttcgaccagaatggatgcatcctaggcgtttgtgtgtccaacattaaattagacgacgtcgtctacccaaacataaatacagccattccaatttgtgatatccgcaacacgttgcagcagtttgcacgcaccaacggtgagcagaatgtcgaatcgatggtttctagcttatcttaattctttgcagacttaaatgtgcttagcaacctggtagccagtccagatgtacaccgcgtgtggtctctggaaatgccccccattcgcagcaaactctgaggagactcgtgcattgttcattgttaacgaaactgtaattagtgtttttatataatatggccggttagccaggcttttaagattaaacaagatattgtaaaaaaagaaaatatatatatatatataaatttattaatatggtaagaaattgtgcttagtttttatccaaacaatcgttaacgtgactctgaagcacgcttaaggcgttaaaggactttgaacagatcggacatcgcaaagtggtgtctgaagtccgggatgaggcgcctgttgggtcgagaatctaccgatacaaaaattagtattgacatttatggactttggaatcagcgtactcttactggtctctgctcctctcgcaaattgcttctgcttgaactcagcggagaagcggtcgagcacgccttgcttgccttgtgggactcggccagagcttcgataagctcctggttcctcctctgcaatgatcgcaagtccataagatactgatctttctctccggcattcttctcgcgatctgcccgctccatttcaaagtccctgcggtagatatcgttttggatctgtagacctttgatcacctcctgcttctggatgtccctggccttcagctcgttaatatccagctgcattttctttatcagctcctgggattttgattcggttgcatactctggtacgaactcaaacgagtgctgaaataacagaagaaaaagggtgcgagcccggaagagaatattttaaagagatactgtccagtttacaatgcagaatagcaatgattgcgagtctgtatgcaagtatttgccctatcgcttggagcaactggtagacatacatttagctgtttcagtttgtcaatctccacgcgcatgttgtcgatcagggactgtttctcagatacgctcttacgaagctcatcctgctcctttagcctgatggtatgaaccccttcaatctgctcgattttcgtctctaggtccctcttcagctcttggtt

SEQ ID NO: 6830 - DNA, 1498 bp, DROSOPHILA
ttccatttggagccaacgcagttttccatgacaaggggctattcataatcaaatctagagataatgctgctgaagatacgccacgccctgttggaggtcaccagtccaccggctgcaaaacagtccgcgatcattattaacaacgaactcatcatcagttctggaagcattctgcaaccacatttggccgtagacggggacaaaggagcgcagaacaaggcaattgttgccagattgcagaggggtcaactgctggatgttcagaatgaggagcaggaagaggatgcgcagatccgctcactacattttgtggccaccttcgatccgcagcaacgacggccgaggccaatcgcagcacctgggtcgaggcaaccacacatcctctcccgcttcactgcccatccgctgtacgtgttttgtgcgaacgaagtttgccgcaacctgcaccacatactactcaccgctgactccggcgatgcgggtgaggtgctgcgctccagtttcgtggtgctgggcctgcggaagcccgaaaaggagaagtccttcaagcgcttcctcgcgcacatcgctaactacttgcgatacctgcagcccatgcacactttggacgacgtgctggtcatgtgctcgccctttggcctggagaacttttacaagaccatcagcattggaaaggcggctcgttggcattgtgatatgcacctcatttcaacgccatcacgaaaacgtcaacctcactctggccgcaaactttggctaccttttgcgcaactttatggaacaactgggcatgtctactacagcattccagctgagtcgagagccgtcgagctttgcctgggagcgcaccattgtggtcatagagtcggcgggtcaacaaggtaccgggaccttcataagagtacacaacaagcgctttatcctcacttgtgcacatgtggtgggacagaacattgagactgttaattgccgtgctgccgatcgcgagttccagtctgaggtgatttggtgcaatccggacagcgataagcccttcgacttggctctactcacagctccgcaggatgtgccggagcaatgctgcgtgcgactggccaggagtccggccaccgtcgggcaaatggtgtacaacgccgggtttccctactacgttaacttcagcttcaggcacgacttcaacccttcgatttttcaagggagggtcatcaagtgcgacaccggggccattatgtccgatggcagcgtgcaggcgggccaaagtggaggaccgatgttcgaccagaatggatgcatcctaggcgtttgtgtgtccaacattaaattagacgacgtcgtctacccaaacataaatacagccattccaatttgtgatatccgcaacacgttgcagcagtttgcacgcaccaacgacttaaatgtgcttagcaacctggtagccagtccagatgtacaccgcgtgtggtctctggaaatgccccccattcgcagcaaactctga

SEQ ID NO: 6831 - protein, 297 aa, DROSOPHILA
MLLKIRHALLEVTSPPAAKQSAIIINNELIISSGSILQPHLAVDGDKGAQNKAIVARLQRGQLLDVQNEEQEEDAQIRSLHFVATFDPQQRRPRPIAAPGSRQPHILSRFTAHPLYVFCANEVCRNLHHILLTADSGDAGEVLRSSFVVLGLRKPEKEKSFKRFLAHIANYLRYLQPMHTLDDVLVMCSPFGLENFYKTISIGKAARWHCDMHLISTPSRKRQPHSGRKLWLPFAQLYGTTGHVYYSIPAESRAVELCLGAHHCGHRVGGSTRYRDLHKSTQQALYPHLCTCGGTEH

SEQ ID NO: 6832 - DNA, 4122 bp, DROSOPHILA
tgcaaaattacgaagttcattatttacatataattttcgaccagaaaaattttttaatatgcactatacgtttatttatttatttactccaatggggtttataagttatgcaaaattaaagagttgccgaggagcaagatttatttacaaaggcaaagctgtacagtgtcttgtttagtgtataaataataatagatttactatttctcagaagtccaatgctttgttacaccactggtggttggccgttgaccaaaaatacggtggtggtggtggaagtggtggttgtggccacgttcgcctcgtaaaccggcggtggttcgttaattccaaccgccaaattgggattgctcgcttccaagctggtggctatggtcagtgtgctgtcctgctttcgctcgctaaaagcggcctcgtcgtagctgggcggcaaatccaaggtcttgggcaggacactaacttcgttctggctgtttgagcacacgtttccgactcctccggagccgccgttgcaattgttcgtcacattgatctccatttggcgacgggctgcgaaaaaagagatttaaatcgtagtggacaaggaaacctcagagaatctctttaaaaacggaagttagcaactatatcttttaaatatacgtctaaatcgctgcgttctgttaaccgatacctgctaatattggtattcctttatatatagcgtaacatgttctgttaaccgttaaatgttacccgcttttaaagcagaaaaagcaaccagccttccacaggggggtcgggtctcactaatgactttcaacatactgttcgagtcgttctttattttaaacgacatttataataacgtttttcatgctgattaaaaagccgttatattatggtaagagcactcaacccccttatgccaaaacaactacgcccttgagctctgctattgggtcagctgctctgacgccaggccaacagctgattgcgccaactaaggccaccacagaagtggaagcgcatcaatttaatcacagactttggaatttcaacacctacgcgccgttgaactccggcgctatctgtagtgcaccatatcgagtaagtgaaactattggcagtcattccgagcgagccgcgactcaccttcagtcagttgtgtttacataatggcgcagacgaaattactgaggtgaaagtttagctacatgtgagcgctggaaaatgtaaatgggaaaaatgtaaatgaaaatgctggcggagatgcaacaggttaagtgggctgtattcgccaaaaatcagttagcggagggcaaagttcaaagtgcctcagtgccttggttccgcgtaaaactacgcgcttaatttaggtgaaagcccaaaggttaatcggcattgacacctgttgtttttgcacaccggactaaacgctcttcattttgcagccggaggaatgctgttgcgtcgcgttctgggctacggagtagtcggcgccggactggcctccgccggctggagcctgcacaccaacgactacgatcccaactcactcggaatcgtccggctgtcgcgatccgccgccgccgtcgtggacgtggcactcacctacaagcgggaactttactacaaggaatgggataaggagacgcccgagtacaaggcggaaaagagccgggtccacaagatagccgccgagaagctacttcagctgatctgcataaacaagggtgtctacatcaaggtgggccagcacataggggccttggagtacctgctacccaaggagtttgtgcagaccatgaaggtacttcactccgatgcgccgcaaaaccccattgaggacctgtataaggtaatccgacaggatctgcactgcaatccggaagaaatcttcgacagcttcgagagggagccgctgggaactgcttcccttgcccaggtacataaggcgcgcctcaagaccggcgagctggtggccgtgaaggtgcaacatccctacgttaagggtaactcccgcgttgacatgaagaccatggaactggccgttaatgtgctggctcggatatttcccgacttcaagatccactggctggttgaggagtctaaaaagaacttgccaatcgaactcgatttcctaaacgagggacgtaacgccgagaaagtagccaagcagttcaagaagtactcgtggcttcgggtgcccaagatatactggaaatatagctcttctcgagtcctagtcatggagtacctggagggtgggcatgtcacggacttggactacatacggcgaaacaaaattgactcatttgcggtggccaatcgcattgggcagctctactccgagatgatcttccgcaccggtttcgtgcacagcgatccgcatccaggaaacatcttggtaagacgcacgccggaaaacagtctggagatagttctgctggatcacgggctgtatgcaaatctgacggacaagtttcggtacgattattccaatctctggctgagtatccttaaggtggaccgcaaagcgatgcgacaacacagtgagcagctgggaattaaggtattttcgcttgggaggtggatttgaacctaaaccttctaaccttctaaaccttcaatccagggcgatctgtacggtcttttcgcatgcatggtgacgggacgaccttgggagacggtgatgcagggcctgaccaaagtcaaatattccaaagaagaggtaagttcgtgccggaaattcttctcttcaattactcgtagtatatgctttgattctgcagaagaacacgctgcaaaacaacacgtccctggtgctgccgcacatttccgacgtattggagcaggtggaccgtcagatgctgctcattctgaagacaaatgacttgatccgcggaattgagtccacgctgcgcacgcagaaccggatgaccgccttctgggttatgtccaagtgctgtgttcaatcttcgtacgctgaacagcgagccaagcagtctgattccggatcctcgcgaatcctgtggctgcgggtgcgcgagcgatgggagcttttcaagctcaactgctactacctctacctgggactgattaattttggtttccttgaagctctcaagcaggttatttagactaaacggtgtcccccaattaaaagtacaaaactcttcacgaggaaagggaaattacctcgttgtctctgctgggccagattccgcacattggtctctcgcttgcgtttggcgctcttcggggagagagtgaatcattagcaggagcaggtagtgtcccattccgaatgggcttaccataatcatggccagaggaaaggcgatgacgaagaggaagaccagcacaatgtaaatgacatagctgggataaaataacatgtatggaccatcgtagccgccaccgttgatccaaattgtgacggaagtggtgttaacgtattcccaatccgatgtcgtactttcagtggtgttaagtgttccgttggccaccgtggtggagtcaaaaggggtgctgaccgtcgcgtttatggcaggggccatgttgaactcgggtgttaattcctgattggaactgaaaaatgtctcgaagacagcagttctctgacgaacagacagagccgactaacctgaactactggccaccgaattgataggacatccgggcatgggtcagactcggggctgacagcgaagaacgcacatatttgctttgtaatcattagctgataaggcgacaaaaccagtgtcgagccagggctttgttttttgttcgcattcgcaatttatctaatgaggcgatatgataaatgtgcgcaaatagatatatgttcgaacgcacgcatacgtatatatatatatatatatgtatattaatgtcgcccttgatttatggcggccgggaactcttgctctccctcatctcgagaacgagttcagtggcccaaccacgacaaatatttatgtttgccctcctcaaatgcctgaagaactcaccttgttcctgcttcgggcgcaacgacatcgagtacgagcgacaggcaatcagaagcacctggaagacgacactgggcagtgcgggataaacagacggctctgaggagaatactcactcgcaggagaa

SEQ ID NO: 6833 - DNA, 1603 bp, DROSOPHILA
tggaagcgcatcaatttaatcacagactttggaatttcaacacctacgcgccgttgaactccggcgctatctgtagtgcaccatatcgaccggaggaatgctgttgcgtcgcgttctgggctacggagtagtcggcgccggactggcctccgccggctggagcctgcacaccaacgactacgatcccaactcactcggaatcgtccggctgtcgcgatccgccgccgccgtcgtggacgtggcactcacctacaagcgggaactttactacaaggaatgggataaggagacgcccgagtacaaggcggaaaagagccgggtccacaagatagccgccgagaagctacttcagctgatctgcataaacaagggtgtctacatcaaggtgggccagcacataggggccttggagtacctgctacccaaggagtttgtgcagaccatgaaggtacttcactccgatgcgccgcaaaaccccattgaggacctgtataaggtaatccgacaggatctgcactgcaatccggaagaaatcttcgacagcttcgagagggagccgctgggaactgcttcccttgcccaggtacataaggcgcgcctcaagaccggcgagctggtggccaccatggaactggccgttaatgtgctggctcggatatttcccgacttcaagatccactggctggttgaggagtctaaaaagaacttgccaatcgaactcgatttcctaaacgagggacgtaacgccgagaaagtagccaagcagttcaagaagtactcgtggcttcgggtgcccaagatatactggaaatatagctcttctcgagtcctagtcatggagtacctggagggtgggcatgtcacggacttggactacatacggcgaaacaaaattgactcatttgcggtggccaatcgcattgggcagctctactccgagatgatcttccgcaccggtttcgtgcacagcgatccgcatccaggaaacatcttggtaagacgcacgccggaaaacagtctggagatagttctgctggatcacgggctgtatgcaaatctgacggacaagtttcggtacgattattccaatctctggctgagtatccttaaggtggaccgcaaagcgatgcgacaacacagtgagcagctgggaattaagggcgatctgtacggtcttttcgcatgcatggtgacgggacgaccttgggagacggtgatgcagggcctgaccaaagtcaaatattccaaagaagagaagaacacgctgcaaaacaacacgtccctggtgctgccgcacatttccgacgtattggagcaggtggaccgtcagatgctgctcattctgaagacaaatgacttgatccgcggaattgagtccacgctgcgcacgcagaaccggatgaccgccttctgggttatgtccaagtgctgtgttcaatcttcgtacgctgaacagcgagccaagcagtctgattccggatcctcgcgaatcctgtggctgcgggtgcgcgagcgatgggagcttttcaagctcaactgctactacctctacctgggactgattaattttggtttccttgaagctctcaagcaggttatttag

SEQ ID NO: 6834 - protein, 501 aa, DROSOPHILA
MLLRRVLGYGVVGAGLASAGWSLHTNDYDPNSLGIVRLSRSAAAVVDVALTYKRELYYKEWDKETPEYKAEKSRVHKIAAEKLLQLICINKGVYIKVGQHIGALEYLLPKEFVQTMKVLHSDAPQNPIEDLYKVIRQDLHCNPEEIFDSFEREPLGTASLAQVHKARLKTGELVATMELAVNVLARIFPDFKIHWLVEESKKNLPIELDFLNEGRNAEKVAKQFKKYSWLRVPKIYWKYSSSRVLVMEYLEGGHVTDLDYIRRNKIDSFAVANRIGQLYSEMIFRTGFVHSDPHPGNILVRRTPENSLEIVLLDHGLYANLTDKFRYDYSNLWLSILKVDRKAMRQHSEQLGIKGDLYGLFACMVTGRPWETVMQGLTKVKYSKEEKNTLQNNTSLVLPHISDVLEQVDRQMLLILKTNDLIRGIESTLRTQNRMTAFWVMSKCCVQSSYAEQRAKQSDSGSSRILWLRVRERWELFKLNCYYLYLGLINFGFLEALKQVI

SEQ ID NO: 6835 - DNA, 3164 bp, DROSOPHILA
cattcatccgcctctggagagaatagatgttgatagtagtcgtagtccagggaccgctctgcggccagaagattgagcagcgtgctttttccggaactctgaccacccaggaccccgattacggtgaagtccgtattggttttgtggaagagcttgcgggcattggcattaaaaataccattggccacgattaggggtgtgggacggttcatgcgtggcggctgcagctcctggagagcattcggtgctccggccgaggtgccagctgttccggcaccaccactgcagctccccttgtccctgctagttggtaccgagctaaccaatgcggcgcaaacggagctggatggcacggcggacaattgcccgcttccctggacaagagcacctccggccaaaggcatctggcatctgtctgcaggccgcacctcacccgtacgattgacgatcatcgttttgagggccggcggtgtatcggggtaacaactgggacttggctccgcctccctgtccctctccagcttcctatccttgtcccgctctctgtcccaggtctcttgctcccgatcgcgatccttctttagcagaatttttggctgcatcatgcgggcggcgtcctcgcgccgggcgatggtcacgggtgccaggaggccggagcaggcttcatcccgctttttgttacggaaacgacgacggggatcagccattcggaagccggttatttggggtttatatttgactaaatttaaatcggtttgaacacgttcgtgggtgtcaacgctaatacattgtttcgcagcactggtatgtacataaccatcgcagatgtcgtggaaatatagctaaaaagcgaaaaatacgaaattaaggacaacatttttaatttcagacgcaacaatcggctggcccaacaaataacggtacacaagattatccacttttttttatcacaattgcactggacttatagccaaatatttttaatcatgagaagtgaaaggcaagcacatatctaaatctagctcgaaaccagatggatgctcatcttgcacactgtcaccagtgttggtaaccgagtgcattgtgagcggaacgttccgacacctactttgtttatttattgttattaattaggaagcatgcccctcgtggtgattacgggcctgccagccagcggaaagagcacacgtgcccgccagctacgggatcatttcgtggagcgcggcaggaaggtgcatctaatcagcgaaaacgaggcagtgcccaaggcgggttttggaaagaattcccatacaggtgattcgcagaaggagaaggtggtacgtagcgatcttaagtcggaagcctcgcgtcaccttaaccaggaggatctggtcatcttggacgccgggaactacatcaaaggtgagctctcaccaaggttcagctaaggttcgtaaaccacaaccaaaatttcttccaggctaccgctacgaattgtactgcatgtccaaggtgtcaaggaccacccagtgcactgtgtttacctgcataccccaggaggaggcgtggacctttaatagccaaagaacggcgccggatgaactgcctggcgacagtgaaagagttcagccggtggacaactcggatgttccctacaccagagagacttttgatgctctgtgccagcgctacgaggagccgcagagcaacaaccgttgggacagtccgctggtggtagtcttgcccaaggacacgctcgacatggaggccatctacaaggccttgtacgagtcccagccactgccacccaaccagagtacttataatgtaagcgtagagcttggccagagttgaagacaaaatatcacaagtaactgctttgtccattccgcaggcaccgctgggaacaaccaactacctgttcgaactggacaaaatcgtgcaggcgatcatcaaggagatcctcggcgccgtcaagatcaaggccttcggccagctgcgcatcccagggagcagaaatcccgtgaaggtcgccacttcgatgaatgccctccagctgaaccgcctgcgccagaagttcatcacgagcacgtgccacgccagccagacgtcacccactccgctggagcaggtgccgcacttgttcgtgcagttcatcaatgccaacacgatcggctgctagcactgtgattgcgacaagacaaatgctaaaataaagttcttacctcgggcagcaggataatgtttttgggctgatgttgacacaatttaatgtggaaatcaaataaaatatgtagcttaaatactaatatgaaaatcgtttttgattattattatcactatggattaattaagttgactcttctgggttcttgtggcgtacttaattgcagtgcattttctgcttatttattatttcgtaaggaaaacaatacatttttgtttgttcaaagtgagttcaaaactacatgaaatcaataaaaaaaaatttacgtatttccatttgaatttaaaaaatattttccttcgcctataaaatctactctacttacagcgaaaaaagttcagtgaacgaacttttctcttgcgcagcgggaacgaagagaaccctctcttgagcgcgctcttcgggcgctctcttccaacgcagcgctgcagcacgagattggggcaagtggagtggtggtgccagtcggtggtggattgttcagtgtatcccacgagctagtcgcgcgcggaaagcaaacgcttcgaaaatcaaacgatatttccgttgtgggttcccaagaaataaaataataacacaaaacgaaataactatttttttacgttttttttgttgcctctccaggattttgttgaccatcgtagattggatatgtgaaacaaattttaagggcctccactttctctatctcgccctagcagcaaggtgcactgtgtgtgtgtgcgacaattttacaagtgcaacatgaataaatgcaaagaaaattttttttttaattgttgacaacaagaatttgcaagcatcttcaaagatccaacagaaaattggcttgtttttgttttgtgtgtgtgtgtacgtgtgcgtgcgtgcgtgtgtgtgtgcggcgcaaatataaaaaaaatgcataacgacaccttggcactgacgctatttttttaattctattttttatgtg

SEQ ID NO: 6836 - DNA, 1039 bp, DROSOPHILA
gcaagcacatatctaaatctagctcgaaaccagatggatgctcatcttgcacactgtcaccagtgttggtaaccgagtgcattgtgagcggaacgttccgacacctactttgtttatttattgttattaattaggaagcatgcccctcgtggtgattacgggcctgccagccagcggaaagagcacacgtgcccgccagctacgggatcatttcgtggagcgcggcaggaaggtgcatctaatcagcgaaaacgaggcagtgcccaaggcgggttttggaaagaattcccatacaggtgattcgcagaaggagaaggtggtacgtagcgatcttaagtcggaagcctcgcgtcaccttaaccaggaggatctggtcatcttggacgccgggaactacatcaaaggctaccgctacgaattgtactgcatgtccaaggtgtcaaggaccacccagtgcactgtgtttacctgcataccccaggaggaggcgtggacctttaatagccaaagaacggcgccggatgaactgcctggcgacagtgaaagagttcagccggtggacaactcggatgttccctacaccagagagacttttgatgctctgtgccagcgctacgaggagccgcagagcaacaaccgttgggacagtccgctggtggtagtcttgcccaaggacacgctcgacatggaggccatctacaaggccttgtacgagtcccagccactgccacccaaccagagtacttataatgcaccgctgggaacaaccaactacctgttcgaactggacaaaatcgtgcaggcgatcatcaaggagatcctcggcgccgtcaagatcaaggccttcggccagctgcgcatcccagggagcagaaatcccgtgaaggtcgccacttcgatgaatgccctccagctgaaccgcctgcgccagaagttcatcacgagcacgtgccacgccagccagacgtcacccactccgctggagcaggtgccgcacttgttcgtgcagttcatcaatgccaacacgatcggctgctag

SEQ ID NO: 6837 - protein, 299 aa, DROSOPHILA
MPLVVITGLPASGKSTRARQLRDHFVERGRKVHLISENEAVPKAGFGKNSHTGDSQKEKVVRSDLKSEASRHLNQEDLVILDAGNYIKGYRYELYCMSKVSRTTQCTVFTCIPQEEAWTFNSQRTAPDELPGDSERVQPVDNSDVPYTRETFDALCQRYEEPQSNNRWDSPLVVVLPKDTLDMEAIYKALYESQPLPPNQSTYNAPLGTTNYLFELDKIVQAIIKEILGAVKIKAFGQLRIPGSRNPVKVATSMNALQLNRLRQKFITSTCHASQTSPTPLEQVPHLFVQFINANTIGC

SEQ ID NO: 6838 - DNA, 7902 bp, DROSOPHILA
gtgtgtttgtgtgtggcgggattgcggttgttgtctgtggtgtgatgcggtttgttgttgtttgtattgagacaagtgtgaattgttttcctttctcctgttgttgttgctgctgtttttattgttgttggtgtgggtgttgcttgtgcgtgccgagaaacaacaagagcaacaaaagccaaatgtttggctgttgatgccatgattttttgattccttttgcaagggcttgcgtcgtgtgcgttaatgtgtgtgtgcccgtgtgtgtaagtgggggaaattttcacactttcactctttggtgcgtgtgctgccccattcgactggttttattttttaaagggttaagggttacagctttcgacaccctctgctttgctttgttttgcccatgcccggcgtttctccacctttccattaggcaactaatttagggttttttaattaaggtaaacccgttctaaatgcgctctaaattccggaaaaatgaccccacaccaaactaatttaatgtggtgtgtgctcccaaaaggcgacaaaacgttgcacaaaagctaaatatttgatgtgtgcgttagaattatacaagcatatgtacatatgtgcgcctgcatatacatatattatatatacaaacatacaaacatatatacgcgtcgaaagccctgtatatagacatcacatgcggcaagtacagttatatcggcatgtgcccgcatacatacatatgtataatttaaaattataatcaatgccccatatgtgcgcctgctttcatacgcgagtgtgagtgtgtgcgcgcgtaaattgtgcgaagccgagacattgtacctgcccgagagccacccactttccgccaaaccacccacccacagccccgatccaccgcacccgtttcacatcctcatccactaagctgtcctttacacacacacacactcggccgcaaagttgggcaaaaccgagtgcacttgtgtgggtgagctgactgcatgcgcacttagtagccttcaacgacgccgctgggcgacacacacatccacagcctcacctacagtcaagcttcctaggctataaacatcctaagttactatacattccattacatcaagccttctattaattgacaaagcaaaatgaagttaatatatgtatatttgaaaatggtagttctggttacgatcattttacattatctaatttgtaaaaataaaaccaaattgaacaggttgattaaaaaataagaaagtgacataaataagctcttaaaacctttcaaatagtggtttgataggaattttcaattgccgaattaatattgaactgactgcaattatagcttttcctcaaactaaatttatttatttctaatttgtgttactattcttaagcaagttctactgtactaatggtcgctccgatagagacatgtataaaatgtgttgataaaatacagacgcactcacacacatgcaagacgaaatcgagagagtcggaaaaggacatgcccaagcagctagcggacagtccgatgtcccccaatttctccattcccccgcacccctctaagtaacttgatgattgtatgtgtgaaagcaaggagtggaagccaaagaattcaagggagcagcagaagaagaagacgaaggacgatcaggagaaggagaataagaaggtgggagacaacacacaattactcaatagcaagcttttgggggttgcccacacccacacacaaagccacacacatacagaactacacacactttggtagttcagccttcaagtaagttttgaattgaggaaatgaaggcgagaggcagagcgaggtgagagaaagtgggagccaggagagagcagccaccgcagaaatgagagagcgcaacaattttgagttagggagccaagtaggtaaagtaaaagagagagcgtcttagaactaaaatgttgtaatagagggggcttttttgggcttcccttccgtttcgcctacatcgtaatttctccgccccccatccagttgttgttgttcttgcttttgttgtattatgccatcaatgccattttgtacatagtttcggaaaatgtgtgtgtgcgtgagcttaagagcaagagggcggggggatgcgacgggtggccaacaaatctagatgtgactctgtctgtgtgtttgtgataaagcggagcgtaatgagcgtggtgagtgtttggggttgactgccatagtgttgaaaagggcgccaaacgtgtctgcgtgtgtgtgtttgctcgggtggctttccggggggttgtggtggtggtagtggaaagtggggatttagcccccccgcatgtataggtgtttagaactcacacatacgcacatacatacattgagcacacatgattacagttgtatgctgaatttgtggttggctgcagtcgacgtcgactgcggcgccggcatcactgctcctgttattacaatttataatgacatttgtgtgagtggggggcaaacggaatcccgaatgtgtgtgtgagtgcgggtggaattacggcagtgtgtgtgatataggatatagatagggtgcatgtttatattatgaatatcccaattgttatgtactatatttatatagggtgcgggtgcaccgaaaaatgtattacattttagtttagccaaagtaatacacattactagctttctaatcgatacattatagaaatgacgatcaagaactctgaaatggtccctctttatacattttctgtcaaatttacttttgcgggctacattacaaagcttatacaaaattgtatcagttagataagaccagtgatagattgacctttaattcaggctttcaattgagtaacttatcagtagttcttcttatcaaatcattatgtattgaccccagtctatgaacatttcctacatggatttcagtcttttgggaattaataaacctaaaatagaaagcttttgaattaaataaaacgcattttagtgtaaaacatattacatacttgcaaggaaattgtacttctagatgtaaagcatataatccccacagccaaccccaattagaccccattaagtcctgttcccgaccatcattacaaataaatacctaattcatacatatgtgcgaattgcatatggaaatgggcagcgcgcggagagcgtggaaatattcgcacacacagggacaagagaaatttgactcgctaacaccccgacaacatctggaaacccaaccccttcgatttcgggaagcgtaactcacctcgcagaacttgatgaagttctccaccacaatcgatttgtccgtcagcgtcatctggccggtgaaccgaactcccagctgctttagcgtatccttcttcttcgatggcagcttgttcatgtgctggaagatgccctcttccactttgtgcgacggatgcacttcgaagttctccttgatcacaaagcttccgaggagtttcggtgcatgcgaagacgacgaagccgtggaggaggagcaactggcgccggttaacaatcctccgaattctcccgcacttccgcaggctgctccttcggatgaggtgttcgaattggaggcatttaggtgcgaattgggaaatgctagcatttccagcgaagattcattcgaattggacgatccgtttgatgcaatgtgctgtagatcaaagatcgtctgctttgaatcgtgatcgaagacatccagagcggaggagctggtgtccaccagactattggaagcccgcgaaacggaagacaacaaagctgccactttgcgggaggcagatcgtgatttctgcgaggtgctagtatccaaatcgatcagaccaccggccaccggcgattgagcaggcggtggtggtgtggcgcctgcttggacgcccgatttactgacactgacctgcttttccgcacacgagctagtttcggtggcgctgctcggtgtgctgggcgtaaagtccgtggagtgtcgcagatatttgataaactcaaaggatccatcgaagtgctggggcactgagcccgctgtcgaggcggtggattgatggccattgggcgtggccactgcagttggccagcgattgctcgagggggtggcggtgagggaagttgatcctgctgctcctgcgattcctggagtggacgtcggtgctgctgatgcgctggcttcgacgctggcagaggcagaggcagcggcggaagcatagtgtgcgggattaacagaactacctgagttaacggaggaggagttttcccgctgcggcgttgtagttgcctcgtaattgggaaaatccgctgctgctgtcgctgaactgccattgggtaaatgtgtgtgggaatactgctgatgttgttgttgctgctgttgttgcgtcgccgcgcctgcgccgcagccaaacacttgaaattcctcgaaattagtgcatttgagctcgccattgctcaagtacttggaaaactctgaaggatcgttgagcgagttgaggaagaaggagctaaagttgctcgatatgcaggacattttgttcaattgttatatgtttgctttttttttttgatattctcttttttgtaatactgtacgttataatttatttaaagcttaaaatggcacatgcgatatttcgaaattttctctcgtttttctcgttttgctgctgcttctgcggttcatattttattacaattttccacacactctcaacgaggaaaaacacatgtgtgtgtgggcctctcccgcttgtgtgtatatatgtataaatttttcttattatagcaaagtgtaatttattattcttattgctcgttcgcgcattgcctttcgctccttgaaaaaaggccttttccaccgtatgtggtcgctgctagttgtttttgttgcttctgctgctgttgttgttgccgctcacacacttaccactacacataacacaaagagcctggaaataggcgctttttgaaactggtctggtcggtctcttttggggcctgtctttttgcctattttattattattattattacttggcctttttgcactattttcacttccttttcgaccgtacgttcgcgcccacttacacacagacaggcggtaggctcacagacacacgcacacaacaccacacaggcacatacagcgaggcgcggtcggcagcggcgttgctttttccgtcttcctctgctttatattttcgtttttctcgcttgcctttgctttactttcaaaacaaatgccgctagtgcttctgcttccatacggaaaaacggaaaatcttatcgttgttgctgttgttgtcacagtcgtcgcagagtgttttcaccgccgtgagaaaacacaacatcgccgcagcgcacacgaaagaaaaatgagcgaaaaacatgcaagcgctgcgacggaaatttgtgctctgccggcgtcgccgcttttgctctctttcactctctctgttactgtgtttatggcaagtccttttctagtttatgtatttttaaatccttgaactatattgcataaccaaaattatttcggtttatctatataataatgttttgcatttatggatcagaaaattaacgcagctccagtgcatgaaacgaaacaatcatatttttcaaaaaaaattcaatattttttgttcttttcatttcaataacatcttcatgtagcataaatgggtttgggctgaattctgtaatcatgatattctccgcataaacacagtttctctctcgcgctctcgcattctctcgctttcctcgtcgtgtgagagagtaatcagttgtaggtgtttgtagttgttgctgcgctaggaaacgtgtatttcttcctgcgccatgctaaccctttccatataaacctgatttaatctttgattattgtgctctcgctgggggattattgctgccgttcgttgttgctggctttgctatttttgaaaattccactaaattatccgttgtgccgtccgctcgctctccgccgttcttgtagttgttgctattgtgcgtttttgggcaggtaaaacagttcatttgcctagggttgccacatcgttgggcgttccgcaggaccacctggaatgcacataaatgttaagttttattgccctttttacagttcctccacatttacgactgccattgagtcgtaaaacacgtgaacaggtagcgatctattcaaggccacagctgtttaggaggttggcaaccctggcgggcaggagatttcaaaacttccagtggatatgttctaactcaaggaatttttatagccgatttgtttgaataaatgtacaatgtacataatgtctgcggcagacgctgttaattataaatacaactgcggccgcaaggaagtcatcaatttaaaaagctgtctctgcattattgttattctaattacctcttttgctgttgatgcttttggcacaatttcgttttcaaattcaaacaaatttattataaaagtgtttcttcgaggggagcttatgaagaacagaactaatttaatgggctttcacacgcggttagccaatttacatgtcggtggtacatgccagcgcacacatatacgggcatatacgtatgcgagtaatttttcaattaattttaattataaacttaattaggaaatcaatgaacgacgcgaacggaacacacacgcacatactttaccgccgtgcgacggagacagcgaacatccgattgcacacacaactaaaacaatgacaacaatttccatcaagtgcgctgcgcatacaacataaaaccattcactcagcgccagtggagctccaaatagcgaacaagcccccaaaagcgaattgaagcgcttgttgaaaagcgaacaagtcgaaaagtcgaaatcaactgagcagcagttggggaaatacaacgcaaacaaggagaataggggcgccaacctgaaagggttgccagatcgttgacaccgtaaacttccttcctttttggtggttagatgtctcctacgccctcttttttttctgacatttttcttaattttctataacacaatcagagaggatctaaaatggtggtcttaatttaagaattttttttatattagacatatattttgaacttaattaacgcggcagcacacgtggctataaataaataaaagcagctaaatcgccatcactaatagttatcgttatcgggaaccgcttcaaacgtgtggttggttgttatttattccaataataaatactcattcgagccggaatgaaatttgcaatcgagagtattagcaagaattctggtcgactaggtcaactgcgaatcagggatggaggacccgagttcaagactccccttcttttgcagacgactaagggcggaagcattccgtggctgagtgcggatgttttcgagactcatgtcagccggaagccacaggtgctccaattcacactgtccacaatggaacaaatgaccgaggcacttacgcattggaacagtggtgggggtcgcggactgagcgactacgtaggactaccaggacatctaaatattctcctgctacgagatccctgtgaaacaacgccttccggaggtaacgacagggatatactgccgttgtttacgagaaggggcaaggaatcgctctcttcggagcgctacatggaaatagtagcaagtttcaagccggacatgtatgagggactctgcgatgcggacacaaatttagagagtgccaagaagcgggttcagaaatcggttgacaggacagagaagtttatgcaatacatctacgagcaccggggcaaggtgaattccactctgctagctcccattgtgggcggatacaacacctttgctcggacgcagtccattaaacatgcccgggaacagccagcgggaag

SEQ ID NO: 6839 - DNA, 3353 bp, DROSOPHILA
cccaactgctgctcagttgatttcgacttttcgacttgttcgcttttcaacaagcgcttcaattcgcttttgggggcttgttcgctatttggagctccactggcgctgagtgaatggttttatgttgtatgcgcagcgcacttgatggaaattgttgtcattgttttagttgtgtgtgcaatcggatgttcgctgtctccgtcgcacggcggtaaagtatgtgcgtgtgtgttccgttcgcgtcgttcattgatttcctaattaagtttataattaaaattaattgaaaaattactcgcatacgtatatgcccgtatatgtgtgcgctggcatgtaccaccgacatgtaaattggctaaccgcgtgtgaaagcccattaaattagttctgttcttcataagctcccctcgaagaaacacttttataataaatttgtttgaatttgaaaacgaaattgtgccaaaagcatcaacagcaaaagaggtggtcctgcggaacgcccaacgatgtggcaaccctaggcaaatgaactgttttacctgcccaaaaacgcacaatagcaacaactacaagaacggcggagagcgagcggacggcacaacggataatttagtggaattttcaaaaatagcaaagccagcaacaacgaacggcagcaataatcccccagcgagagcacaataatcaaagattaaatcaggtttatatggaaagggttagcatggcgcaggaagaaatacacgtttcctagcgcagcaacaactacaaacacctacaactgattactctctcacacgacgaggaaagcgagagaatgcgagagcgcgagagagaaactgtgtttatgcggagaatatcatgattacagaattcagcccaaacccatttatgctacatgaagatgttattgaaatgaaaagaacaaaaaatattgaattttttttgaaaaatatgattgtttcgtttcatgcactggagctgcgttaattttctgatccataaatgcaaaacattattatatagataaaccgaaataattttggttatgcaatatagttcaaggatttaaaaatacataaactagaaaaggacttgccataaacacagtaacagagagagtgaaagagagcaaaagcggcgacgccggcagagcacaaatttccgtcgcagcgcttgcatgtttttcgctcatttttctttcgtgtgcgctgcggcgatgttgtgttttctcacggcggtgaaaacactctgcgacgactgtgacaacaacagcaacaacgataagattttccgtttttccgtatggaagcagaagcactagcggcatttgttttgaaagtaaagcaaaggcaagcgagaaaaacgaaaatataaagcagaggaagacggaaaaagcaacgccgctgccgaccgcgcctcgctgtatgtgcctgtgtggtgttgtgtgcgtgtgtctgtgagcctaccgcctgtctgtgtgtaagtgggcgcgaacgtacggtcgaaaaggaagtgaaaatagtgcaaaaaggccaagtaataataataataataaaataggcaaaaagacaggccccaaaagagaccgaccagaccagtttcaaaaagcgcctatttccaggctctttgtgttatgtgtagtggtaagtgtgtgagcggcaacaacaacagcagcagaagcaacaaaaacaactagcagcgaccacatacggtggaaaaggccttttttcaaggagcgaaaggcaatgcgcgaacgagcaataagaataataaattacactttgctataataagaaaaatttatacatatatacacacaagcgggagaggcccacacacacatgtgtttttcctcgttgagagtgtgtggaaaattgtaataaaatatgaaccgcagaagcagcagcaaaacgagaaaaacgagagaaaatttcgaaatatcgcatgtgccattttaagctttaaataaattataacgtacagtattacaaaaaagagaatatcaaaaaaaaaaagcaaacatataacaattgaacaaaatgtcctgcatatcgagcaactttagctccttcttcctcaactcgctcaacgatccttcagagttttccaagtacttgagcaatggcgagctcaaatgcactaatttcgaggaatttcaagtgtttggctgcggcgcaggcgcggcgacgcaacaacagcagcaacaacaacatcagcagtattcccacacacatttacccaatggcagttcagcgacagcagcagcggattttcccaattacgaggcaactacaacgccgcagcgggaaaactcctcctccgttaactcaggtagttctgttaatcccgcacactatgcttccgccgctgcctctgcctctgccagcgtcgaagccagcgcatcagcagcaccgacgtccactccaggaatcgcaggagcagcaggatcaacttccctcaccgccaccccctcgagcaatcgctggccaactgcagtggccacgcccaatggccatcaatccaccgcctcgacagcgggctcagtgccccagcacttcgatggatcctttgagtttatcaaatatctgcgacactccacggactttacgcccagcacaccgagcagcgccaccgaaactagctcgtgtgcggaaaagcaggtcagtgtcagtaaatcgggcgtccaagcaggcgccacaccaccaccgcctgctcaatcgccggtggccggtggtctgatcgatttggatactagcacctcgcagaaatcacgatctgcctcccgcaaagtggcagctttgttgtcttccgtttcgcgggcttccaatagtctggtggacaccagctcctccgctctggatgtcttcgatcacgattcaaagcagacgatctttgatctacagcacattgcatcaaacggatcgtccaattcgaatgaatcttcgctggaaatgctagcatttcccaattcgcacctaaatgcctccaattcgaacacctcatccgaaggagcagcctgcggaagtgcgggagaattcggaggattgttaaccggcgccagttgctcctcctccacggcttcgtcgtcttcgcatgcaccgaaactcctcggaagctttgtgatcaaggagaacttcgaagtgcatccgtcgcacaaagtggaagagggcatcttccagcacatgaacaagctgccatcgaagaagaaggatacgctaaagcagctgggagttcggttcaccggccagatgacgctgacggacaaatcgattgtggtggagaacttcatcaagttctgcgaggtgaggctgtggatgtgtgtgtcgcccagcggcgtcgttgaaggctactaa

SEQ ID NO: 6840 - protein, 437 aa, DROSOPHILA
MSCISSNFSSFFLNSLNDPSEFSKYLSNGELKCTNFEEFQVFGCGAGAATQQQQQQQHQQYSHTHLPNGSSATAAADFPNYEATTTPQRENSSSVNSGSSVNPAHYASAAASASASVEASASAAPTSTPGIAGAAGSTSLTATPSSNRWPTAVATPNGHQSTASTAGSVPQHFDGSFEFIKYLRHSTDFTPSTPSSATETSSCAEKQVSVSKSGVQAGATPPPPAQSPVAGGLIDLDTSTSQKSRSASRKVAALLSSVSRASNSLVDTSSSALDVFDHDSKQTIFDLQHIASNGSSNSNESSLEMLAFPNSHLNASNSNTSSEGAACGSAGEFGGLLTGASCSSSTASSSSHAPKLLGSFVIKENFEVHPSHKVEEGIFQHMNKLPSKKKDTLKQLGVRFTGQMTLTDKSIVVENFIKFCEVRLWMCVSPSGVVEGY

SEQ ID NO: 6841 - DNA, 5083 bp, DROSOPHILA
ctttcgggggagaggtggtgaaaatccagtgggtttatcctcacacaaatatcctcacattaatggcacatgcaattttcccctacatttggcacctagcacccagctttcacccgcagtaccgttataccgttccgttttaccgttttaccgccgcgttgtgttcacaggaccgcacaagctcagactgaagcgacgaagtgaagctgcgtgagcgagcggctggttgcttttacgctttaatactaaaaaaaaaggaaaacggtcctttttgctttcgttcgctcgcgcgcacagcttcctttgcttcctctttgtcgtcggagtgtagactttctcgccgctctctttgcgcaacaatgaaactcttgaaagtctccaaaatgaacagaccgttttaatatcttggccatatttcgaacgcattccgataaacatttactccaaagtcaagtatgtgaatctgttaaggtaaatagggatgtaatctgcccatccaattacaatagcatgcttttaggctgcttataaattatcccagagttcttcgaaccatatttatggcggcgtccacatataaatatagttaagttatcgcaacagtcttcaacgatctttggtattatcagatgacctgattcccttggtattttaaaataagtgtgaatgaatcacatgaatgaattcaaaattttctaataagatttctacaagtttaagaacatcaccaaccatcgtatgtttaatgtcaccaccaagggtgcccgtattacgacataacgtgaccacatattttagggaatttttaaaaaataagcatagaaattatctcttataactaaagtcatgtccactttgctttgagtattaatttaatttgagaaattatattgcgtcgcgtaagctgccaccactgagggtgaccgtacttgcgaccggtgtgcccgcaccgcgcaatcaccagcacttcggccgtttcccagcactgcctcaccgaacgtctggccagcgaccatcttgtgaaaagtactacgagtgtggagaggagttggcttaggaattgtacaattacttctgcggcgaacagttaaaaagcattaaaaatgtcgattttttccgcccgcctggcgtcctcggtcgcccgtaacctgcccaaggctgccaaccaggtaccgcaccgaattccagaaattaaatcgcccgacgaagagttggcgaaaaagtgtaatacataaccgaatcgatggggtactttgcagaaaattagtgcatccgggtggttcaaagatcgatcgaactgtggataaagactttctggatgcgtagcaagtattcgggtgggattttgtaccattttccaacaagaatttagtgttacgcaatgcggcgaattgcaaggcggccgctgaaattgtgggttacataatcagtgccaaccgagaatttgctaagcaaaacagagtttttggttattttttcagtaaaagtgtgcgaagaacgctgcaatgtctttgtttttgtcctcacattacataattgtgatgtgggtgagatgcggtgcccgaaaagtttgaggttaggtgcggctgtcaagcaagtggtgaaggtggaaagaatacaaagtggggaagtgccgacatccagataccctgtaatcagtttttttttttattaactagctagaaagtactggagagaagttattgaacgatcgtaccctgcggttatccaacgacacggacctacaccttacataatctcgcataatcatatcgattaacctactctcttacaggtcgcctgcaaagccgcttatcccgccgccagtcttgctgcccgcaagctccatgtggccagcacgcagcgtagcgctgagatctccaacatcctggaggagcgcatcctgggcgtcgcccccaaggctgatctggaggaaaccggccgtgtgctgagcatcggtgacggtatcgcccgtgtctacggtctgaacaacatccaggccgatgagatggtggagttctcctccggactgaagggcatggcccttaacttggagcccgacaacgtcggtgttgtggtcttcggtaacgataagctgatcaagcagggcgatatcgtcaagcgtaccggtgccatcgtggatgtgcccgtcggtgatgagctgctgggtcgcgtcgtcgatgccctgggaaatgccatcgacggcaagggtgccatcaacaccaaggaccgtttccgtgtgggaatcaaggcccccggcatcatcccccgtgtgtccgtgcgcgagcccatgcagaccggtatcaaggccgtcgactccctggtgcccatcggtcgtggtcagcgtgagctgatcattggcgatcgtcagactgggtaagattctggagataaccaaaccatgacacaccatttctcaattgctagcaagcaaaatttaaccaaacaattttgtatttaatctgcagtaagaccgctctggccatcgacaccatcatcaaccagaagcgcttcaacgaggcccaggacgagtccaagaagctgtactgcatctacgtcgccattggccagaagcgttccaccgtcgcccagatcgtgaagcgtctgaccgactccggcgccatgggctactccgtgatcgtgtcggccaccgcctccgacgctgctcctctgcagtacttggccccctactccggatgcgccatgggagagtacttccgcgacaagggcaagcacgccctgatcatctacgatgatttgtccaagcaggctgtggcctaccgtcagatgtccctgttgctgcgtcgtcccccaggtcgtgaggcctaccccggtgatgtgttctacctgcattcgcgtctgctggagcgtgccgccaagatgtcccccgccatgggaggcggttccctgactgctctgcccgtgatcgagacccaggctggcgatgtgtccgcctacattccaaccaacgtcatctcgattaccgacggacagatcttcttggagaccgagttgttctacaagggtatccgccctgccattaacgtcggtctgtccgtgtcccgtgtgggttccgctgcccagaccaaggccatgaagcaggtggccggttccatgaagctggagttggcccagtaccgtgaggtcgctgccttcgcccagttcggttccgatctggatgccgccacccagcagctgctgaaccgtggtgtgcgcctcactgagctgctcaagcagggtcagtacgtgcccatggccattgaggatcaggtgtgtatgccaggacttacctagcaactaacttatatccgtagtgacaacgcggatatcgcgattcccgtgtaaaacccaacctctaatcacccaacatcaaatcttccaggtcgccgttatctactgcggtgtgcgcggtcatctggacaagatggatcccgccaagatcaccaagttcgagaaggagttcttgcagcacatcaagacctccgagcaggctctgctcgacaccatcgccaaggacggtgctatctcggaggcgtccgatgccaagctgaaggacattgttgccaagttcatgtccaccttccagggttaagcatcagcagcaaacgaagaataggagtagcggtgcgtgcaattaacatcatagatggctcgaataatgctgccatccctgcgcgccatcaacaacaacaaataacaacctacaacttaagataaacagaaattataaaacaaaaacaagagaaaactcctttgcacattcatgttttcctgcgcatcctgactggatcgatcgccttcaatccgtggttcggtgccattatgccgcaaaatcttgggagagagagagccggccctggctacggagtggacggcgagccccagccggatgcactttcgagtttcagcgaaaaatccttgcggttcctccaacctccaaaacgatagataatcccccgttgttcttctacctaaaatatgtaatcaatatttgaaatattgtaatcgagaatagtcgaaataatgtctgaggatgattgtgaaacgatgatgaattaaaacgatactaaattatactctaaatgagtcctgctcacacttctttgctgggattatttccttttgctttcttttttaattcccgattttggtaatataatttaaagaattcttgacaaattgttatgttctaagccatttggagatgtcttgccaggaatctttgagcatattttgttaataggggttttaagcttggtttcttgaggttctgttgccgaaatggatttccctaactaatcctggtcctttcggctcagctgatccgccagacgacgagcagatgtccttttgcgtaaccgtaacctcttgacccccgtgcgaattagccaccccttgaactacctgaacgaccgcctgtctgctccaaggcgcaggattcagaaaggaactcgaacccggtggttcggagtggttcatgctgtgcatatttcggtaacagcaagccagaagcgagagcaagaagtttccaaaaagagaagaagaaacagagggtaccaagacccaaaaactgtaagcccgatttatacggcatggagtttttatgacgccgattgccactggcagccaacataaaatatgccaaaagggaggagcagcggaggtgccgagaaaaatgactttctttttactacatttgtttgaccgtaaacaagaattaatgagagtcataaaaccgtcaaacttaaatttcgaacaggcgcacagcaaagtcagcaggccgtgtacagtgggcgctctataaggcgaacaaatgttgaaactcaaactttttacctaatgcattaattgctactaacgaaaactatttgaaatattcgttcgataattcgcttatatgtttcttaagaacttaactataaggttgcctttatttggctttgtatcgagtaactactgtacatgagaaaagtgagatagacacccacacacacacacgcacaaccatgtgcgagcaatgtgctcggcaattaccgttgcccatggaacacggtaccaaaaaaagggagagaaaagcgttaaa

SEQ ID NO: 6842 - DNA, 2253 bp, DROSOPHILA
tctggccagcgaccatcttgtgaaaagtactacgagtgtggagaggagttggcttaggaattgtacaattacttctgcggcgaacagttaaaaagcattaaaaatgtcgattttttccgcccgcctggcgtcctcggtcgcccgtaacctgcccaaggctgccaaccaggtcgcctgcaaagccgcttatcccgccgccagtcttgctgcccgcaagctccatgtggccagcacgcagcgtagcgctgagatctccaacatcctggaggagcgcatcctgggcgtcgcccccaaggctgatctggaggaaaccggccgtgtgctgagcatcggtgacggtatcgcccgtgtctacggtctgaacaacatccaggccgatgagatggtggagttctcctccggactgaagggcatggcccttaacttggagcccgacaacgtcggtgttgtggtcttcggtaacgataagctgatcaagcagggcgatatcgtcaagcgtaccggtgccatcgtggatgtgcccgtcggtgatgagctgctgggtcgcgtcgtcgatgccctgggaaatgccatcgacggcaagggtgccatcaacaccaaggaccgtttccgtgtgggaatcaaggcccccggcatcatcccccgtgtgtccgtgcgcgagcccatgcagaccggtatcaaggccgtcgactccctggtgcccatcggtcgtggtcagcgtgagctgatcattggcgatcgtcagactggtaagaccgctctggccatcgacaccatcatcaaccagaagcgcttcaacgaggcccaggacgagtccaagaagctgtactgcatctacgtcgccattggccagaagcgttccaccgtcgcccagatcgtgaagcgtctgaccgactccggcgccatgggctactccgtgatcgtgtcggccaccgcctccgacgctgctcctctgcagtacttggccccctactccggatgcgccatgggagagtacttccgcgacaagggcaagcacgccctgatcatctacgatgatttgtccaagcaggctgtggcctaccgtcagatgtccctgttgctgcgtcgtcccccaggtcgtgaggcctaccccggtgatgtgttctacctgcattcgcgtctgctggagcgtgccgccaagatgtcccccgccatgggaggcggttccctgactgctctgcccgtgatcgagacccaggctggcgatgtgtccgcctacattccaaccaacgtcatctcgattaccgacggacagatcttcttggagaccgagttgttctacaagggtatccgccctgccattaacgtcggtctgtccgtgtcccgtgtgggttccgctgcccagaccaaggccatgaagcaggtggccggttccatgaagctggagttggcccagtaccgtgaggtcgctgccttcgcccagttcggttccgatctggatgccgccacccagcagctgctgaaccgtggtgtgcgcctcactgagctgctcaagcagggtcagtacgtgcccatggccattgaggatcaggtcgccgttatctactgcggtgtgcgcggtcatctggacaagatggatcccgccaagatcaccaagttcgagaaggagttcttgcagcacatcaagacctccgagcaggctctgctcgacaccatcgccaaggacggtgctatctcggaggcgtccgatgccaagctgaaggacattgttgccaagttcatgtccaccttccagggttaagcatcagcagcaaacgaagaataggagtagcggtgcgtgcaattaacatcatagatggctcgaataatgctgccatccctgcgcgccatcaacaacaacaaataacaacctacaacttaagataaacagaaattataaaacaaaaacaagagaaaactcctttgcacattcatgttttcctgcgcatcctgactggatcgatcgccttcaatccgtggttcggtgccattatgccgcaaaatcttgggagagagagagccggccctggctacggagtggacggcgagccccagccggatgcactttcgagtttcagcgaaaaatccttgcggttcctccaacctccaaaacgatagataatcccccgttgttcttctacctaaaatatgtaatcaatatttgaaatattgtaatcgagaatagtcgaaataatgtctgaggatgattgtgaaacgatgatgaattaaaacgatactaaattatactctaaa

SEQ ID NO: 6843 - protein, 552 aa, DROSOPHILA
MSIFSARLASSVARNLPKAANQVACKAAYPAASLAARKLHVASTQRSAEISNILEERILGVAPKADLEETGRVLSIGDGIARVYGLNNIQADEMVEFSSGLKGMALNLEPDNVGVVVFGNDKLIKQGDIVKRTGAIVDVPVGDELLGRVVDALGNAIDGKGAINTKDRFRVGIKAPGIIPRVSVREPMQTGIKAVDSLVPIGRGQRELIIGDRQTGKTALAIDTIINQKRFNEAQDESKKLYCIYVAIGQKRSTVAQIVKRLTDSGAMGYSVIVSATASDAAPLQYLAPYSGCAMGEYFRDKGKHALIIYDDLSKQAVAYRQMSLLLRRPPGREAYPGDVFYLHSRLLERAAKMSPAMGGGSLTALPVIETQAGDVSAYIPTNVISITDGQIFLETELFYKGIRPAINVGLSVSRVGSAAQTKAMKQVAGSMKLELAQYREVAAFAQFGSDLDAATQQLLNRGVRLTELLKQGQYVPMAIEDQVAVIYCGVRGHLDKMDPAKITKFEKEFLQHIKTSEQALLDTIAKDGAISEASDAKLKDIVAKFMSTFQG

SEQ ID NO: 6844 - DNA, 7865 bp, DROSOPHILA
gtgtgtttgtgtgtggcgggattgcggttgttgtctgtggtgtgatgcggtttgttgttgtttgtattgagacaagtgtgaattgttttcctttctcctgttgttgttgctgctgtttttattgttgttggtgtgggtgttgcttgtgcgtgccgagaaacaacaagagcaacaaaagccaaatgtttggctgttgatgccatgattttttgattccttttgcaagggcttgcgtcgtgtgcgttaatgtgtgtgtgcccgtgtgtgtaagtgggggaaattttcacactttcactctttggtgcgtgtgctgccccattcgactggttttattttttaaagggttaagggttacagctttcgacaccctctgctttgctttgttttgcccatgcccggcgtttctccacctttccattaggcaactaatttagggttttttaattaaggtaaacccgttctaaatgcgctctaaattccggaaaaatgaccccacaccaaactaatttaatgtggtgtgtgctcccaaaaggcgacaaaacgttgcacaaaagctaaatatttgatgtgtgcgttagaattatacaagcatatgtacatatgtgcgcctgcatatacatatattatatatacaaacatacaaacatatatacgcgtcgaaagccctgtatatagacatcacatgcggcaagtacagttatatcggcatgtgcccgcatacatacatatgtataatttaaaattataatcaatgccccatatgtgcgcctgctttcatacgcgagtgtgagtgtgtgcgcgcgtaaattgtgcgaagccgagacattgtacctgcccgagagccacccactttccgccaaaccacccacccacagccccgatccaccgcacccgtttcacatcctcatccactaagctgtcctttacacacacacacactcggccgcaaagttgggcaaaaccgagtgcacttgtgtgggtgagctgactgcatgcgcacttagtagccttcaacgacgccgctgggcgacacacacatccacagcctcacctacagtcaagcttcctaggctataaacatcctaagttactatacattccattacatcaagccttctattaattgacaaagcaaaatgaagttaatatatgtatatttgaaaatggtagttctggttacgatcattttacattatctaatttgtaaaaataaaaccaaattgaacaggttgattaaaaaataagaaagtgacataaataagctcttaaaacctttcaaatagtggtttgataggaattttcaattgccgaattaatattgaactgactgcaattatagcttttcctcaaactaaatttatttatttctaatttgtgttactattcttaagcaagttctactgtactaatggtcgctccgatagagacatgtataaaatgtgttgataaaatacagacgcactcacacacatgcaagacgaaatcgagagagtcggaaaaggacatgcccaagcagctagcggacagtccgatgtcccccaatttctccattcccccgcacccctctaagtaacttgatgattgtatgtgtgaaagcaaggagtggaagccaaagaattcaagggagcagcagaagaagaagacgaaggacgatcaggagaaggagaataagaaggtgggagacaacacacaattactcaatagcaagcttttgggggttgcccacacccacacacaaagccacacacatacagaactacacacactttggtagttcagccttcaagtaagttttgaattgaggaaatgaaggcgagaggcagagcgaggtgagagaaagtgggagccaggagagagcagccaccgcagaaatgagagagcgcaacaattttgagttagggagccaagtaggtaaagtaaaagagagagcgtcttagaactaaaatgttgtaatagagggggcttttttgggcttcccttccgtttcgcctacatcgtaatttctccgccccccatccagttgttgttgttcttgcttttgttgtattatgccatcaatgccattttgtacatagtttcggaaaatgtgtgtgtgcgtgagcttaagagcaagagggcggggggatgcgacgggtggccaacaaatctagatgtgactctgtctgtgtgtttgtgataaagcggagcgtaatgagcgtggtgagtgtttggggttgactgccatagtgttgaaaagggcgccaaacgtgtctgcgtgtgtgtgtttgctcgggtggctttccggggggttgtggtggtggtagtggaaagtggggatttagcccccccgcatgtataggtgtttagaactcacacatacgcacatacatacattgagcacacatgattacagttgtatgctgaatttgtggttggctgcagtcgacgtcgactgcggcgccggcatcactgctcctgttattacaatttataatgacatttgtgtgagtggggggcaaacggaatcccgaatgtgtgtgtgagtgcgggtggaattacggcagtgtgtgtgatataggatatagatagggtgcatgtttatattatgaatatcccaattgttatgtactatatttatatagggtgcgggtgcaccgaaaaatgtattacattttagtttagccaaagtaatacacattactagctttctaatcgatacattatagaaatgacgatcaagaactctgaaatggtccctctttatacattttctgtcaaatttacttttgcgggctacattacaaagcttatacaaaattgtatcagttagataagaccagtgatagattgacctttaattcaggctttcaattgagtaacttatcagtagttcttcttatcaaatcattatgtattgaccccagtctatgaacatttcctacatggatttcagtcttttgggaattaataaacctaaaatagaaagcttttgaattaaataaaacgcattttagtgtaaaacatattacatacttgcaaggaaattgtacttctagatgtaaagcatataatccccacagccaaccccaattagaccccattaagtcctgttcccgaccatcattacaaataaatacctaattcatacatatgtgcgaattgcatatggaaatgggcagcgcgcggagagcgtggaaatattcgcacacacagggacaagagaaatttgactcgctaacaccccgacaacatctggaaacccaaccccttcgatttcgggaagcgtaactcacctcgcagaacttgatgaagttctccaccacaatcgatttgtccgtcagcgtcatctggccggtgaaccgaactcccagctgctttagcgtatccttcttcttcgatggcagcttgttcatgtgctggaagatgccctcttccactttgtgcgacggatgcacttcgaagttctccttgatcacaaagcttccgaggagtttcggtgcatgcgaagacgacgaagccgtggaggaggagcaactggcgccggttaacaatcctccgaattctcccgcacttccgcaggctgctccttcggatgaggtgttcgaattggaggcatttaggtgcgaattgggaaatgctagcatttccagcgaagattcattcgaattggacgatccgtttgatgcaatgtgctgtagatcaaagatcgtctgctttgaatcgtgatcgaagacatccagagcggaggagctggtgtccaccagactattggaagcccgcgaaacggaagacaacaaagctgccactttgcgggaggcagatcgtgatttctgcgaggtgctagtatccaaatcgatcagaccaccggccaccggcgattgagcaggcggtggtggtgtggcgcctgcttggacgcccgatttactgacactgacctgcttttccgcacacgagctagtttcggtggcgctgctcggtgtgctgggcgtaaagtccgtggagtgtcgcagatatttgataaactcaaaggatccatcgaagtgctggggcactgagcccgctgtcgaggcggtggattgatggccattgggcgtggccactgcagttggccagcgattgctcgagggggtggcggtgagggaagttgatcctgctgctcctgcgattcctggagtggacgtcggtgctgctgatgcgctggcttcgacgctggcagaggcagaggcagcggcggaagcatagtgtgcgggattaacagaactacctgagttaacggaggaggagttttcccgctgcggcgttgtagttgcctcgtaattgggaaaatccgctgctgctgtcgctgaactgccattgggtaaatgtgtgtgggaatactgctgatgttgttgttgctgctgttgttgcgtcgccgcgcctgcgccgcagccaaacacttgaaattcctcgaaattagtgcatttgagctcgccattgctcaagtacttggaaaactctgaaggatcgttgagcgagttgaggaagaaggagctaaagttgctcgatatgcaggacattttgttcaattgttatatgtttgctttttttttttgatattctcttttttgtaatactgtacgttataatttatttaaagcttaaaatggcacatgcgatatttcgaaattttctctcgtttttctcgttttgctgctgcttctgcggttcatattttattacaattttccacacactctcaacgaggaaaaacacatgtgtgtgtgggcctctcccgcttgtgtgtatatatgtataaatttttcttattatagcaaagtgtaatttattattcttattgctcgttcgcgcattgcctttcgctccttgaaaaaaggccttttccaccgtatgtggtcgctgctagttgtttttgttgcttctgctgctgttgttgttgccgctcacacacttaccactacacataacacaaagagcctggaaataggcgctttttgaaactggtctggtcggtctcttttggggcctgtctttttgcctattttattattattattattacttggcctttttgcactattttcacttccttttcgaccgtacgttcgcgcccacttacacacagacaggcggtaggctcacagacacacgcacacaacaccacacaggcacatacagcgaggcgcggtcggcagcggcgttgctttttccgtcttcctctgctttatattttcgtttttctcgcttgcctttgctttactttcaaaacaaatgccgctagtgcttctgcttccatacggaaaaacggaaaatcttatcgttgttgctgttgttgtcacagtcgtcgcagagtgttttcaccgccgtgagaaaacacaacatcgccgcagcgcacacgaaagaaaaatgagcgaaaaacatgcaagcgctgcgacggaaatttgtgctctgccggcgtcgccgcttttgctctctttcactctctctgttactgtgtttatggcaagtccttttctagtttatgtatttttaaatccttgaactatattgcataaccaaaattatttcggtttatctatataataatgttttgcatttatggatcagaaaattaacgcagctccagtgcatgaaacgaaacaatcatatttttcaaaaaaaattcaatattttttgttcttttcatttcaataacatcttcatgtagcataaatgggtttgggctgaattctgtaatcatgatattctccgcataaacacagtttctctctcgcgctctcgcattctctcgctttcctcgtcgtgtgagagagtaatcagttgtaggtgtttgtagttgttgctgcgctaggaaacgtgtatttcttcctgcgccatgctaaccctttccatataaacctgatttaatctttgattattgtgctctcgctgggggattattgctgccgttcgttgttgctggctttgctatttttgaaaattccactaaattatccgttgtgccgtccgctcgctctccgccgttcttgtagttgttgctattgtgcgtttttgggcaggtaaaacagttcatttgcctagggttgccacatcgttgggcgttccgcaggaccacctggaatgcacataaatgttaagttttattgccctttttacagttcctccacatttacgactgccattgagtcgtaaaacacgtgaacaggtagcgatctattcaaggccacagctgtttaggaggttggcaaccctggcgggcaggagatttcaaaacttccagtggatatgttctaactcaaggaatttttatagccgatttgtttgaataaatgtacaatgtacataatgtctgcggcagacgctgttaattataaatacaactgcggccgcaaggaagtcatcaatttaaaaagctgtctctgcattattgttattctaattacctcttttgctgttgatgcttttggcacaatttcgttttcaaattcaaacaaatttattataaaagtgtttcttcgaggggagcttatgaagaacagaactaatttaatgggctttcacacgcggttagccaatttacatgtcggtggtacatgccagcgcacacatatacgggcatatacgtatgcgagtaatttttcaattaattttaattataaacttaattaggaaatcaatgaacgacgcgaacggaacacacacgcacatactttaccgccgtgcgacggagacagcgaacatccgattgcacacacaactaaaacaatgacaacaatttccatcaagtgcgctgcgcatacaacataaaaccattcactcagcgccagtggagctccaaatagcgaacaagcccccaaaagcgaattgaagcgcttgttgaaaagcgaacaagtcgaaaagtcgaaatcaactgagcagcagttggggaaatacaacgcaaacaaggagaataggggcgccaacctgaaagggttgccagatcgttgacaccgtaaacttccttcctttttggtggttagatgtctcctacgccctcttttttttctgacatttttcttaattttctataacacaatcagagaggatctaaaatggtggtcttaatttaagaattttttttatattagacatatattttgaacttaattaacgcggcagcacacgtggctataaataaataaaagcagctaaatcgccatcactaatagttatcgttatcgggaaccgcttcaaacgtgtggttggttgttatttattccaataataaatactcattcgagccggaatgaaatttgcaatcgagagtattagcaagaattctggtcgactaggtcaactgcgaatcagggatggaggacccgagttcaagactccccttcttttgcagacgactaagggcggaagcattccgtggctgagtgcggatgttttcgagactcatgtcagccggaagccacaggtgctccaattcacactgtccacaatggaacaaatgaccgaggcacttacgcattggaacagtggtgggggtcgcggactgagcgactacgtaggactaccaggacatctaaatattctcctgctacgagatccctgtgaaacaacgccttccggaggtaacgacagggatatactgccgttgtttacgagaaggggcaaggaatcgctctcttcggagcgctacatggaaatagtagcaagtttcaagccggacatgtatgagggactctgcgatgcggacacaaatttagagagtgccaagaagcgggttcagaaatcggttgacaggacagagaagtttatgcaatacatctacgagcaccggggcaaggtgaattccactctgctagctcccattgtgggcggatacaacacctttgctcggacgc

SEQ ID NO: 6845 - DNA, 3053 bp, DROSOPHILA
gttcgcttttcaacaagcgcttcaattcgcttttgggggcttgttcgctatttggagctccactggcgctgagtgaatggttttatgttgtatgcgcagcgcacttgatggaaattgttgtcattgttttagttgtgtgtgcaatcggatgttcgctgtctccgtcgcacggcggtaaagtatgtggtcctgcggaacgcccaacgatgtggcaaccctaggcaaatgaactgttttacctgcccaaaaacgcacaatagcaacaactacaagaacggcggagagcgagcggacggcacaacggataatttagtggaattttcaaaaatagcaaagccagcaacaacgaacggcagcaataatcccccagcgagagcacaataatcaaagattaaatcaggtttatatggaaagggttagcatggcgcaggaagaaatacacgtttcctagcgcagcaacaactacaaacacctacaactgattactctctcacacgacgaggaaagcgagagaatgcgagagcgcgagagagaaactgtgtttatgcggagaatatcatgattacagaattcagcccaaacccatttatgctacatgaagatgttattgaaatgaaaagaacaaaaaatattgaattttttttgaaaaatatgattgtttcgtttcatgcactggagctgcgttaattttctgatccataaatgcaaaacattattatatagataaaccgaaataattttggttatgcaatatagttcaaggatttaaaaatacataaactagaaaaggacttgccataaacacagtaacagagagagtgaaagagagcaaaagcggcgacgccggcagagcacaaatttccgtcgcagcgcttgcatgtttttcgctcatttttctttcgtgtgcgctgcggcgatgttgtgttttctcacggcggtgaaaacactctgcgacgactgtgacaacaacagcaacaacgataagattttccgtttttccgtatggaagcagaagcactagcggcatttgttttgaaagtaaagcaaaggcaagcgagaaaaacgaaaatataaagcagaggaagacggaaaaagcaacgccgctgccgaccgcgcctcgctgtatgtgcctgtgtggtgttgtgtgcgtgtgtctgtgagcctaccgcctgtctgtgtgtaagtgggcgcgaacgtacggtcgaaaaggaagtgaaaatagtgcaaaaaggccaagtaataataataataataaaataggcaaaaagacaggccccaaaagagaccgaccagaccagtttcaaaaagcgcctatttccaggctctttgtgttatgtgtagtggtaagtgtgtgagcggcaacaacaacagcagcagaagcaacaaaaacaactagcagcgaccacatacggtggaaaaggccttttttcaaggagcgaaaggcaatgcgcgaacgagcaataagaataataaattacactttgctataataagaaaaatttatacatatatacacacaagcgggagaggcccacacacacatgtgtttttcctcgttgagagtgtgtggaaaattgtaataaaatatgaaccgcagaagcagcagcaaaacgagaaaaacgagagaaaatttcgaaatatcgcatgtgccattttaagctttaaataaattataacgtacagtattacaaaaaagagaatatcaaaaaaaaaaagcaaacatataacaattgaacaaaatgtcctgcatatcgagcaactttagctccttcttcctcaactcgctcaacgatccttcagagttttccaagtacttgagcaatggcgagctcaaatgcactaatttcgaggaatttcaagtgtttggctgcggcgcaggcgcggcgacgcaacaacagcagcaacaacaacatcagcagtattcccacacacatttacccaatggcagttcagcgacagcagcagcggattttcccaattacgaggcaactacaacgccgcagcgggaaaactcctcctccgttaactcaggtagttctgttaatcccgcacactatgcttccgccgctgcctctgcctctgccagcgtcgaagccagcgcatcagcagcaccgacgtccactccaggaatcgcaggagcagcaggatcaacttccctcaccgccaccccctcgagcaatcgctggccaactgcagtggccacgcccaatggccatcaatccaccgcctcgacagcgggctcagtgccccagcacttcgatggatcctttgagtttatcaaatatctgcgacactccacggactttacgcccagcacaccgagcagcgccaccgaaactagctcgtgtgcggaaaagcaggtcagtgtcagtaaatcgggcgtccaagcaggcgccacaccaccaccgcctgctcaatcgccggtggccggtggtctgatcgatttggatactagcacctcgcagaaatcacgatctgcctcccgcaaagtggcagctttgttgtcttccgtttcgcgggcttccaatagtctggtggacaccagctcctccgctctggatgtcttcgatcacgattcaaagcagacgatctttgatctacagcacattgcatcaaacggatcgtccaattcgaatgaatcttcgctggaaatgctagcatttcccaattcgcacctaaatgcctccaattcgaacacctcatccgaaggagcagcctgcggaagtgcgggagaattcggaggattgttaaccggcgccagttgctcctcctccacggcttcgtcgtcttcgcatgcaccgaaactcctcggaagctttgtgatcaaggagaacttcgaagtgcatccgtcgcacaaagtggaagagggcatcttccagcacatgaacaagctgccatcgaagaagaaggatacgctaaagcagctgggagttcggttcaccggccagatgacgctgacggacaaatcgattgtggtggagaacttcatcaagttctgcgaggtgaggctgtggatgtgtgtgtcgcccagcggcgtcgttgaaggctactaa

SEQ ID NO: 6846 - protein, 437 aa, DROSOPHILA; identical to SEQ ID NO: 6840

SEQ ID NO: 6847 - DNA, 4378 bp, DROSOPHILA
tctttgatattcattactaatttatgcacgtgtacaaaatgatagcaatcaggaaatccgattgattaattaagctaatggttcttttgcataacaagacaatggtattgtaagctatttgaagaaatcctgtctatcctgcgtaagaaattatcaacttattgttaatctaaaaaataagttttaataatatgtagttttctttctaaaacagttcattaaattagcgtatgtcatattttgcaaagtatttcctaattaagtgagtcaagtaagtaaatttcctaacaagtaagtcaaaccaaagttacccatcaggcgtggtcatttaaaccataatatgtacggctctctacacccgaactagtttttagaaaatatttcgaaccgtttagaatcgcgacctgcgacccgatctcttttggccaacggtcaacaaaccgcaaactgatttacagcccccagtggcaaaggcaaaaaaaaaaatggagagagctttgccattccgaatggctggctctctttctctctctctctctctccggatcgatcgctctttttggcagaacatgggcttttggccaaaaccgtttgtagacggcacataaaaagctcgggtcgcaatgctcccccaacagttcggcaaacgaaacctctgtctgtggacccccagaaatcgggagcttgattaagaaccagagcgatacaagtcgagaatcccagtgcgtgcgtgaaattagaaacccgaagaaaatccacaaaaaaaccatgaccaagttcgtggtggtgggcatgtgcctgctgatggccttcggccatatggcttccgtttccgccgtgaccgaggctccggaggtggagcagtcaacggagtcgcccatcgccgacatggcgctgattggtaggcccacggatccaatgtcttcccctaacccctagaatttccattaatttatacctgtgtttctcttttttttttcatgtgccgtgtgttttgtttatgtgtgcattttttgtttctgtgatttttgtgcgggtggcgcagaggatgcgccaatggctcccaaaactcccacggagaagccgcccattgtccaggaagccgcaatggtggtggacgctcaggagaagtccgcacaggtggccccacaaccccacacggtggctgactttatcatccacccgctgatcgccttcaagccacgccaggcctccctagaggagatccagggcaaacaggccacaccgagctccagtgccccggcctccccgggcacctggctcttcggcatgaatcccgctcagcagctgggctcctccttttcgacgcttgctggttccgtttccggttggttcaatgatcgcctggcagctgccggacagcagttgcccggtttggtggaaaccccggtgagggagtcaaccacaagcaccagcaccaccacatcaacgaccacccagcgcccagacattgtggtgcgagtacagcagcgtccccaaaggaatggcaaccgcaatggaaaccgcaatggcaatggaaacctcaatggtggaaacctgaacaacaacaggcgtcgtcagcgacctaaccgcttcaataaccgactggactccttcgaggacgactactacgaggacgattacttccagggcaaccgattcgatgacgagttcgacgacgatgaggacgagcaaagcctggagcaattcgaggatgacgattccctggagctgcgtcctcagcaaaaacccaagcgcaaacagacccaggtgcagacccaaaatcagcgcaggaagttccagcaagaggagcaggtgatcagccagaagcgccgccaatcggtgacccagaacaagaagcccaaggttcagaagaagccagttcagccggtggttgaggagtcacaggatgaggaggaattggacgatgatgagaacgagaacgacgatgaggaggaggaagagcaggtccaggaggacgacagccaagagcaggactttcagccggagccgatctatggctccagctcctcgtcgactaggcgcagccaaaaccagcccaatttcatccagcgcggccagcagagcatcatcagtcagattaggcagttcacccgaggtcagacgcccggagaactggctagcacgctgcaccggggtccctcctcgtcatcctcgggctcttcgaagacccgtcggccgcagcagactacgctcctggtaaaccgcaatggacagaccgtttacgtggctcccgagctgctgggcctgaactctccctatccctacgcttatgtccagggtcagacgaagaaacaaagggttcccatcaacggtgcattcccacagccaccactaacggtgccggtgaggcgtcaaggtcgtcccacccagtacatcacgataccctggagccagctgggactctcaccgcccgaccagcaatcagtcgtttccctggccgaaggcatccaagctcagcccctcattctgaatattccgcagagcgccattagtccggtgcgtggtggtgccagctcgagtggccaaaagaaaaagcgcccccagctgaccgcctcggcggttccccttttggctgacgcctcacttatggacatcttccagcctccccagatcccgccctccagaaccggttcatcatcttccggatcctccatcaaaccgatctccgcccagcccgtcctgattgccgctaagcccgtaaaggctggtggagtgggtaccactggactgctacccactcgcattcgtccaggaacgattgtagagaaggcccctgctatggaggcaatggagaagcccatggaggtcaacgagatgaagcaggagcaggaggtgatggccacggagccagctgcttctgcgccacaaacggcagccaatggatccgagcagcaggagttcatcttggttggcgatgatgatgagccaggagtctcgcgacatgtgcagccagctttcggggatgcccgctatgtgtcctacggcgatttccatccgtactttgatctgctgacgcaaaacaggcgattcgcgcttaggaagaccggcaggtctttggagattcccgaagagcaggtggcccccaagggagacttgcagaaggaggagaagccaaaggaggaggagcagaaggagaagcttccaaaggaggaagttcagctagaggagattaagaaggaggagccccagaaggaggagctccagaaggaggagccacaaaaggaggagccccagaaggaggagccacgaaaggaggagccacaaaaggaggagccacaaaaggaggagccacaaaaggaggaacccaaagtggaaaccccacagcctctggagcagtcaaaactgccagcctaattttgtaaacgaacagccctccaaaaatcgaacccaaacgagctcgaattgaaataatgaagataacaaagaaatatgataagcaaaaccaaaaccaaacgattttcaatcctcgtgaaaaccacaaagaaataaattttttttacattttttttttgcgtgtgttaatgcctaaccaaaaagttaaagttttgctggctaaaaagagagaaaactattagcaaacctaaacataattatttttttttattatcgtttcttcggccagttgaaagttcaaatctctaagagcattgaccgtcgagaggccagaaacctgatttggtgccccgaaagcgatggcctgttattgagacccgtgcttttgaccgatttaaatatgtatctaacattttcgaacgcctctttttagcttcaccttaattaatattcccccagcgacaatagaaatttgctgttggggtcaagcataaagaactgactgacagcataattcctaaaatgcaaattagtcggccgattaacggtatttggcgtagatacagttgtctgagcataataatcaatcgaaggcaacccagcgaagcagttttgtagcgcctagcttttcaaagtatttaaggaagtcttaaaaagttcatcttcaccaacgagttttaaagaagatcttagagctttaagctgaacgcaaggatgctagcaagtttgtccaaatcagttaaatctgaaaagattctcatcgctaagcttaagtagggataatgacaggctcagacgcatttgaaggtttttacgagctttaagcccaatattactgcacaaataagacgaaagaaagcattaaaagcagaagaaacaatacagctagatgatgtgttcgaaaagtttaactttagaccatttgaatacgtagtttacacaaaattagttgtggcattacaattattgctaatttaaaactctaaaagtcgataaaatcatataagttttgcttaaaaca

SEQ ID NO: 6848 - DNA, 2378 bp, DROSOPHILA
atgtgtgcattttttgtttctgtgatttttgtgcgggtggcgcagaggatgcgccaatggctcccaaaactcccacggagaagccgcccattgtccaggaagccgcaatggtggtggacgctcaggagaagtccgcacaggtggccccacaaccccacacggtggctgactttatcatccacccgctgatcgccttcaagccacgccaggcctccctagaggagatccagggcaaacaggccacaccgagctccagtgccccggcctccccgggcacctggctcttcggcatgaatcccgctcagcagctgggctcctccttttcgacgcttgctggttccgtttccggttggttcaatgatcgcctggcagctgccggacagcagttgcccggtttggtggaaaccccggtgagggagtcaaccacaagcaccagcaccaccacatcaacgaccacccagcgcccagacattgtggtgcgagtacagcagcgtccccaaaggaatggcaaccgcaatggaaaccgcaatggcaatggaaacctcaatggtggaaacctgaacaacaacaggcgtcgtcagcgacctaaccgcttcaataaccgactggactccttcgaggacgactactacgaggacgattacttccagggcaaccgattcgatgacgagttcgacgacgatgaggacgagcaaagcctggagcaattcgaggatgacgattccctggagctgcgtcctcagcaaaaacccaagcgcaaacagacccaggtgcagacccaaaatcagcgcaggaagttccagcaagaggagcaggtgatcagccagaagcgccgccaatcggtgacccagaacaagaagcccaaggttcagaagaagccagttcagccggtggttgaggagtcacaggatgaggaggaattggacgatgatgagaacgagaacgacgatgaggaggaggaagagcaggtccaggaggacgacagccaagagcaggactttcagccggagccgatctatggctccagctcctcgtcgactaggcgcagccaaaaccagcccaatttcatccagcgcggccagcagagcatcatcagtcagattaggcagttcacccgaggtcagacgcccggagaactggctagcacgctgcaccggggtccctcctcgtcatcctcgggctcttcgaagacccgtcggccgcagcagactacgctcctggtaaaccgcaatggacagaccgtttacgtggctcccgagctgctgggcctgaactctccctatccctacgcttatgtccagggtcagacgaagaaacaaagggttcccatcaacggtgcattcccacagccaccactaacggtgccggtgaggcgtcaaggtcgtcccacccagtacatcacgataccctggagccagctgggactctcaccgcccgaccagcaatcagtcgtttccctggccgaaggcatccaagctcagcccctcattctgaatattccgcagagcgccattagtccggtgcgtggtggtgccagctcgagtggccaaaagaaaaagcgcccccagctgaccgcctcggcggttccccttttggctgacgcctcacttatggacatcttccagcctccccagatcccgccctccagaaccggttcatcatcttccggatcctccatcaaaccgatctccgcccagcccgtcctgattgccgctaagcccgtaaaggctggtggagtgggtaccactggactgctacccactcgcattcgtccaggaacgattgtagagaaggcccctgctatggaggcaatggagaagcccatggaggtcaacgagatgaagcaggagcaggaggtgatggccacggagccagctgcttctgcgccacaaacggcagccaatggatccgagcagcaggagttcatcttggttggcgatgatgatgagccaggagtctcgcgacatgtgcagccagctttcggggatgcccgctatgtgtcctacggcgatttccatccgtactttgatctgctgacgcaaaacaggcgattcgcgcttaggaagaccggcaggtctttggagattcccgaagagcaggtggcccccaagggagacttgcagaaggaggagaagccaaaggaggaggagcagaaggagaagcttccaaaggaggaagttcagctagaggagattaagaaggaggagccccagaaggaggagctccagaaggaggagccacaaaaggaggagccccagaaggaggagccacgaaaggaggagccacaaaaggaggagccacaaaaggaggagccacaaaaggaggaacccaaagtggaaaccccacagcctctggagcagtcaaaactgccagcctaa

SEQ ID NO: 6849 - protein, 773 aa, DROSOPHILA
MAPKTPTEKPPIVQEAAMVVDAQEKSAQVAPQPHTVADFIIHPLIAFKPRQASLEEIQGKQATPSSSAPASPGTWLFGMNPAQQLGSSFSTLAGSVSGWFNDRLAAAGQQLPGLVETPVRESTTSTSTTTSTTTQRPDIVVRVQQRPQRNGNRNGNRNGNGNLNGGNLNNNRRRQRPNRFNNRLDSFEDDYYEDDYFQGNRFDDEFDDDEDEQSLEQFEDDDSLELRPQQKPKRKQTQVQTQNQRRKFQQEEQVISQKRRQSVTQNKKPKVQKKPVQPVVEESQDEEELDDDENENDDEEEEEQVQEDDSQEQDFQPEPIYGSSSSSTRRSQNQPNFIQRGQQSIISQIRQFTRGQTPGELASTLHRGPSSSSSGSSKTRRPQQTTLLVNRNGQTVYVAPELLGLNSPYPYAYVQGQTKKQRVPINGAFPQPPLTVPVRRQGRPTQYITIPWSQLGLSPPDQQSVVSLAEGIQAQPLILNIPQSAISPVRGGASSSGQKKKRPQLTASAVPLLADASLMDIFQPPQIPPSRTGSSSSGSSIKPISAQPVLIAAKPVKAGGVGTTGLLPTRIRPGTIVEKAPAMEAMEKPMEVNEMKQEQEVMATEPAASAPQTAANGSEQQEFILVGDDDEPGVSRHVQPAFGDARYVSYGDFHPYFDLLTQNRRFALRKTGRSLEIPEEQVAPKGDLQKEEKPKEEEQKEKLPKEEVQLEEIKKEEPQKEELQKEEPQKEEPQKEEPRKEEPQKEEPQKEEPQKEEPKVETPQPLEQSKLPA

SEQ ID NO: 6850 - DNA, 3955 bp, DROSOPHILA
gcaggaatccaaaatatatcgaaatcctgaaatcctgtgcccacccactcgttaatttgctaattaactgtgcccgcactttcgttattttcactgttctctcgcttgtgtggcttatttgaccgttattccgttaatcgtgccaaaagtcaaccgttaattcgcgctggctagcacttttcgtccttttttctcgctcagcaatccgcagcacatcctttattgattctttccagtgtgcccacacacccacacaccaacacacactcacacgctgctcacacacacagccgtgggccacctcacacacagatacacatgcacatgcaggtatagacacatcttctcctgcaaatcgcgcagttcagttcgaaattaattggaccgcaaccgtgccaatcgattcgatttttcactcgactcgcttttcacgcgctggcaaggatctgctgggctggaaaatccctcgttcgacgccctaatgcatgcctcttttcattcaggtctctcagaattttacacaaatatcgaacattccaaacactttgcagtgtgtccataccgtattgaaaacaatatcctaagatagtggtactaccgtatttggaagtgctgtaatatggggctgccagactgtgcgcatactcctgaaactccaatcagaacgcgggcaattcaaaaagttaataccaaaaaaaaaaaaataccatgtttgacagtgaagaataaagaaaaataaaattaattgggattgcttaagaaaattttttgagaaactttagattctacaagaaaagagcttcttaggaacgaatattttaaaacaagatctggtagcacaactgacaataggtttttaggattctaatagccatggtcctagtctcagtagtattcacatttgtaatataattttatattttataatataatttatagtcttaatatttatttattttaggagctccaacaattagcacttttgcacagtaatttttagcatattctgcggtattttctgataaattgaaaccgcctctatgctggtcacacttggccttctcgtcgaaccgaaattataaaagacaaaagtgcagctggtcgaaagttgcattaacgaaacttcgatagtattaaacactcggcattcggcagctgtgagtatgaatcaaatcaggcgtaatcaagcaatcatattcgataaaataaacgaactgaactcccaaagggcgctgccctatgtgagtgtgcgtgtgtgttagtgtatgcgtatgagtcagcgtcggcagcgcgcaaatgaaaacaattgtttttgtgctataattccatttaaatgtccattcgaaagtgataaatcaacgaagtcgcaaacatttggcccaacttgagttctcgagtgaatttgggtgcttcaactgcggtttttttctggccttttaaggctttaattgaaatgcgtgtgccagtgtgtgtgagaatgttttcaatgagccaaatacgtgtgcgatgttgtttttgttaaccgcagttcaacagcattgataaactcgcatacacatgcacgcactggcgcagagcgagagcgaaactcccatacgtgtcattttcgtttgcgcgagtgactcagagagctgcgcatgtgtgcgtgcatgagtcgtactcacagtgggcgcccgataaggtggacttgtaactgtagcggaagcatggagccatcgaactgcttttgcattatcctttctggcctaaaactgtattaaaactatttatttataaatataatttgtagttcgcccattttaggcaatggccaaaccttcattccttaaaaaaccttaaagagcagcaataagatgttctttccgttgtgataagcatatgcatggtgtactcactgtagcgagcgtccactgtatgttgacacagtttgtttggggagcaatgaaaatcggtttcagcggaattcgctgcaatatgtctatatatagccataaatacatacccggccaacgaaatgctaatgtgagtcggcgtttttcgatttcagatccacgccgcacacacatcactccagcgcgaagcactagtgccaccagctccataggccggctccatttagctccattaaccgcatcagaaccaccaatccaacagcaaccatgtcatcccgtaagaccgccggacgtcgcgccaccaccaagaagcgcgcccaacgcgccacctccaatgtgttcgccatgttcgatcaggcgcagattgccgagttcaaggaggcattcaacatgatcgaccagaaccgtgatggcttcgtcgagaaggaggatctgcacgacatgctggcctcgctgggcaagaacccaacggacgactatctcgatggcatgatgaacgaggcgcccgggcccatcaacttcaccatgttcctcacgctcttcggcgagcggctgcagggcaccgatcccgaggatgtgatcaagaacgccttcggctgcttcgacgaggagaatatgggcgtcctgcccgaggatcgcctgagggagctgctgaccaccatgggtgatcggttcacagacgaggatgtatgttgtcaagttgtttacgatatcaagtcggagtgtgcccttacaacttcttttccatttacattcacaggtggacgagatgtatcgggaggcgcccatcaaaaacggtctgttcgactacctcgaattcacgcgcatccttaagcacggtgccaaggacaaggatgagcagtaagatcgccagcagtcgattcactagccagctgcctctccaatcagcctgtccaaactatccatcatgagtttcgttttgataatttaatatatacaagtataaatattttttttttttggtttcgcgccttctgttctttgattcctgataatcctgtacttatccgtgcatttgaattaaacaaaaagtagccaacaccagcgattgttatgtacgacagtgtagtgtgtgagatgttggtgccagataacacgatttcccgaaaaactcctttcataagtattaactcattgaatatacatatatattacctatatacaaatacatacttatacaagaatgtggcaataaacctttgtttttcttacactcgagaacgtgcgcacgtccaaccaaacagatgtctgcagaaatccttcagccaaaagcaactgatcaaacaagggaaactttggaatatgtaccccccatggctaattaagcatgatcactagcacgatgtgataagtgtatgtagcttcaaatgtggcgggaaattgaaagagatttcggaaattagtcaaaattttcttggaatcttcgacaagctgactaatgagttcatgtccaaaagactcgaacttgcaaactcatatcttatctcacattatttttgattcgaagatatttcagcttctgcaaatatatgtttttcaagaatttatttaaaaaaaaatcaattaaatagatggcttaatgttcgaaacactcaacgttgtatattacacactttttggacaactattaatttaaaagaaaacacgaacatttgaaaatctagaaagacacggacacaagaattacaaaccagacaaagaggcgtctaaacactaggcaaattctatgtacaaacaaggcgctacgactacaaattaatggttaatggttaatggcctctgcagcaggaaccatcacagcccgcgaagattactccaccttcttggccagcggagcggtgtcgaagtgggtcttccggctcgacctggcccgataggcgtccctcacctggttgatcacattggcgaagagtattgtgccgaagaataccaggatggtgcctacccaatggtttagggtgaatggattccggaaataaatgatcgagaacagcagcgagacgaacttgcgcagggtgaccaccagcgttacggttagcgat

SEQ ID NO: 6851 - DNA, 992 bp, DROSOPHILA
catattctgcggtattttctgataaattgaaaccgcctctatgctggtcacacttggccttctcgtcgaaccgaaattataaaagacaaaagtgcagctggtcgaaagttgcattaacgaaacttcgatagtattaaacactcggcattcggcagctatccacgccgcacacacatcactccagcgcgaagcactagtgccaccagctccataggccggctccatttagctccattaaccgcatcagaaccaccaatccaacagcaaccatgtcatcccgtaagaccgccggacgtcgcgccaccaccaagaagcgcgcccaacgcgccacctccaatgtgttcgccatgttcgatcaggcgcagattgccgagttcaaggaggcattcaacatgatcgaccagaaccgtgatggcttcgtcgagaaggaggatctgcacgacatgctggcctcgctgggcaagaacccaacggacgactatctcgatggcatgatgaacgaggcgcccgggcccatcaacttcaccatgttcctcacgctcttcggcgagcggctgcagggcaccgatcccgaggatgtgatcaagaacgccttcggctgcttcgacgaggagaatatgggcgtcctgcccgaggatcgcctgagggagctgctgaccaccatgggtgatcggttcacagacgaggatgtggacgagatgtatcgggaggcgcccatcaaaaacggtctgttcgactacctcgaattcacgcgcatccttaagcacggtgccaaggacaaggatgagcagtaagatcgccagcagtcgattcactagccagctgcctctccaatcagcctgtccaaactatccatcatgagtttcgttttgataatttaatatatacaagtataaatattttttttttttggtttcgcgccttctgttctttgattcctgataatcctgtacttatccgtgcatttgaattaaacaaaaagtagccaacac

SEQ ID NO: 6852 - protein, 174 aa, DROSOPHILA
MSSRKTAGRRATTKKRAQRATSNVFAMFDQAQIAEFKEAFNMIDQNRDGFVEKEDLHDMLASLGKNPTDDYLDGMMNEAPGPINFTMFLTLFGERLQGTDPEDVIKNAFGCFDEENMGVLPEDRLRELLTTMGDRFTDEDVDEMYREAPIKNGLFDYLEFTRILKHGAKDKDEQ

SEQ ID NO: 6853 - DNA, 4585 bp, DROSOPHILA
gatttgcaatattgtatatagtctcagaggtaagtattagatcgtatttcgccacatcccttgatagttcagcaaaatgagaccaatctccagaatataaggttgtactgttgtctaaaaatttcagcttttcatcttcagataaagagtcgtccaaatttagcaggatatttggatatgttatgtattccagcacatctttgttctgaaaatatatgattgcaaccaaactatttcaagacttattgtttgcttacgtagtcctgaaaatccacccgtgcgccgtgtttcatagcatatatacccagcaatccgcagccacatcccaaatctaggactcttttctccttccagaatgagtcctcgtacttttcggatagatatagtagaagatcttcagtgcattcccatattttagcaccgccctcgtagacaccggaaatcagatctgaatgattttcctcagacttcctgagatccaggtttaccaagtgggattgctcctttaaatcctccagcagaaacccggccacaagatgttttatcgtcatctttcccacctccatttccttggcgttaagctcatagaaatccattgccgaaattaggttatccagtggttgtactttctccgaattgtaccaatctatatcctttgtgatacccgactcacgttcttctgaattttcctgcttgctaaaaatatcatttttaacggcctctggatcttccgaggattccgccttcacatcaaaattaaatttgaacatgcttagaaggtagggtgttgaactgttttgattttagcagatactgcttgttaaatatcgtactgaaatggacaaattagcattgttaaactggtaatctatgaaatattttaatatttacctccttaaatcagctgtcggcaaaaaccacgcttttcgtactaagatcgccctgtcctttgcgttgccagcttgatttagggtctcgcattttcatatcgaatatatcgatatgtctcggtggtacaaaaatatcttgtcgcgcatcactagaattgtggtttataaaaaaatttcggctcggtttgggtttttaaagattaatttaatttatggcggaccagttgaacaacgaggtgagtttgctgcgaaacccaatcggcaagacatctattgaatgccaatccttccagcccggccaacccacgccgctcatgtccattcgcttcgaccagcagcagcacgaaagtgcggcggccaatggaaatgagaacggcaatggtaatgccaatggcgacggcgatgcctccgaagatgctgttgatgccgaaaaaacgcccggagaactggtcctgcccaaggccttggaggacgttctggctttgaaggatcaaagggcagccgagttcacggtggacgccgattcgcagggtggcagtgggggtgctacccaggacggcgacgaagcggatgtgggcgaggacagcgaggaggatgcggataaccaggtgaacgggagtgccagccaaaagaccggcaagcagagcaaggcggagcgtaacaaaaagaagaagaagcgaaagaagcagaacaggaagatacgccaccagattgagttcgcacggcagcagcagttggcccaagcggaggagaacgaaccggaggccaaggactcggagacaaaagcccatggcagcgaggacgaacaggttgccgaaaaggaaaagaaggacaaacgcaaagagagtcgcagcaagcgcaggaaggatcgtagtgatgagaaagatacggacaaaaaggctggcgaggccaatgatgaaaatgtgaccattgagtaagtcatagcagctcgttccgaggaaccacactaataaactcttatccctttcagatatgtgcccgaaaagataaccattgccgatttggcgccaatgtaccgccagttttatcgtgtgttcgaaatcttcaagctggaaaacaaaccaaagcctgtggagaaggacaaatcttcgcacgattctgagtcccatcccagggacaaaaaggctacagacaaacagctcgaggacgaggacgatgacggcgatgatgacgaagagcgcaaggaagacaaggagaagctgtccaagcggaaacttaagaaactgacccgtttgagtgtggcagaactgaaacaactggtctctcgacctgacgtagtggagatgcacgatgtcacagcgagagatcccaaactactggttcaactgaaagcctataggaacacagtacaagtgccgcggcattggtgcttcaagcgaaaatatctgcagggcaaaaggggtattgagaagcctccgttcgatctccccgccttcatcaaaaagacgggcatcatggagatgcgcgaatcgttgcaggaacgagaggacgccaagacactcaaggccaagatgcgtgaacgcgtccgtcccaagatgggcaaaattgacattgactaccagaaacttcacgatgccttcttcaagtggcagaccaagccccgcatgaccattcatggcgacctctactacgagggcaaggagtttgagacacgccttaaggaaaagaagcccggagatctctccgaggagttgcgcattgctctgggaatgcccgtgggacccaactcacacaagattccgccaccatggctcattgctcaacagcgctacgggccgccgccctcgtatccgaatcttaaaattcctggcctgaatgctccgatcccagacggaacctcgttcggttatcatgccggaggttggggcaagccgccagtggatgagaacggaaaaccgctgtacggtgacgtatttggaaccaacatattggaccttgatgtgagtggcaacattcgcgtagcacttcttgttttaatgtcattgtttttttatagaatggcgtagacgaagctgacattgaacgtaaccaatggggcgaactggaatcggagtcagaagaatcatccgaggaggaagaggaagatggcgaggacttgggcgatcagcaggatgagactggcctggtaacgccagtagagggactagtaacaccctctggactcaccagtgttccagctggcatggaaacccccgagaacattgagcttcgcaagaagaaaattgaagccgagatggaggagtaagtgaactaatatttttaaaataacatcacgattaagcccattattccaacttctcctagcaacgaaactcctgttctgtatcaagtgctgcctgagaagcgcaccgaccgcataggggcttccatgatgggatcaacccatgtctacgacgtcagtggcagtggggctaacaaacagcccccagttcgatcaaccacagatcgcgagggcattgtggaactggctctcgatcctagcgaattggacttggacaatgacgcaatggcccagcgttatgagcaacaaatgcgtgagcagcagaatcacctgcaaaaggaggatctgtcagacatgttggccgaacatgtggcgcggcagaaatcgaagcgcaagcgacagcaaacggatccggccaagaccacaaagaagtacaaggagttcaagttttagtttgacaacaagaaatacaacttttccatttgtgcgattgtcaaggatgtcattaaacatagtaaaaactacaataagttcgcgtcattcaatttaaatgcgaggatttaaaataggttctgcaaaaagtgaagttaacacaaaagatcttatcttgtaatttctatcgtaatttgtttattttgatgcagaatcaaaatcatttgcgtataacttaaaatttgactcgttaggtttaattctcatttatacattgaaacttattgagactaagaaattacaattgtggttcgctgtgtggtttgtgctgggaccaggacagtatctaaaccaaacgaagcagagtgcagtggaaggcaaggactgaaaagagaacttgtccagcaactgagtccagggctagctacctctcccgatcctccttaagctagagctagagagtgccacacgatgtcgatgtcggctttgactcaacgcctgtcagctggtcactcgtcgagctgctcgctgagttgggctagaagagccgctcgcttcgattccagctcgccgtcacttaacgtcagctcctcgtttcgcgatccagacgactcgacggactgggcaggactaaggggcgtgccggatcgattgtgcctgttgtgtcgcttgtccttcttagctcgcttctccttcttctttttctttgcgggtgagtgcgagtttgagtcgttctgaagtagagcttgagttcccggcgattgaatgcctggaacatccgattcgcaggaggactgaaatgtaagccatgttagatagtatagttgtccaaggactgggccgacttgctacgtacacctcgcagtttgttcttgcgcttctttttcttcttcagcaatttttcgctctcgatgctgccaattgaggtcagggaatgctgtatgtgcgtgacgttattatttaacttacaagttgcatttaatgttatgtttagcatactaaccgatcgtgtcttggagcg

SEQ ID NO: 6854 - DNA, 2352 bp, DROSOPHILA
atatgtctcggtggtacaaaaatatcttgtcgcgcatcactagaattgtggtttataaaaaaatttcggctcggtttgggtttttaaagattaatttaatttatggcggaccagttgaacaacgagcccggccaacccacgccgctcatgtccattcgcttcgaccagcagcagcacgaaagtgcggcggccaatggaaatgagaacggcaatggtaatgccaatggcgacggcgatgcctccgaagatgctgttgatgccgaaaaaacgcccggagaactggtcctgcccaaggccttggaggacgttctggctttgaaggatcaaagggcagccgagttcacggtggacgccgattcgcagggtggcagtgggggtgctacccaggacggcgacgaagcggatgtgggcgaggacagcgaggaggatgcggataaccaggtgaacgggagtgccagccaaaagaccggcaagcagagcaaggcggagcgtaacaaaaagaagaagaagcgaaagaagcagaacaggaagatacgccaccagattgagttcgcacggcagcagcagttggcccaagcggaggagaacgaaccggaggccaaggactcggagacaaaagcccatggcagcgaggacgaacaggttgccgaaaaggaaaagaaggacaaacgcaaagagagtcgcagcaagcgcaggaaggatcgtagtgatgagaaagatacggacaaaaaggctggcgaggccaatgatgaaaatgtgaccattgaatatgtgcccgaaaagataaccattgccgatttggcgccaatgtaccgccagttttatcgtgtgttcgaaatcttcaagctggaaaacaaaccaaagcctgtggagaaggacaaatcttcgcacgattctgagtcccatcccagggacaaaaaggctacagacaaacagctcgaggacgaggacgatgacggcgatgatgacgaagagcgcaaggaagacaaggagaagctgtccaagcggaaacttaagaaactgacccgtttgagtgtggcagaactgaaacaactggtctctcgacctgacgtagtggagatgcacgatgtcacagcgagagatcccaaactactggttcaactgaaagcctataggaacacagtacaagtgccgcggcattggtgcttcaagcgaaaatatctgcagggcaaaaggggtattgagaagcctccgttcgatctccccgccttcatcaaaaagacgggcatcatggagatgcgcgaatcgttgcaggaacgagaggacgccaagacactcaaggccaagatgcgtgaacgcgtccgtcccaagatgggcaaaattgacattgactaccagaaacttcacgatgccttcttcaagtggcagaccaagccccgcatgaccattcatggcgacctctactacgagggcaaggagtttgagacacgccttaaggaaaagaagcccggagatctctccgaggagttgcgcattgctctgggaatgcccgtgggacccaactcacacaagattccgccaccatggctcattgctcaacagcgctacgggccgccgccctcgtatccgaatcttaaaattcctggcctgaatgctccgatcccagacggaacctcgttcggttatcatgccggaggttggggcaagccgccagtggatgagaacggaaaaccgctgtacggtgacgtatttggaaccaacatattggaccttgataatggcgtagacgaagctgacattgaacgtaaccaatggggcgaactggaatcggagtcagaagaatcatccgaggaggaagaggaagatggcgaggacttgggcgatcagcaggatgagactggcctggtaacgccagtagagggactagtaacaccctctggactcaccagtgttccagctggcatggaaacccccgagaacattgagcttcgcaagaagaaaattgaagccgagatggaggacaacgaaactcctgttctgtatcaagtgctgcctgagaagcgcaccgaccgcataggggcttccatgatgggatcaacccatgtctacgacgtcagtggcagtggggctaacaaacagcccccagttcgatcaaccacagatcgcgagggcattgtggaactggctctcgatcctagcgaattggacttggacaatgacgcaatggcccagcgttatgagcaacaaatgcgtgagcagcagaatcacctgcaaaaggaggatctgtcagacatgttggccgaacatgtggcgcggcagaaatcgaagcgcaagcgacagcaaacggatccggccaagaccacaaagaagtacaaggagttcaagttttag

SEQ ID NO: 6855 - protein, 734 aa, DROSOPHILA
MSIRFDQQQHESAAANGNENGNGNANGDGDASEDAVDAEKTPGELVLPKALEDVLALKDQRAAEFTVDADSQGGSGGATQDGDEADVGEDSEEDADNQVNGSASQKTGKQSKAERNKKKKKRKKQNRKIRHQIEFARQQQLAQAEENEPEAKDSETKAHGSEDEQVAEKEKKDKRKESRSKRRKDRSDEKDTDKKAGEANDENVTIEYVPEKITIADLAPMYRQFYRVFEIFKLENKPKPVEKDKSSHDSESHPRDKKATDKQLEDEDDDGDDDEERKEDKEKLSKRKLKKLTRLSVAELKQLVSRPDVVEMHDVTARDPKLLVQLKAYRNTVQVPRHWCFKRKYLQGKRGIEKPPFDLPAFIKKTGIMEMRESLQEREDAKTLKAKMRERVRPKMGKIDIDYQKLHDAFFKWQTKPRMTIHGDLYYEGKEFETRLKEKKPGDLSEELRIALGMPVGPNSHKIPPPWLIAQQRYGPPPSYPNLKIPGLNAPIPDGTSFGYHAGGWGKPPVDENGKPLYGDVFGTNILDLDNGVDEADIERNQWGELESESEESSEEEEEDGEDLGDQQDETGLVTPVEGLVTPSGLTSVPAGMETPENIELRKKKIEAEMEDNETPVLYQVLPEKRTDRIGASMMGSTHVYDVSGSGANKQPPVRSTTDREGIVELALDPSELDLDNDAMAQRYEQQMREQQNHLQKEDLSDMLAEHVARQKSKRKRQQTDPAKTTKKYKEFKF

SEQ ID NO: 6856 - DNA, 2750 bp, DROSOPHILA
tattagccagctgccggagttggacaaaaactgaaaaaccaaaactggacagcagctttctttgtgccgttgcctcgtttgaatatgaatctttgaggcctgaccccgttgaacttctcctgcggcacattcttatggaaattaagtttgcgtttcttttattttagaaatttttcgcagcagtttccgcagcctgttgccaagcggattttactgtgacttcttgaatgtcttgaataaaataagtttgcataaaattgacccaagtgcttgtggatttcatttttttggggggagaaaatcgatttcaaattagcggatttatgaaatatatttaagaccgtttagcgaatttatatacaacatacatatatgctaatttttggatgacccaatttggcccaacagttagtaagagttaaaaattgaagaccacaaaaacaaaaattaatttatgcgttcccacaaactttgaaaccaatttccagatctagattaaaaaaaaaaaaacagttactaaactctgtactcttcgaacttggaaagttaaaagtcttttttaggcattacaaaatgatctaacattttggaaattatatttcactatgaatatttatgaaatgagataatatcggtatatattaaaggcacagttcctaaattgctggagggaataaactattctattttctaaaaatacttctttgatctttttaaatttttgccgatgaatttcaacctgttgaaaattaataaaaagcgaaatgaatagaaatttaagaatatagaattgactttggtaaatatattccagtttccagtgggcagctataaaaaatggttaaaggaccgaggcaaatattgcatttgaacactcatattattatccaaactatttgcaaataataattagtttaaattagtcagaatggccatgactgcaatatcacttttatatctaaaagctgtgaggtaaaaaaaaaaaaactcaaatctggaaatgagtcaaggggagaacgcaaccactgcaaaattggttttctatgagttcgcatggccacttttggtagccgttttcgaggtgaacctctacaggatcattctggagcttttggcccacatcctgctgatcgtaataaccgtggtgatggtcaaaaagacctcgggtttggatgaccacagcagcggccagcatgccctatacgccattttgggactgtttctatgcgtgggtgaatctctgttggtatgccactcctggtggttaggagacttcatctccgaaaaccggctcaaccttctgcacatggtattgggaatggtgggactttggctgggactggtggggatattcgcgaagagtatcttcaagagcaagatacatgagccgcactttaattccaaacatggattgtgtggccttttgggattcctgcttatcgctggggccgtggccagtggtttcgccctggtgtgcttcacccacctggctctgcacgtcatccaccgattgatgggcttgtgtggctttgtgctcctctcgtgcagtcagtggttcgccctcaatttgggattcgcacgacgggagtggagtagttggaaaattaaaaggctcaggatctccacgctggccgccaccatttcagtggttagctacgagttcctctgcctctgtagagacattgtccatttgctacccaacagctggttcaaagccatcggattgaaaattgatcaccttcacaattaaattttatgaccaagcattgtgaataattaaattgaagtgctgaaggcaattgcaaaatgtttatattttctaagccctaccatataaaaaagtaaatcacacaaaaattacatttataggaattctattcagcatgacagcaaatatttggaagatcaagtgaagtttgttaatcaatttcgaaagaaacattagcatactttctgactttcaactgagaaatcccttggaaaacaaaaacactttaatatctatgcttgctatttggtcatattgcagtatgcctaagattttaaacaagtttcaacattgtttaattaagaaataataaattccgtgtcaaaaattgtagatttattgcacgactaaagaaaacagtaaaattacagagggctcgcatgtgaaatattggccaaccttcagtctttcacctgtacaattggccatttccacgcataagaagcctcttggctggcatattaatcacgggacaaaggcataattccatcccaacgtggctcgatcaatcagcgatgctggaatacacatttgccccctataccatacacccctttcatcgatattcacattggtcattgggtatatgaccggtggccggggatgggatacgaccacttcgcatgcgtcgctgactccgagagcaggtccatcataggttcggatcggcccttgacttctcgggtttctcggtctcttgggatgccgagatttgtgcgtgtctctgattgttttgtcattagcatgaccgcggcgcttttttttttttttgggcctttggtgtttttggtgatcttcgactttttgattcggcggctgctgatttattcagcgctctttcttttgtcccaccggcgggtcactgacattcgtttctaattctatttttcaccattttctacatttcttccacaaaatttcgccacttgaaattatgccgacatcgaccgcaattatgaccaatgttcttgtggcctgagtg

SEQ ID NO: 6857 - DNA, 750 bp, DROSOPHILA
atgagtcaaggggagaacgcaaccactgcaaaattggttttctatgagttcgcatggccacttttggtagccgttttcgaggtgaacctctacaggatcattctggagcttttggcccacatcctgctgatcgtaataaccgtggtgatggtcaaaaagacctcgggtttggatgaccacagcagcggccagcatgccctatacgccattttgggactgtttctatgcgtgggtgaatctctgttggtatgccactcctggtggttaggagacttcatctccgaaaaccggctcaaccttctgcacatggtattgggaatggtgggactttggctgggactggtggggatattcgcgaagagtatcttcaagagcaagatacatgagccgcactttaattccaaacatggattgtgtggccttttgggattcctgcttatcgctggggccgtggccagtggtttcgccctggtgtgcttcacccacctggctctgcacgtcatccaccgattgatgggcttgtgtggctttgtgctcctctcgtgcagtcagtggttcgccctcaatttgggattcgcacgacgggagtggagtagttggaaaattaaaaggctcaggatctccacgctggccgccaccatttcagtggttagctacgagttcctctgcctctgtagagacattgtccatttgctacccaacagctggttcaaagccatcggattgaaaattgatcaccttcacaattaa

SEQ ID NO: 6858 - protein, 249 aa, DROSOPHILA
MSQGENATTAKLVFYEFAWPLLVAVFEVNLYRIILELLAHILLIVITVVMVKKTSGLDDHSSGQHALYAILGLFLCVGESLLVCHSWWLGDFISENRLNLLHMVLGMVGLWLGLVGIFAKSIFKSKIHEPHFNSKHGLCGLLGFLLIAGAVASGFALVCFTHLALHVIHRLMGLCGFVLLSCSQWFALNLGFARREWSSWKIKRLRISTLAATISVVSYEFLCLCRDIVHLLPNSWFKAIGLKIDHLHN

SEQ ID NO: 6859 - DNA, 2753 bp, DROSOPHILA
agaacggaaattcaaaatgttcgctgctgcaatggatttaattttttatttcggtcttcgggagtgggtcctgttcattaggcctcgacgacctttgggtggtagccggtttcatcggcggtgtagaccactttgacggtcttgccgttgggggccacgtactcgtactccccggaaaccacccagttgtcgtgctccttcaaggctccagtttgcacggcgcgaatatggttggatagctcataagcgtagttaaagtccagcaagttaacctcggagtcgctctttacaacatcagcctcctcgttggcgaagaccacggccaaaaggcaggcaagaacgatctaaaagacaaatcgttgttcagaggtccccaaaatctaatttcgatgccacttaccacaaacttcatggttggaaaggggatgtgtgtgctgatagatagcgataaaattttgactgctggttgccgaaaattgcgcttttatatgtagctctccactgacattttaccggccggaatcaccaactgcataaattttcttcataactggctcccagcggtcgtttgtcttaattaaacaaaagacatagatgcagtcattctgcaggcattaattatcgccccactcggcatatcatattcggggggttatctttggagatctgtgcggaagattcccaaaacaaccacgttcatcaattgtcagcaccgcacgattaatttttagctgataagagctaaccggttccttcgatgctaacgccgattagcattattttcgcataactccattagcagtctgattttgctcccgcagttgcaaccggtttctaacaagctgcgattgcaatatggcctgggatttgaatttcttggcgcgcaattagccagtgctggaaaatgtctgggaccgcacagatttgccattcagagggaatcccacgtggtggtgtctgcgtatcggtgtgcactgcaatctcccccagaaatatcacgatggccagtgattctggcagcgattatgaggtggaggctttcttcaatcccaagcgagttcaacgcacagtcaacgacgacagtgcggatctattgggaaacttcgatgaccagaagcgaagggagatcttcgagggcacgtatgtggacaaggaggacggacggaatcccagtgacccggaggatagtaagagcgaggatgaggccaagtccgacgacgaggcagccgctgagggcagtgctgcttccggagccgaggaagaggaatctgcggaaaatgggcagataaccagtgaccagctgagttcactgcttcgaggagcctccaaaaccaacagacacgtcctgtacgtgacgaacctgaacttcgaaaccacaaaggacgacctggagctgcacttctctgcggcaggcacggtcaagtctatccgcattcccaagaagcgacgagggggcttcgcctttgtggaaatggccgacctaagcagtttccagaatgccttccagctgcacaacacagagctgcagggacgcaacatcaaggtgcagatctccgaggcgggcaagaagaagtcggccaacaagaagaacatcatcaaacagaagaaccgaaagctggccgagatgcgcaacgagcagaagaccttcacgaagagcggcaagttttacgacaaggacctgaaaaaggagaaggccaaggaaatgctggcgcgaaagcggtggcgcaaaaagcccgcccccagacccacataaatagcataagttcttacaatgtaagccattctatgattatttaacaacaattaaaagttaacattaccggataagaggtttactgttaactattgccagcgcacaatatagaagttgcgtttgcccacgcgcagcagagaaattccgttgcgcaggatgtgcacgcccgtagttagcacttcggcgatattctgcacccgcttctggttaacgtaaaatccgcctgcgtttataatgcgtacagcatccgctaaagagtgatcacaaatcgattatgccccatatttccaaagagaaagataacttactctccgtgggaaagcacttcgccttcatggcgagctctaggatggacattcctggctcggtcaacaggttcaccatagtagcaccctgaaaagtctgctggatctcggaaaggttgagttccgctaaaccctccacgttgcctttgtataaggcattggtcacacgttccgcctgcttcagcccactttctgtgaattgaaaacttctatactactgatataaaggaacaatgatatagagtacaacctccatgaaccagcagagtcacgtcctcagccagcagagtctgcgccttccgcttctcgggctccttcgtgtgctcccgcatcaactgctccacctggggcagcgggatgaaggtgaacagcttcaggagcttttcgacctcggagtctggcatgcgcaggaaaaactggtagagggcgaaaggcgaggtcttgttaccgtctagccacactgcattgcctgccgacttgccgaacttatcgccctcttccgtcgtgaccaatggcagggtgagcccgaagacctctcgctttcgctctacgcggctaataagctcgtgtccagtcattaaattgcccgtctgatcggagcctcccatttgaaagcagcagttgtggcggcgcagtaggtgcagccagtcgtaggcttggaaaatctggtaggtgaactcggtgaagctcattcc

SEQ ID NO: 6860 - DNA, 753 bp, DROSOPHILA
atggccagtgattctggcagcgattatgaggtggaggctttcttcaatcccaagcgagttcaacgcacagtcaacgacgacagtgcggatctattgggaaacttcgatgaccagaagcgaagggagatcttcgagggcacgtatgtggacaaggaggacggacggaatcccagtgacccggaggatagtaagagcgaggatgaggccaagtccgacgacgaggcagccgctgagggcagtgctgcttccggagccgaggaagaggaatctgcggaaaatgggcagataaccagtgaccagctgagttcactgcttcgaggagcctccaaaaccaacagacacgtcctgtacgtgacgaacctgaacttcgaaaccacaaaggacgacctggagctgcacttctctgcggcaggcacggtcaagtctatccgcattcccaagaagcgacgagggggcttcgcctttgtggaaatggccgacctaagcagtttccagaatgccttccagctgcacaacacagagctgcagggacgcaacatcaaggtgcagatctccgaggcgggcaagaagaagtcggccaacaagaagaacatcatcaaacagaagaaccgaaagctggccgagatgcgcaacgagcagaagaccttcacgaagagcggcaagttttacgacaaggacctgaaaaaggagaaggccaaggaaatgctggcgcgaaagcggtggcgcaaaaagcccgcccccagacccacataa

SEQ ID NO: 6861 - protein, 250 aa, DROSOPHILA
MASDSGSDYEVEAFFNPKRVQRTVNDDSADLLGNFDDQKRREIFEGTYVDKEDGRNPSDPEDSKSEDEAKSDDEAAAEGSAASGAEEEESAENGQITSDQLSSLLRGASKTNRHVLYVTNLNFETTKDDLELHFSAAGTVKSIRIPKKRRGGFAFVEMADLSSFQNAFQLHNTELQGRNIKVQISEAGKKKSANKKNIIKQKNRKLAEMRNEQKTFTKSGKFYDKDLKKEKAKEMLARKRWRKKPAPRPT

SEQ ID NO: 6862 - DNA, 3242 bp, DROSOPHILA
aatatagattatatagataaacgtgtaaacctaacataataaacagaactttttacaaaaaatatatatttcaaataattattttaaacgaaagcaatacattttaaagtccttagcaaaagttggacttactaaaagttggaccccctgttgtattttttcaatgccccactctagatcaaggattagcaaacagtgcgataaggggagctattgattgtggaacggcagcgatgacattcccactaggtcgaactggggtgttactaaagtgcctgacttggcagaattcccgatcacgtttctgccgcatgataccgtcttttaatttaggggctggtaaaaaaaagcgcagggattccttatctcagggttctctaaagtctacccacatatctctaatatagattataccaccaagtctgttctaatttatattacttttttaaaaattcttaatattcctatgctaatttttgaaaaccatctataagctttttagctctcattattatctaatatttgaatgttttgtaccccaactgtacttttcacaagtttaatagtcattttgtagataacagtcaaaaaagggggctcgtctttgttctgagagataagataagtgcaattgcgtagaatagttctatagtacttcatagcaagggttctttagagattcgaaaaccgtgtgatcagtttggaaacactacgggccttagcaatagaaacaacctatggttcggagtcatcaaaaaggataaggaaaatggatggtacaaattcggaaaggtctacgttctataggatttataagaaaacgagaatcgtagcccgaaaatgcaactatagagcgccagtgtgcggaactgggtggttccttatcaaccggaatgcaatggaatacgaaaattgcaatgaatgcagatgccagggactgataggagaccctcgggactagcactcagtatcattatcatggcgtcagtagctgcccggacacgggcccgcgcgagactcgactcgtcgaaagcagaacggatacccacatagcattcagcacatctggagtcgtagcgtcgcaatgcagagccaggcgaatctgaactggggcatcgcggcagcgggcaggataacgcaggactttgtcaccgccctgggaaccgtggagaagtcccgtcacgtagtggtggccgtggccgatgtggatggccagcgagcgcagcagttcgcccagaggaatcagatacccaggcactacgatggtttcgatgcactggctctggatcgagaggtggaagtggtgtatgtgggcaccctgaatccattccactacgctgtcgtccatctcatgttggccaggggtaaaaacgtgctctgtgagactcccatgtgcttgagcgtggagcaggccaaggagctgtacacgttggccgagcagcgtggagtgttcctcatggagggtaatagtatctataagcccactaaacagaagtagtagttgttaatggtttgctttcaggcatgtggtcacgcttctttcctagctacgatcgtctgagggaactcctgaaaaacgacgtcattggggaggtaacccaggttaaggtacagcacggttttcgcctggcccatatggaacgggtgtgcaaccgatctctgggcggttcgatccttatggacatcggcatctacgccctgcagctgggtcagttcgttttcggtgtatctcccgtcaagatcctgcccagcggcacgcagctcaacaaggaacgcgtggatgtgcagatcgactttatgctggactatggcgatggtcgtcgactggtggctctagtaaccggactagagaatctggaaaacgatgccgtcatcacgggcaccaaaggcgagattaaggtgagcttatctccgtgtatttccggatctgacccctggatcaggggattatcaatgcagctgtcgtagctctactgtgtacctcttccagctgtccaattactggtgctgcacccagattagccgctctaatgctcctcccgaatcctggcctctgccgcgggccaaatttgatttccactacacgaacacctgcggactgagatacgaggcggaggaagtgcgtcgctgcatagagaaacgcctgctcgagagtcccaaattcacgcatgccgaaagtctagagttagcagccattgcggatgagatccgacggcaaatcggtgtggtatatgatgtgtgagctgtgaagaagtcttagtaattaataaataattgaattacatcatcaatacttgttacaataaccaagttgaatctacaaactatctttaaaatacaatgatacttcatacgacacaatcctgatatttcgtattcaatatttatttaaataattgcaattattttttcgtttttattttccttttgtcgttatcgagttgcatatacgtatttctacatcgtactgcatgttgtggttgttattttttctgtgtatttcgccaagtgttgttggttcattaggcctaatacactaagggccagaaataaggaacttaagagctaaatgaatacttaaacgcagctaaatcgaggataaatctacaaaagtatgtaatcagattggcttcacaactaaatgcaaaatgcaaaacacaaaatcggttaacaagcgatttcagttaagctgggctaaatcagatttgacacagaatggtaaggaaagggttttggggctctcagctcattaaattcattggagcaacgcaagtagtaacgacgttagaaagtttccttcctcaatttgttcgttttagattacaaaattaaagttgagtaggaagggaacttgattttgcgaagtgaacttaacttaagcaacaaagtaactaaactacagtatgtacttagagactaactcgaatttaacaataaaatgatttatacaaggcgacttgagtccgattagatgactctcgccgctactgaagaggcctcctgaagtcgatgagcgacgcctacgatgtgtattttgattactgccactgctaatccaatccatttgcagtccaatccatttccagccaagcccgccgccgccttaaacgtaatgaagtcttttgctgtgtaaaattgctataaaaactattctcagctctcagctgcctcctcctcgggtttcgattgaagggtgggtgtctcttggtgctttgcacaattctcagggaaattgttatggc

SEQ ID NO: 6863 - DNA, 1092 bp, DROSOPHILA
cacgggcccgcgcgagactcgactcgtcgaaagcagaacggatacccacatagcattcagcacatctggagtcgtagcgtcgcaatgcagagccaggcgaatctgaactggggcatcgcggcagcgggcaggataacgcaggactttgtcaccgccctgggaaccgtggagaagtcccgtcacgtagtggtggccgtggccgatgtggatggccagcgagcgcagcagttcgcccagaggaatcagatacccaggcactacgatggtttcgatgcactggctctggatcgagaggtggaagtggtgtatgtgggcaccctgaatccattccactacgctgtcgtccatctcatgttggccaggggtaaaaacgtgctctgtgagactcccatgtgcttgagcgtggagcaggccaaggagctgtacacgttggccgagcagcgtggagtgttcctcatggagggcatgtggtcacgcttctttcctagctacgatcgtctgagggaactcctgaaaaacgacgtcattggggaggtaacccaggttaaggtacagcacggttttcgcctggcccatatggaacgggtgtgcaaccgatctctgggcggttcgatccttatggacatcggcatctacgccctgcagctgggtcagttcgttttcggtgtatctcccgtcaagatcctgcccagcggcacgcagctcaacaaggaacgcgtggatgtgcagatcgactttatgctggactatggcgatggtcgtcgactggtggctctagtaaccggactagagaatctggaaaacgatgccgtcatcacgggcaccaaaggcgagattaagctgtccaattactggtgctgcacccagattagccgctctaatgctcctcccgaatcctggcctctgccgcgggccaaatttgatttccactacacgaacacctgcggactgagatacgaggcggaggaagtgcgtcgctgcatagagaaacgcctgctcgagagtcccaaattcacgcatgccgaaagtctagagttagcagccattgcggatgagatccgacggcaaatcggtgtggtatatgatgtgtga

SEQ ID NO: 6864 - protein, 335 aa, DROSOPHILA
MQSQANLNWGIAAAGRITQDFVTALGTVEKSRHVVVAVADVDGQRAQQFAQRNQIPRHYDGFDALALDREVEVVYVGTLNPFHYAVVHLMLARGKNVLCETPMCLSVEQAKELYTLAEQRGVFLMEGMWSRFFPSYDRLRELLKNDVIGEVTQVKVQHGFRLAHMERVCNRSLGGSILMDIGIYALQLGQFVFGVSPVKILPSGTQLNKERVDVQIDFMLDYGDGRRLVALVTGLENLENDAVITGTKGEIKLSNYWCCTQISRSNAPPESWPLPRAKFDFHYTNTCGLRYEAEEVRRCIEKRLLESPKFTHAESLELAAIADEIRRQIGVVYDV

SEQ ID NO: 6865 - DNA, 2229 bp, DROSOPHILA
acgccggcagcggcataggcagaggcagcagcagcgtttcgtggctgctgctttctttcgctcgcttactcctttcatttcactttatttcgttcgcatgcacgcacgttggccgcggagcaacatctccagcaaacagaaatcgaaacctaaacagaaacagaaacagaagcaaaaaataaaacataaaaaaaaaacaaaaaaaaataaaaaacaaaacgaaactacaaatacaaataacaaaaaacaaataacacggcagcagccgtcgctgagacgcgaaacttggctcgaactttagtttagtttttctcagtttcagtggccagtggctaaagtgcggcgatatcgggcgaaacggttaacggctcacggctcatggctaacggttgacagccagcggttcatcacgcgccaaatccttttttttcaagtttgtcaatgtttttagtggtactaaagaaaacacatcattatatgtaaactataggcaagaatctaaagccaagagtggtatgtgcccttagttttgacccaagacctacaagtccctagaagacccctgacagccagaaccacccacccacacaccacgcataaacacacgcacacacacaaacacactcattcgccacccacccacacagtctcatatctcagtctcagtctcagtttcaatctcagttccaatctcagttccaatccaatctcaatctcatttcgaggatcaaaaacggagcagcaacatcaatcgattcattatgtttacatatttttttcgagtgatttaagttttggcaatggacgcagacttcttctccatctaatcgaaccgagtgacttcgcatcatgctgtagaagaagaagttgactaacaaatggttgttgtgatcgaaagtgtcttttgagatgtgtttaaaactcggtgtttgcccagccaaaatggcccagcatcgttcgcttgtccgtctctacctgcccacctagaagagctgcccagatgaatgcccagcagccgctgatcctggagcctggatccaaggccagcagtgttgttgcggcagctgccgagctagaggcagcaacaaccacggcagcgctggccacgtcctccgccacggaggcttctgcagcggacagctatcctgccgtacagcagaacggcggccacgaggagcagcggctcaatggcaaccacggatgtcgccgcgagcagccggatgatcggacggaccagccggagcagttggatcagcaggatgagcccgagccagtcaaggacgtggccaacaagctgaccattatcaagacgccgttgaacaagactctgctgaagaagtgcaacagcaacgggagcctgcagatgccgcacgccaacaatggcagcagcatcaacatcaataatcgcaacaacacaaacaacaccaacaacaacaatagcaacaataacaacaatgcggccagcaacgacgtctgcgattccggtttgcaaagcggaaatagcaatgaacaagaaccatttgccaacaacgatcgccatcaccacatctaccaccaccaccaccatcactatcatcatcaccatggcggcgataagagcgaggcgagcggcgacgttgcatcctcgtcctccgcggaccccaactcgcaggtcaaggacgagcccacagcgcaggatagccaggacaatcaagcggccggagctgcagaggctggaggagctactgcggttgcagccacgtgcagccccagcaagtgcaacaagtgcaactcgcacaataacaacagcaactgcaacaataacaataataccatcagcaacaacaacaataatacaagcagtaataccaatacgaacagcaacagcaacaacaatgccaacaacaataataataataacaataataaccattacaacaactacaataactattataagaaaaagtctcgtatgccgcccatttgccgttagtattgcatccatctatatactctaaaccccgtaaatcatgcctaatcataaatgcgtaagacaccacccacccacgagccaccgcccagccacccctacccctggcttacccacccaaattcaaccacccccccttcccaccaccacggcacacacacacacacacacacacacattacttacgctctcttccctcttaccaacaagaattgcagtcatcgaaaagcaaccccaccccagtgcactaaactggagca

SEQ ID NO: 6866 - DNA, 972 bp, DROSOPHILA
atgaatgcccagcagccgctgatcctggagcctggatccaaggccagcagtgttgttgcggcagctgccgagctagaggcagcaacaaccacggcagcgctggccacgtcctccgccacggaggcttctgcagcggacagctatcctgccgtacagcagaacggcggccacgaggagcagcggctcaatggcaaccacggatgtcgccgcgagcagccggatgatcggacggaccagccggagcagttggatcagcaggatgagcccgagccagtcaaggacgtggccaacaagctgaccattatcaagacgccgttgaacaagactctgctgaagaagtgcaacagcaacgggagcctgcagatgccgcacgccaacaatggcagcagcatcaacatcaataatcgcaacaacacaaacaacaccaacaacaacaatagcaacaataacaacaatgcggccagcaacgacgtctgcgattccggtttgcaaagcggaaatagcaatgaacaagaaccatttgccaacaacgatcgccatcaccacatctaccaccaccaccaccatcactatcatcatcaccatggcggcgataagagcgaggcgagcggcgacgttgcatcctcgtcctccgcggaccccaactcgcaggtcaaggacgagcccacagcgcaggatagccaggacaatcaagcggccggagctgcagaggctggaggagctactgcggttgcagccacgtgcagccccagcaagtgcaacaagtgcaactcgcacaataacaacagcaactgcaacaataacaataataccatcagcaacaacaacaataatacaagcagtaataccaatacgaacagcaacagcaacaacaatgccaacaacaataataataataacaataataaccattacaacaactacaataactattataagaaaaagtctcgtatgccgcccatttgccgttag

SEQ ID NO: 6867 - protein, 323 aa, DROSOPHILA
MNAQQPLILEPGSKASSVVAAAAELEAATTTAALATSSATEASAADSYPAVQQNGGHEEQRLNGNHGCRREQPDDRTDQPEQLDQQDEPEPVKDVANKLTIIKTPLNKTLLKKCNSNGSLQMPHANNGSSININNRNNTNNTNNNNSNNNNNAASNDVCDSGLQSGNSNEQEPFANNDRHHHIYHHHHHHYHHHHGGDKSEASGDVASSSSADPNSQVKDEPTAQDSQDNQAAGAAEAGGATAVAATCSPSKCNKCNSHNNNSNCNNNNNTISNNNNNTSSNTNTNSNSNNNANNNNNNNNNNHYNNYNNYYKKKSRMPPICR

SEQ ID NO: 6868 - DNA, 2819 bp, DROSOPHILA
tttcaactgagaaatcccttggaaaacaaaaacactttaatatctatgcttgctatttggtcatattgcagtatgcctaagattttaaacaagtttcaacattgtttaattaagaaataataaattccgtgtcaaaaattgtagatttattgcacgactaaagaaaacagtaaaattacagagggctcgcatgtgaaatattggccaaccttcagtctttcacctgtacaattggccatttccacgcataagaagcctcttggctggcatattaatcacgggacaaaggcataattccatcccaacgtggctcgatcaatcagcgatgctggaatacacatttgccccctataccatacacccctttcatcgatattcacattggtcattgggtatatgaccggtggccggggatgggatacgaccacttcgcatgcgtcgctgactccgagagcaggtccatcataggttcggatcggcccttgacttctcgggtttctcggtctcttgggatgccgagatttgtgcgtgtctctgattgttttgtcattagcatgaccgcggcgcttttttttttttttgggcctttggtgtttttggtgatcttcgactttttgattcggcggctgctgatttattcagcgctctttcttttgtcccaccggcgggtcactgacattcgtttctaattctatttttcaccattttctacatttcttccacaaaatttcgccacttgaaattatgccgacatcgaccgcaattatgaccaatgttcttgtggcctgagtgggctctctcttctcggtttctatgggttctagattatggattctggatttttggccagaactttttcgcataaaaacctaatgccgccgccacagatcgtacagttctgtttgggccttgcttacaattaggatccggtcggcagtaaatctttaatttctgtgcactttacgtcgagaaatcttcaaaaaaaaaaaaaaaaaacaagatgtccaagctgggtgctatcttgttggtgggcttgtgcctgtttgtggccgtggccttggccgagccacgccttcagcacgttcaggggcgcaatcaggtgcagggtcaaagggcgcagcagcatccctacctcttcctgtcaattcccaagggtcgggccaacgccggcgccgtcgtccagggcttcgaaattgtcgaggaggaagatgatgatctacatgatgaggaccagcacgatgacgagacggaggatgacgaggaactggagcatcagctgggcctgaactttgcccgcagcggtctggcttacaggcagaaccacgctgatgacgaacaggacgatgatcaggatcaggagcaggatcacgttcaggatgagctgcccaagaagcagatgatggttaaccgggatcaggctggtgccattatggtgcccgatggcattatcgagatcgagggtcagagtgttctggacgagaagaccggcaaggcggctctcctagtgcctcgtgccgccctagacgccattcccgatggcgcggtggtggctcttatggagcgatccgcctcatccgttgatgaaatcgaggaagagcgcgccaaccgcgtggtagttcgtcgccgcaagaacaacggacgcaggaacattcgccgccgcggcatcaacaacaacaatatccgacgccgccgccccgcccaaaggcgtcgccgagtgggtggcaaccgcaggcgcaatgtacgcgtcattcgcccccaaggcggcaaccgtaggcgtggcaaccagaggcgccgcggacaggtcgtattccagggttgagacacgaaacgaaggtcgtcctagccccatttctatatagtattatagttaagatcccctaacgatcaggacaagaaatttgagacacttgatgacgatgcgacaaataaaatgtgatatgaaaattataaatattttttttcgtattttttatgggtggtgaaattatgatgtgaaattaaccaacatgcaaagactatggttttgaatcattaagttgaaacttattttaaaggttttgccgtaaaacatcgtatactacttgtataactttattatttatttatcatatatggtgtaccatttcctagcagtgtataagatacataagattgctttgcctcaaaatagatcactgcttagctccattgatagaaaaatttgcatttatcatggagtttatttgtatcatggttcagctttattccagtttatcctttaacttcgacacaaccttagttataagtcacttaatgcccataggctatcaaaagtatgatatatgaattaataactgcaaattttgtatgataaaggatccgaaaatcagatggtacacacatatatacaaacaatggtagagaaactcatttgagaacatctctatagaactgtaaaagtttcgtagtaaactatttttgctaatcgtttggccaacaaaataggtactaccgaaaaataaccgtttagagataaaattcatttgattgtcgtatattggaaccaaagatacttttggtcttatccaaatatatatattaatcaaatgaaagttttaaaaagtcacgaaataattacacaataacagtatgtacaatacaaatgttatatggaaaattaaaatatatatttattgaaataatttgatgtcgcattctgattatattttgtcattgtttttgggagagcaaacatacaaaaatagataagcacatattttggaatcgttgtcaagaaaagatttgcctccgaactatgcaataaatcgcgaaccctttgt

SEQ ID NO: 6869 - DNA, 819 bp, DROSOPHILA
atgtccaagctgggtgctatcttgttggtgggcttgtgcctgtttgtggccgtggccttggccgagccacgccttcagcacgttcaggggcgcaatcaggtgcagggtcaaagggcgcagcagcatccctacctcttcctgtcaattcccaagggtcgggccaacgccggcgccgtcgtccagggcttcgaaattgtcgaggaggaagatgatgatctacatgatgaggaccagcacgatgacgagacggaggatgacgaggaactggagcatcagctgggcctgaactttgcccgcagcggtctggcttacaggcagaaccacgctgatgacgaacaggacgatgatcaggatcaggagcaggatcacgttcaggatgagctgcccaagaagcagatgatggttaaccgggatcaggctggtgccattatggtgcccgatggcattatcgagatcgagggtcagagtgttctggacgagaagaccggcaaggcggctctcctagtgcctcgtgccgccctagacgccattcccgatggcgcggtggtggctcttatggagcgatccgcctcatccgttgatgaaatcgaggaagagcgcgccaaccgcgtggtagttcgtcgccgcaagaacaacggacgcaggaacattcgccgccgcggcatcaacaacaacaatatccgacgccgccgccccgcccaaaggcgtcgccgagtgggtggcaaccgcaggcgcaatgtacgcgtcattcgcccccaaggcggcaaccgtaggcgtggcaaccagaggcgccgcggacaggtcgtattccagggttga

SEQ ID NO: 6870 - protein, 272 aa, DROSOPHILA
MSKLGAILLVGLCLFVAVALAEPRLQHVQGRNQVQGQRAQQHPYLFLSIPKGRANAGAVVQGFEIVEEEDDDLHDEDQHDDETEDDEELEHQLGLNFARSGLAYRQNHADDEQDDDQDQEQDHVQDELPKKQMMVNRDQAGAIMVPDGIIEIEGQSVLDEKTGKAALLVPRAALDAIPDGAVVALMERSASSVDEIEEERANRVVVRRRKNNGRRNIRRRGINNNNIRRRRPAQRRRRVGGNRRRNVRVIRPQGGNRRRGNQRRRGQVVFQG

SEQ ID NO: 6871 - DNA, 4325 bp, DROSOPHILA
tgataagcgcaccttatcagtttcaaagcgaaagcgaaaatacatacagtgaacagtcgagcatgttgtagcaatactttgaagagtttcacgattgtttggaggtgtgcttagtgagtgactactgtatgcaatcgtatattccttgctgctagtgactggactctggctactccacaatcagtacatatctggcaccaggagattcaacatggccaagcccaagtcaaaatcgactagcaaaggttccacttcgccgggttttaacaaggcggtgcagttgctcctccattttacagccgtgctgcagttcaactatggcgtgtacatcttccacacactcgacatgcccaacacggtgcccttcggcggaaaatttaagttcctaacttttatttgtgcggtaagccgatgcgttcatatcgaaaatctctacaccggttaaacgaaggcgatgcataactggtttttgatttgtaatggtctgatgttctagttcgatcccatacactcaaatctaatcgcttgtagtcagtaaagatacctttggcctagaacaatgtattttgatacaacctgaatgatatgtggcttcatacggtagacgagagtgaatattttagatttcgttcatgattatcgtcaaagaattgacttcaacatcaatttctgaatggttttgaagaaaataatattttcataaaattacatcacgaatttataaattaaaaacaaaaaattcatacaaattcaacaaagctagtcacaatttaaaatgaatccacatcttcacagatgtattcagcccacaatcaaaatgttaaaactttagctcatattaaatctcgatgtagcttacaaccctacaagggggtacatacatatatgtgtatatccgaacacctggtattgcggccctgcttcggctcgggcacactgttccaccgctcgcccctttttttggggtggttccgactcgcaagcagtagtactttcggagcgacagaccagaccggtttgtttgtgttttggtgccgtgaaaaatcaatcgagagcagagcagctgcagcaggaaaatggcatccgtgcgaggcaactccgtgtaccagggcgtctacggggctctgaggaccctgctccacctgacggcagtcgtgcaatttggctacggcatctattacgactacaactacgtgcagttccccaccagcgagccagagatgaggatccatcatccctgggggggcaaattcaaatacctaacgttcctggatgcggtaatatccatctcccattagaatcacgaacgcagcgtggtttaaagttcactccgattgttacttgtacgcacgcatctattaagatacacagagaaaatgaataggacagtagttagaatcatgggcttttcttgagtgatgaagaggatttgtcaaggtctccagtgtataaaagttagagctttttgaagatcttatatggagaactttcgctaaagcagtttttacaataaatatatatatataccattccactgcaaagcaactaattgaatccctccaaattcagtgctttactaacaaactcacatctcgcctcctattgtcgctgaaattgtacaggaaatgcttgtgcaacgttttttcgctaactgtaattccttccacttcacttaagcaacccttcaaatctagccgctttcgcattatctcacacacgtcaaatgctcttgcacttacagataattcaggcactgtactatattgtatcgctggtcaacgatttcgtgggcactaatgagctgacacccaagaaacctccggcggttcgcaggttcaaggactggctgatggctacattggcctttccagtggctatcaatgtgggcgtgaccttctggacactgtacgctatcgacagggagctagtcttccccaaggttctggaccccgtgttccccaggtaagacctcgaaagctggtgatatcaaggtggcctggctggcataaggcatattctgctcaacaaattgaatcatgaccagattagcattctaagcatgtctaattcaagccatatccattttctataccactgacatgcctatttacggtattgtgttaattgtgtttctttatatccaggctttttaagttcgatttaattggaactatatctttcaattatatatatatcctaacaagtactcatacatttgaaggaattagatcaacgtttttcctttcatttcagtaataaaccatcttcataaaatgctacttagacactaaaccttaagaccctataatctcgttttggggctctggttttactttcaaagtaattaatttattcagatagcttgctacgacaaagcttgaaagatgtgtacgtcataatatatttagggataaaattaaaaaagtggtctgaaaagtcttgatttcacccattgttttttcatgacactctgataatatcttcgctcgactctttcagctggctcaaccacgtcctgcacaccaacatagtggttttcatcatcctggagctgttcatctcgtacaggtcgtacccaaaacgaagccaaggactcgcaggactggccattttcatgggcgcctacctggtttggattcacgtggtgaagcactactcgggtgtgtgggtgtatccagtgctcgaggttctccagcttccgcaacgcatcctgttttttgcggccgtcgttggattcacgctgtcactttacctgctgggcgagttcctcaacaataccgtctgggccaaggaagtgaagttggccaagcgcaaatccaactaggaggctgtgacccgtttctgttcgatgtagttgcgttaattagccacaaaatacaaatagtgattgacaggtctcgattatacattttgctcatattgttcgatcttctcagccaaagaaatttttcataagtatgtaaaatcgtactgcaaagttaactgaagaaggcgtacaaaatatgtgagaaataataaacgaaacttgaaacatcaactcgataatatattttccagtaatattgaattcggagtctttaatcataatatggaaacccgtttgctaatgatattcattatatttttattacgcatacattgtaactgaaattatagccgtagtttccattgagcgcgcgcgtctttcgataagtttactagactaaccaaaatacaaaaatgccttctcgattaaacttctcatatcaagcacactgattcaacgccatctttgaataccactgttattcaattctagtaccataataaagcgattaaactcttcatcagctgcgaaaactgttttaaggtgggaagcttggaataaactgcttttcaagatcagagaaacgtcaagtggcgctatcatatcgatttggctttaaaaagctagttctagcttaaaaacgcctccttgctggaatgaaactcgacgtgtgttgcgccctaatcagctgttggctagctttatttgttttgttttgctcagcgtgcggtgccctttgcaccttttctggaggaaatgggcaagagcaagaagcaggtgcgcgagttcaacgccgccaaggaagctgtcgaggccactaaagcccagttgaacacttgcaacgatgcctatacgagcggtgccttcaaatacctgagattcctggtccatctcctggcggcagcgcagttttcgtatgggatatactttcactacttccgggtgcattggcccacggatttgctagacgaggatgaactgaaggcgcggtggggcggcaagttcaagtaccttaccttcttggacgtcattctacaggccatctaccactcattggctctgctgaacgatctcttcggcgataacaatgtctccggggattcaaaatccatgttgcgatcggtgagggactatgtgttcgccgcctttgcctttcctgtcgcccacaatgtctgcctctcgttttgggtcatctacgtgtgggaccgtgagctcatctttccctcagcgctggatgcgattttccccaggcaagtgtttatgtttttccgccggtttaacttgcgtacaatgcacaatgttagtctgctggagtctcttttgtttcgagcctgtctaaactttctgttcatcaggcgaggcgagttttgatttacctgtgtttctcaatatttgcagctggttgaatcacgtggtacacacgaatgtggcccttttggccattatggacctgtttacctgcttccgccgctatccgagtcgattggcaggcatcacgggcaacgtctccttcatcctg

SEQ ID NO: 6872 - DNA, 1324 bp, DROSOPHILA
cgacagaccagaccggtttgtttgtgttttggtgccgtgaaaaatcaatcgagagcagagcagctgcagcaggaaaatggcatccgtgcgaggcaactccgtgtaccagggcgtctacggggctctgaggaccctgctccacctgacggcagtcgtgcaatttggctacggcatctattacgactacaactacgtgcagttccccaccagcgagccagagatgaggatccatcatccctgggggggcaaattcaaatacctaacgttcctggatgcgataattcaggcactgtactatattgtatcgctggtcaacgatttcgtgggcactaatgagctgacacccaagaaacctccggcggttcgcaggttcaaggactggctgatggctacattggcctttccagtggctatcaatgtgggcgtgaccttctggacactgtacgctatcgacagggagctagtcttccccaaggttctggaccccgtgttccccagctggctcaaccacgtcctgcacaccaacatagtggttttcatcatcctggagctgttcatctcgtacaggtcgtacccaaaacgaagccaaggactcgcaggactggccattttcatgggcgcctacctggtttggattcacgtggtgaagcactactcgggtgtgtgggtgtatccagtgctcgaggttctccagcttccgcaacgcatcctgttttttgcggccgtcgttggattcacgctgtcactttacctgctgggcgagttcctcaacaataccgtctgggccaaggaagtgaagttggccaagcgcaaatccaactaggaggctgtgacccgtttctgttcgatgtagttgcgttaattagccacaaaatacaaatagtgattgacaggtctcgattatacattttgctcatattgttcgatcttctcagccaaagaaatttttcataagtatgtaaaatcgtactgcaaagttaactgaagaaggcgtacaaaatatgtgagaaataataaacgaaacttgaaacatcaactcgataatatattttccagtaatattgaattcggagtctttaatcataatatggaaacccgtttgctaatgatattcattatatttttattacgcatacattgtaactgaaattatagccgtagtttccattgagcgcgcgcgtctttcgataagtttactagactaaccaaaatacaaaaatgccttctcgattaaacttctcatatcaagcacactgattcaacgccatctttgaataccactgttattcaattctagtaccataataaagcgattaaactcttc

SEQ ID NO: 6873 - protein, 248 aa, DROSOPHILA
MASVRGNSVYQGVYGALRTLLHLTAVVQFGYGIYYDYNYVQFPTSEPEMRIHHPWGGKFKYLTFLDAIIQALYYIVSLVNDFVGTNELTPKKPPAVRRFKDWLMATLAFPVAINVGVTFWTLYAIDRELVFPKVLDPVFPSWLNHVLHTNIVVFIILELFISYRSYPKRSQGLAGLAIFMGAYLVWIHVVKHYSGVWVYPVLEVLQLPQRILFFAAVVGFTLSLYLLGEFLNNTVWAKEVKLAKRKSN

SEQ ID NO: 6874 - DNA, 3815 bp, DROSOPHILA
aagatcgattatatcagttgcttgctgtataaacactgctcgcacacatatgtacacacacgaacgcacatgagggcgattagaacatgaatatgcaccaacaccaacctgcgaatcaattatctcgctctttcgcagcgcgaccttcaccgtttttctatctctctcgctcgcctatgggctctccttggaatggcgtttaccgttcgttgggcgcattggaactgtggtaattggttttttggtagctcgctaataaccgttaacaacttgattacaatcttaatgttttgttgtagttgctgccgcgtgctgttgttgttgaacagctgaagattgctgctgctggtgtgaccagctattggtggttggtcgaaaaaagctgttagttcgggcagagctttaagtttggggcgacaatcgatatcgcgtgcaacaattatcgagaatcgaatttgaatatttaagtttagaacatccggaggtgtttatataatttatttgttttatggaattaaatattccaaaaaaaaaaaaaaaaaaaaaaaaatactgttagtctaatttgtgaattggagactataaagagcagcgttaggcaggcactttaggttcgtcatttttccgcatatcttatcatatcataactgctttgaccaaacaaatctgatacctcaattaattgctatcttttatgtcttatttttagtgtcttcgtttaaacacctcggccaagaaatcattaaccccttgttgactagcatacattgtatatgaaacagcacagataagagtcatatgaataattggggctcttatctgccgaaatgcataatctcattgtatccaccatcatcattattcgcccgtaaaataaaatgcctatatgtaagatagtgagatttctttcttggccctgcacttgattcttgatgcgtagtcttcgtttttggcaaagatctcgatgttttggcatttggatttcggccgacgttccattatgaagtcgattcaattgagttttctactcttgtcagtgctcttcagcagttcgcatcaggtaaatttgggtttagtacatattttaacttgcatagaactcaaaaaaaaattggttcaccttgtcgtatacgtaacgtttcctaacattcataacttcaacgcaatattgctattccaatgacaaaagatattatctatattctcaccatagctttccaagccggaagatccaacctatacggcagcagtggtggagcacagccagccagtgggcgattctccgcgtgcacgcaccacctcagcttcggaatcctttcaaaagatcatccgtgaagtcggcgatgtggacatcatagtgtttcccgagcacatactcaatagtcaggccacagccacttttgtgccccatgagtcgcagaacataacgccctgctaccaaacggactatgagctcttcctcatcgagctatcctgctcggcgagggctaaccacctgtatgtggtcataaacgtggtggagaaggaactgtgtgcccatggagctggttctgacacctacaatccttgtccatcgtctggcgttcggtacttcaacacaaatgtcgtgttcgatcgaaggggcaggattgtctcgcgttacagaaaaacccatttgtggcgacacgagtatgtctcgacatcagtgctccgatctccggatatatccatctttaggacagactttggcgtaacctttggtcatttcatctgcttcgacatgttgttctatgatccggcgatgaaattggtgaaggagcacaagatcacggacatcgtgtatccaacctattggttctcggaattgccattccttggcgctgtacaactccaagagggttgggcatttggtaatgatgttaatgttctagccgcagatgccagtaatcccgatggacgcacttccggatcgggtatctatgcaggacgcggtggccgattggtggcggagattttcgagcagcccaccactaagttgctgattgcggaggtgccgaagagggaacatggccaactggcacccacttttacgccgatcttcgagccgcagaggaaaacgcaaagattgactggcctggccacgtaccgggataataatgtggatatattcgaaagtgaattgttggacgatgattttctgagtttcgaacgccagttgtgccatggcagcttttgctgtaccttctccatcgaacgaaaggtcaccagtgccgcggagaacgagttgccctccagtggggccaagtcatatcgctataggatcggcgtctactggggcaacgagaccaccgtcattggcgtggatcgcacggagcaggcaacttgtgcactctttgcctgcacggatgtgcgtctcgcgagttgtggctacatctatccggagaacgaggaggtcatcaatacgcatcatttcaccaagctgagtatctcgggcaattttccagctgctccacgtggccgacgattgatcatgcccagctccttgaatgctctatttctgcccgtttcggtttccgattatgaatggattgaatcaccagaggcggcgaataatctagacaagacaatattggtcgatttgaaactagcgaaggcacagaacgatctgctaacctttgccatttgggccaactactacaccgatatacccagcactcacaacttggatcacatgcagccgaatggaactcagtccaatccttcgacttccgcatcctcgacagtttcggcattctggattttatgtgtcctcaactgtttcatcagcgtattatagattactagttggaaatacgttagcccgttcactttctgactcaaatgttatatttagtcagatttttttttttttttgcttatctgaacaccaaaataaatgtagagcaaccaaaattttataactcctcataagaacgaaatgcctcactaagccagagtaataaaagttttgtagattttaaatttttcaaatttaaagaaactgaaggcaatacaagaatttcaattcaaatgcattcatttgcttaaaacttgcatctattgcttgggagcagctcgatggtaggtaaactataggctaaggaaattcaataggattaacgcacagatttcccaagaaccgagatgaaaaagtgcagattttccataagtgcaaatttcaccagaattcgaccagctccaagcggatgcatttcttgcgaactgaccgttactttcacagtcgttcgtaagtctccacttggagtcgtttattatttgaatgaaagcagtagcacaaccacccaccgcccacggccctctggcgaccgagcgggcgacgaacgaccttgtggagatttgcttccagcgcaggcgcttcaaggacctctgccagcgttgtttgcatttccaacaggtagcgacgtcgacgtcgacgtcaaagtccatgcaacagtggccgccgtttataatgagccaaggccgatggtgcgcggaggggggggggagggggagaggcggctgaagtgggtcggctgggtggtgggttgggtttttggcaatgctcatctcccacacacacacacactcacacacacgcgcgcatcaatgtagcatcttcaatgacaacgacgacgacttctccgcgggagaatcctgctggacaggattcacgctgtgactttccatgcgatttaacatcatttgcttgccgatgccgcaccgtcacctgccacgcctcccgcacttccgcccatcgctaagaagaagcaagcaaatcaaaaaggaaatacaaaatg

SEQ ID NO: 6875 - DNA, 1662 bp, DROSOPHILA
atgaagtcgattcaattgagttttctactcttgtcagtgctcttcagcagttcgcatcagctttccaagccggaagatccaacctatacggcagcagtggtggagcacagccagccagtgggcgattctccgcgtgcacgcaccacctcagcttcggaatcctttcaaaagatcatccgtgaagtcggcgatgtggacatcatagtgtttcccgagcacatactcaatagtcaggccacagccacttttgtgccccatgagtcgcagaacataacgccctgctaccaaacggactatgagctcttcctcatcgagctatcctgctcggcgagggctaaccacctgtatgtggtcataaacgtggtggagaaggaactgtgtgcccatggagctggttctgacacctacaatccttgtccatcgtctggcgttcggtacttcaacacaaatgtcgtgttcgatcgaaggggcaggattgtctcgcgttacagaaaaacccatttgtggcgacacgagtatgtctcgacatcagtgctccgatctccggatatatccatctttaggacagactttggcgtaacctttggtcatttcatctgcttcgacatgttgttctatgatccggcgatgaaattggtgaaggagcacaagatcacggacatcgtgtatccaacctattggttctcggaattgccattccttggcgctgtacaactccaagagggttgggcatttggtaatgatgttaatgttctagccgcagatgccagtaatcccgatggacgcacttccggatcgggtatctatgcaggacgcggtggccgattggtggcggagattttcgagcagcccaccactaagttgctgattgcggaggtgccgaagagggaacatggccaactggcacccacttttacgccgatcttcgagccgcagaggaaaacgcaaagattgactggcctggccacgtaccgggataataatgtggatatattcgaaagtgaattgttggacgatgattttctgagtttcgaacgccagttgtgccatggcagcttttgctgtaccttctccatcgaacgaaaggtcaccagtgccgcggagaacgagttgccctccagtggggccaagtcatatcgctataggatcggcgtctactggggcaacgagaccaccgtcattggcgtggatcgcacggagcaggcaacttgtgcactctttgcctgcacggatgtgcgtctcgcgagttgtggctacatctatccggagaacgaggaggtcatcaatacgcatcatttcaccaagctgagtatctcgggcaattttccagctgctccacgtggccgacgattgatcatgcccagctccttgaatgctctatttctgcccgtttcggtttccgattatgaatggattgaatcaccagaggcggcgaataatctagacaagacaatattggtcgatttgaaactagcgaaggcacagaacgatctgctaacctttgccatttgggccaactactacaccgatatacccagcactcacaacttggatcacatgcagccgaatggaactcagtccaatccttcgacttccgcatcctcgacagtttcggcattctggattttatgtgtcctcaactgtttcatcagcgtattatag

SEQ ID NO: 6876 - protein, 553 aa, DROSOPHILA
MKSIQLSFLLLSVLFSSSHQLSKPEDPTYTAAVVEHSQPVGDSPRARTTSASESFQKIIREVGDVDIIVFPEHILNSQATATFVPHESQNITPCYQTDYELFLIELSCSARANHLYVVINVVEKELCAHGAGSDTYNPCPSSGVRYFNTNVVFDRRGRIVSRYRKTHLWRHEYVSTSVLRSPDISIFRTDFGVTFGHFICFDMLFYDPAMKLVKEHKITDIVYPTYWFSELPFLGAVQLQEGWAFGNDVNVLAADASNPDGRTSGSGIYAGRGGRLVAEIFEQPTTKLLIAEVPKREHGQLAPTFTPIFEPQRKTQRLTGLATYRDNNVDIFESELLDDDFLSFERQLCHGSFCCTFSIERKVTSAAENELPSSGAKSYRYRIGVYWGNETTVIGVDRTEQATCALFACTDVRLASCGYIYPENEEVINTHHFTKLSISGNFPAAPRGRRLIMPSSLNALFLPVSVSDYEWIESPEAANNLDKTILVDLKLAKAQNDLLTFAIWANYYTDIPSTHNLDHMQPNGTQSNPSTSASSTVSAFWILCVLNCFISVL

SEQ ID NO: 6877 - DNA, 4624 bp, DROSOPHILA
gccatggagactgaggaggcggagctagcggaaacagaagagcctttggaaatcaccgaggaatcgccggataatcctgaggcagaatctacaacagaacaattgacagaaaaaccaggtaagttagatgcacttagatagaatttctcctatatggctcctttccttccagtgacgaatggcaacaaggcccctgctgataacgaagccaagatgacacaactgccgttggccaggatacggaacataatgaaactagatccggatctgcatatggccaacaatgaggccgtgttcatagtggcgaaggcagtggaactattcatagcctcgttgtcacgggaatcatatacctacacggcgcagtccaaaaagaaaaccatacaaaagagggacgtggatatggccatttctgctgtggacagtttgctattccttgatggagccatgaacttttgaacacccccacaaatgaaactggatttgtcgattatacttttatactttatttagggatattcagcggcaaacaaattcagttctaaacgtccttatggttttatgttaaaaataatatttaagttataaaacaattgttgattcgcaaagaaaaaaaaacaaaaaagaaatcataattataaacgacaacgtttaacgtttcacaatactctttgctattcggaatttgtaacgaagccggcatttggttaatttatttaactgctgaatagtgtggtttgttgtttgttaatcatactctgtccgcaggcgatacttactttgtcgttgggcacatacatttgtagtttatattttgctttttatgttggttttatctccattatcttatgaaacaatattttcaagcttagtctaaaattatgctttgataaattaattgttttgggggggttttcgcttgtgtttagttctcttctcgtattggctttaactagtattaggttgattgaagtatgtcttttgtttttacaatctttttgaggataaaatttgttgcattattggtttcttgttttaattttaaacacaatttgaatatcggacaacagttgcaataaaaatttacgttttttatttgattttcgtttatatattatatttaataggtgtgaatagttggattgttgacttcaaacattttgatatttcgttggaatatattttaatctttacgcttaacattgtttagttgtggttgttgttgttgttgtagttgttgttgaggttggtttcttggggttttggaaaatcgatgggttaacgtattttcggatatggagccgagcgatatcgcacgctttcacgagatcgggatccagtttcgtagtgagcagatgaatgtgatcccgagcccgaggtggttggtcgatatgacgatgatgaacgaccgttgcttggttttgctattttgaaaagaattttatttgttgtttagactttaaattgtttcttgttctgtctctgtggtgctgttttttggtttttggtttttcttttgcttagcatatatacattgtaaaaaaaagaaaaatatattgtttaaccggttttgaatgcactacaccctacgaaacgttattgttttgagtaaaatgcatttcgtttcatcacgtttcaaaaaaagttgttccacaaacctttcagcttggattttatagtttaagcatgttcaaatatttttgggtttcttgccatgaagttttatggttttgttttcaaagtgtgaatttcagtaatttgattgtttgatcgattgttttaatattttggctctggcttcttgtgagtatgttagtagtcgtccaattaatgaagatgatttactggttgctgttcggtttagttgatttggcctctgttcaggcatagtgcatttaaaatcttgttaaaatgggatgggttgccgttttaataattttggtacgcggccttgtttctttttcttttttggtttctgtttttttctgcgttttcaatttatcggcgcttagttggatagattttgttttgttttcgagttttttttttgttttgatttgcgcgagttaagtttaaacgtttacattgctatttgtcgtattctttttcttttcttcattttgtttatttttacatgcctgctgaggggaagagattattggtctagaaatctaggtatcttacctggataggccgccgcgtaggaagaggaggacgagtgggggtgatactcacgccgatagtcgcgctcgtaggagctactgtcatactgggcgtggtgggtcgagtgctttgatgtttggggcggcggtgtggcatagcgatcatattctccatggtggtcatatagctcgtggtcccgtgatctgttgaaaaagtaagggattaaaggagggttttctaacaatggttgataacacagatgcacgctattgaaagcataagaatttaacttctaaaggcatcattaacgcgattgaacttagctaacctgtgcgtctttacgatcccatagttgggatcgtccatcacatatcgagccttctccagaatcgaatagactttgggctttgaagaagcagggggcggggtgctgtgacgaaaggaattccttagtaaccaattaaaattcaacgaaaattgacaagcctaccgggaactgtaggcgccatgatcgccataggatttggaatagtggtgagacttcttgtacatgcgctccttgccatccatctcgcgtagttgctccaaccgaatgtcgtcgttggcgtcgggtatcataaacttgcggatctcgcctagcgcatagctgatcctgtgataggcctccgctggaggggccaccgtggatatctccacgtgcaaatcgcggctgagatgggcgtactttggatttccggagctgcgaagctcctcctccttaccgtggtcgcgcatcgagttgcgccccataaccaccattttgcacatagtctcttcctgcagctgccgcagtgtgttgcccttgggccccaggatcttgccaacgaaattgaacttggggtactccttgatggggaacaagactttctgggccacgcggatgggcttttcgctgtacacgttggcatatatctcgggctttggtatgcgtccgctgaccaagatcttctccacctctgcggggccatgaaaaattgcaattagatccactatagcttacatgtcgcagcgcctaactcaccgtcgtcaagtaagcgcttggtgatgatgtgcttcttctcgagcgtcttcttttccagcaggcactcctgcagatacgcgttggtcttctcattcagctggggcgtgtcccgcagggcggcgtggctggtggtgtgtccgccgccatccgcctcaggggtctctggagcaccggtagccgctggctcctcgtcgcgtcgcttccgcttgtagtcggcggcgtcctcgttgtagtctctgtcgtagtcgcgcggcattgcgttttgtaggatttctggcctggaggattcgtgaattttaaaactcctactcttgaatacaaaattctactattgcagaattagttggctgaaaaaatatgtatgtggtaggacatcgataggtaaatcggcatcaccgattcgatagcgtattatcggttactgccgataacaacccgccatcatgtgcattagtagtttatgacttatcaattttattaaaaactttcccataacaaagagagcatttaaattatatttgtaatttaaaaatcactaagtgcatattataaattattgccatgcacctgacgacgcatctatgttaatatatagcgttagatagtgtctgcaagccgataacaactatgcgcccttaacagcaccgtcgattggcagcgaacagcacgctgcagaagcacgagagacagcccgagagaccggagttgccggaccgagccgctgacatagtaaatgtccgaataaaatacacacttggaaaaagagagaaaaattagggccattgggaaggctgaagtgtgctaagttagcaatcataccgaatcgacagcaaaagcgatcgcccgcaatctgcgcacggaaaatccgagactcggcgacttagcaggacgatagagcgacagcgatcccgaaggcaggacgacaaatggcggagaacggactgcgcgtgccagggtcatccgcggtggcctctgcggtggcttccactgcgacgggagtcggcggtggatcagcagcgggaactgcgggggccgggacaggagtggtgcccaccggcgtcagcggcgggacgagcaacggggagcatgagaacgaacacaacgccaacgcagacggcgagaaggcccagccggcgccggcggtccagaagtacatgcaggagctcatgacggagcgatcgcgcatggaaaaccacttccccctggcggtgaagctaattgacgaaggtaaattgatttgtcaggggcacttcatggtaattactttgatttccctctgtttttgcagctctggagcgtgtgcagctaaacggacgcattcccacgagagaccagtacgccgatgtctaccagcagcgcaccatcaagctgtcccaaaaagtgcacgtgcccatcaaggac

SEQ ID NO: 6878 - DNA, 1614 bp, DROSOPHILA
aatcggtgatgccgatttacctatcgatgtcctaccacatacatattttttcagccaactaattctgcaatagtagaattttgtattcaagagtaggagttttaaaattcacgaatcctccaggccagaaatcctacaaaacgcaatgccgcgcgactacgacagagactacaacgaggacgccgccgactacaagcggaagcgacgcgacgaggagccagcggctaccggtgctccagagacccctgaggcggatggcggcggacacaccaccagccacgccgccctgcgggacacgccccagctgaatgagaagaccaacgcgtatctgcaggagtgcctgctggaaaagaagacgctcgagaagaagcacatcatcaccaagcgcttacttgacgacgaggtggagaagatcttggtcagcggacgcataccaaagcccgagatatatgccaacgtgtacagcgaaaagcccatccgcgtggcccagaaagtcttgttccccatcaaggagtaccccaagttcaatttcgttggcaagatcctggggcccaagggcaacacactgcggcagctgcaggaagagactatgtgcaaaatggtggttatggggcgcaactcgatgcgcgaccacggtaaggaggaggagcttcgcagctccggaaatccaaagtacgcccatctcagccgcgatttgcacgtggagatatccacggtggcccctccagcggaggcctatcacaggatcagctatgcgctaggcgagatccgcaagtttatgatacccgacgccaacgacgacattcggttggagcaactacgcgagatggatggcaaggagcgcatgtacaagaagtctcaccactattccaaatcctatggcgatcatggcgcctacagttcccgcaccccgccccctgcttcttcaaagcccaaagtctattcgattctggagaaggctcgatatgtgatggacgatcccaactatgggatcgtaaagacgcacagatcacgggaccacgagctatatgaccaccatggagaatatgatcgctatgccacaccgccgccccaaacatcaaagcactcgacccaccacgcccagtatgacagtagctcctacgagcgcgactatcggcgtgagtatcacccccactcgtcctcctcttcctacgcggcggcctatccagcaaaaccaagcaacggtcgttcatcatcgtcatatcgaccaaccacctcgggctcgggatcacattcatctgctcactacgaaactggatcccgatctcgtgaaagcgtgcgatatcgctcggctccatatccgaaaatacgttaacccatcgattttccaaaaccccaagaaaccaacctcaacaacaactacaacaacaacaacaaccacaactaaacaatgttaagcgtaaagattaaaatatattccaacgaaatatcaaaatgtttgaagtcaacaatccaactattcacacctattaaatataatatataaacgaaaatcaaataaaaaacgtaaatttttattgcaactgttgtccgatattcaaattgtgtttaaaattaaaacaagaaaccaataatgcaacaaattttatcctc

SEQ ID NO: 6879 - protein, 396 aa, DROSOPHILA
MPRDYDRDYNEDAADYKRKRRDEEPAATGAPETPEADGGGHTTSHAALRDTPQLNEKTNAYLQECLLEKKTLEKKHIITKRLLDDEVEKILVSGRIPKPEIYANVYSEKPIRVAQKVLFPIKEYPKFNFVGKILGPKGNTLRQLQEETMCKMVVMGRNSMRDHGKEEELRSSGNPKYAHLSRDLHVEISTVAPPAEAYHRISYALGEIRKFMIPDANDDIRLEQLREMDGKERMYKKSHHYSKSYGDHGAYSSRTPPPASSKPKVYSILEKARYVMDDPNYGIVKTHRSRDHELYDHHGEYDRYATPPPQTSKHSTHHAQYDSSSYERDYRREYHPHSSSSSYAAAYPAKPSNGRSSSSYRPTTSGSGSHSSAHYETGSRSRESVRYRSAPYPKIR

SEQ ID NO: 6880 - DNA, 1865 bp, DROSOPHILA
tatttaagcggctgtttagcccggggctcagtacaaacatggctggacagcgatttatgatcgtactgatcgtggtttcaatcttgttaccatcaattccggaggcttctgccaaagcctgtggatcgagactccagttgcgggctcaaaatgatcccgttgacctcagtcgtttgagcgagaagcagctaaaacagctggctgagcagttggcaaaattcaaaacgcagaaggacgaatatggcggtgatctggtggaggaagaggatgacccagaacaggatcagcagctggaggatgccgaggacgatcaccgcggcggaagtcgtccatggaacagggtgcagcggataatccgaagacagctgataaaaatacccaagagatatctcaagaagctcctaaggcaatttggattggcccggagtgctggatatagcggtgtccggagtgcgaacttgactccccagctggaggagtactacctaataccactgcagtgaaattattgaccggaaataaatacaaacattttgaaaatacaacacttttacgtacactcttttgggcgctgggctaaaaacaattgctgagtattgagtattgctcgtactcaatactgttggctatcaaatagccttccttaaagcaaaaatgaatggaaaatattaatatttttaaacatgacaaattaaatgaatttccatttagttgccatcagagacgtagacgtattttttaaacgagcctaaaactatgtttcggcaaacaaacataaaattcatatacaaagcacaattttttttttaagcgcttttgtgatctttggactcttacatttttttcttgataaacatatggttccaccgaaaagctctgacaacgatcgtgtggtaaaaagctttccaccacttcacttatgtttcatttgttcatagccaatcagctttggaacagctgttggccggcgatatattttagtgattatatagttgtcgcacgaccgttgaggagaaaacaagtgaaaactgctgtttactaagtcatttttagagccatgtcagtgggagtactagctggaaaagtagccctggtaacaggtgtgtattcgtttgttttctcttgatatctgctctttatatgggactcttctaaactggagtttttaggtgccggatcaggaattggtcgtgccacctgccgccttttggccagagatggtgccaaagtgatcgccgttgaccgcaatctaaaggcggcccaagaaaccgtacaggaattgggctctgagcgatctgccgccctggaggtggacgtttcctctgcccagagtgttcaattctcggtggccgaggccctaaagaaattccagcaggcacccactattgtggtcaattcggctggaataacccgagatggttatctgctcaagatgcccgaacgggactacgatgacgtatacggggtcaatctgaagggcacctttctggttacccaggcctatgccaaggccatgatcgagcagaaactggaaaacggcaccattgtgaacctctcaagcatcgtggccaagatgaacaacgtgggccaggccaactatgcggccaccaaggcgggcgtgatctccttcacggaggtggcctccaaggagttcggaaagtttggcatccgtgtgaactgcatcctgccaggctacatagacacgcccatggtagcggttgtgcccgattctgtaaagcaggaggtggtacaacgatgccccttgggccgattgggtcagccggaggagatcgccgaggtcattgcctttttggcctccccgcaatcgtcatacgtcaatggggctgccatcgaggtcaccgggg

SEQ ID NO: 6881 - DNA, 588 bp, DROSOPHILA
cgaccgttgaggagaaaacaagtgaaaactgctgtttactaagtcatttttagagccatgtcagtgggagtactagctggaaaagtagccctggtaacaggtgccggatcaggaattggtcgtgccacctgccgccttttggccagagatggtgccaaagtgatcgccgttgaccgcaatctaaaggcggcccaagaaaccgtacaggaattgggctctgagcgatctgccgccctggaggtggacgtttcctctgcccagagtgttcaattctcggtggccgaggccctaaagaaattccagcaggcacccactattgtggtcaattcggctggaataacccgagatggttatctgctcaagatgcccgaacgggactacgatgacgtatacggggtcaatctgaagggcacctttctggttacccaggcctatgccaaggccatgatcgagcagaaactggaaaacggcaccattgtgaacctctcaagcatcgtggccaagatgaacaacgtgggccaggccaactatgcggccaccaaggcgggcgtgatctccttcacggagcggttgtgcccgattctgtaa

SEQ ID NO: 6882 - protein, 176 aa, DROSOPHILA
MSVGVLAGKVALVTGAGSGIGRATCRLLARDGAKVIAVDRNLKAAQETVQELGSERSAALEVDVSSAQSVQFSVAEALKKFQQAPTIVVNSAGITRDGYLLKMPERDYDDVYGVNLKGTFLVTQAYAKAMIEQKLENGTIVNLSSIVAKMNNVGQANYAATKAGVISFTERLCPIL

SEQ ID NO: 6883 - DNA, 3192 bp, DROSOPHILA
cttctttgcaatgacagttaccgagaagcgtgaacaacggcatgtttagctggtacacccaccatattcgtctatagcttaattgtctattaaatcgcacgcatcgaactgttattctcgtcgggtgcacagcaaattgtttataaatagaactgtcgcgcataaaaaacaacagtggaaagttttatcgtttagttctgctacaagctcagcgtaagttttttttctttattttgtacatatgtgtgtatacatgtgtgtgagagttcaactatagcataattataatcaaactctgaaagagatatagcttaatgttataaactaagtactacccggcttatttaaccaaagaattcaaattatttgtcgccatttggaaccgtacaagtaaatacatacatatgtatgtagaaaacgacatgtaaactgatcgatacactgataaaaatttatattcaagtgaaaaagcttaaatcaaatttataaatggatgtgaaatgtatttttatatttcttttaaatatacataaatccatacacaaaaacccaactaataaattgttgatattgaaaaggaaatcatccagaaattaatcaagagaattaaaatgttatttttgtaataatcttaaaagctctgtgtatcagagcgaacgtgacaagtgtttttacttaatgaggaaactattggccaggagaggagggctcgttcgatcagtgataactttgaattcccgtacaggtggcatccagaataactcaagtaatgctcaaacaaggtcaaactcaataacattgtgaaatagcacaactacttctggtcgattttcattcaaacaattggaatgggataaactgccggtggggagtgagataaagcgttcaattctctcgcattatttctgataaggagggctctctgtggattccacccatatttaactaacaatccactcggcttgccactcattcgcagcccgctccacaatccagcaacatgtcgaaactcatccgttggggaatcgcttccgccggcaagatcagcgaggactttgtcatcgccctcagcaccctgccctccagcgaccacaaggtccaggctgtagccgcccgagctcttgatcgcgcccaggagttcgccaccaagcacggcattcccaaggccctcggaagctacgaggagctggccaagagcaccgatgtcggtgagtagaacttaaagttcataaacaaactgttcaaaaaaatctttaaaaaatgtaattatccccagatgtggtctacattggcaccctgaatccccagcactacgaggtcgccttgctgatgctgaacaatggcaagcatgttctctgcgagaagccgttggccatgaacaagaagcaggtggagggcatcctggccgctgccaaggccaacaagcgcttcttcatggaggccgtgtggtcgcgattcttcccctcgtaccagcgcgttaaggagctcatctccagcggacagctgggccaagtcaaggatgtggaggtcaactttggcttccctatgcctcatgtcgaccgcttgcagtgagtacacagatcgttcatagaataacaattactaatagatcacatcacttaaaggaaacgcgaactgggaggcggtgtggtctacgatctgggcatttacaccatccaggtctcgcagtgggccttccaggagaaaccggagaagatcgagtccaagggaaccctgaacgccgagggcatcgacgatgatgttagtgccaccttgacctacagtggtgggcgcactgctcgcatgcgcttctcctccaaggagaagttgggaaacaccgccgttatcaagggcaccaaaggacaagttaccgtacgtaatctaatcgatcgtgattgaagagtagctaatagtctagtcttatctaccagctgattgacttctggtcgcccaacaagctcatcgacatcgatggccaggagaaggagtggctgcctcccaagggcaagtacgcgaccaactacgccaactccgaggccatgcgctatgaggcggaggcagtgcgccagtccatcatcgccggcgaagtggagaacaagaacgtcacctacgccgacagtttgatcttcgccgagatcgaggacaccatccgcaagcagatcggtgtgctgaacaagtacgatgagcagtaaatatagattatatagataaacgtgtaaacctaacataataaacagaactttttacaaaaaatatatatttcaaataattattttaaacgaaagcaatacattttaaagtccttagcaaaagttggacttactaaaagttggaccccctgttgtattttttcaatgccccactctagatcaaggattagcaaacagtgcgataaggggagctattgattgtggaacggcagcgatgacattcccactaggtcgaactggggtgttactaaagtgcctgacttggcagaattcccgatcacgtttctgccgcatgataccgtcttttaatttaggggctggtaaaaaaaagcgcagggattccttatctcagggttctctaaagtctacccacatatctctaatatagattataccaccaagtctgttctaatttatattacttttttaaaaattcttaatattcctatgctaatttttgaaaaccatctataagctttttagctctcattattatctaatatttgaatgttttgtaccccaactgtacttttcacaagtttaatagtcattttgtagataacagtcaaaaaagggggctcgtctttgttctgagagataagataagtgcaattgcgtagaatagttctatagtacttcatagcaagggttctttagagattcgaaaaccgtgtgatcagtttggaaacactacgggccttagcaatagaaacaacctatggttcggagtcatcaaaaaggataaggaaaatggatggtacaaattcggaaaggtctacgttctataggatttataagaaaacgagaatcgtagcccgaaaatgcaactatagagcgccagtgtgcggaactgggtggttccttatcaaccggaatgcaatggaatacgaaaattgcaatgaatgcagatgccagggactgataggagaccctcgggactagcactcagtatcattatcatggcgtcagtagctgcccggac

SEQ ID NO: 6884 - DNA, 1008 bp, DROSOPHILA
atgtcgaaactcatccgttggggaatcgcttccgccggcaagatcagcgaggactttgtcatcgccctcagcaccctgccctccagcgaccacaaggtccaggctgtagccgcccgagctcttgatcgcgcccaggagttcgccaccaagcacggcattcccaaggccctcggaagctacgaggagctggccaagagcaccgatgtcgatgtggtctacattggcaccctgaatccccagcactacgaggtcgccttgctgatgctgaacaatggcaagcatgttctctgcgagaagccgttggccatgaacaagaagcaggtggagggcatcctggccgctgccaaggccaacaagcgcttcttcatggaggccgtgtggtcgcgattcttcccctcgtaccagcgcgttaaggagctcatctccagcggacagctgggccaagtcaaggatgtggaggtcaactttggcttccctatgcctcatgtcgaccgcttgcagaaacgcgaactgggaggcggtgtggtctacgatctgggcatttacaccatccaggtctcgcagtgggccttccaggagaaaccggagaagatcgagtccaagggaaccctgaacgccgagggcatcgacgatgatgttagtgccaccttgacctacagtggtgggcgcactgctcgcatgcgcttctcctccaaggagaagttgggaaacaccgccgttatcaagggcaccaaaggacaagttaccctgattgacttctggtcgcccaacaagctcatcgacatcgatggccaggagaaggagtggctgcctcccaagggcaagtacgcgaccaactacgccaactccgaggccatgcgctatgaggcggaggcagtgcgccagtccatcatcgccggcgaagtggagaacaagaacgtcacctacgccgacagtttgatcttcgccgagatcgaggacaccatccgcaagcagatcggtgtgctgaacaagtacgatgagcagtaa

SEQ ID NO: 6885 - protein, 335 aa, DROSOPHILA
MSKLIRWGIASAGKISEDFVIALSTLPSSDHKVQAVAARALDRAQEFATKHGIPKALGSYEELAKSTDVDVVYIGTLNPQHYEVALLMLNNGKHVLCEKPLAMNKKQVEGILAAAKANKRFFMEAVWSRFFPSYQRVKELISSGQLGQVKDVEVNFGFPMPHVDRLQKRELGGGVVYDLGIYTIQVSQWAFQEKPEKIESKGTLNAEGIDDDVSATLTYSGGRTARMRFSSKEKLGNTAVIKGTKGQVTLIDFWSPNKLIDIDGQEKEWLPPKGKYATNYANSEAMRYEAEAVRQSIIAGEVENKNVTYADSLIFAEIEDTIRKQIGVLNKYDEQ

SEQ ID NO: 6886 - DNA, 3611 bp, DROSOPHILA
attacgatgatgatgaagacggcgatgacagggcagcatttaaccagcgctcagcagttagataactatatataaattatggaagccagacgataaaaatcctcgacagatcgctctagaacgtctaccatagtttataattctaaatatacgtatgttgaaaatgtttgattgcaattgtgaacaaattataattggttttatcttattttccaatatactcagtattctgtaaataattgacttttatttaaatacctttttagctcaatagctgttttaaattcaggagaaatattatttctattgagtgcaatgcattcgagctcagaaactcaatcgtttagctcggttgtgattttccatacaaattcgtatgcaaattcaaaggtatatatagccaatagtcggggcaacaacgcgctcgcaagggaagcacttgagccttactttgatgcacatatccccattaagttggcccccgtcgagcttgtggctcccaatgcggccatgcagtaggtgagagagagagagagatctcttggcctcttggcccagaacccactcaaatatgctaatccactggaagtccacacagacctccacagacagcccacagtagagtgcatgtttctgagcttcaggaaaagtagttgcataaagctacaatgcctttccagaatctcacagaggaagtaatttgaaattacggaaggacaggctttcaattacggtaagctaacttaccgatataaagggaacattctgtaatcgtgggcaattgacagattctgtcaatgacagaaaatcaagaaaagtggctttatattcgcagcttaaaaatattagccagctcttatctgtttcacttaattcttcataacatacttgtaatttgaattaacctgaatattattttctaaacttatttatccagctgaaaactgtcgttttttaatatctgaaaattttctagcagtcttcagttagtcagtagatttcgttaggttactagcacaaaaaaaaaacattttgagtgaactaataccactcaaaacgccttgacatatcacatatttcattcccagttaaattttcctaagtaatttctttaaaaggaagtggtttgttttcttgaaccacgatggaaaatctccaaccggagtcggatcgcgttggccatattgtctgggatgaaccgggagcctcgatttttgccaccgcctcccaggagcccgtaccgaatcttctgaccgagttcaaaccaatgccgaagggcgaggacgactgtgtttctgataaggatgtgtgccgcattcttacacagtcgtctgtcgcggagagctcattgttccgaatggtcaaacaccaggtggacgaagtggccgccatgctcaacagtcacctgcatccgcgccaacggaaggagcaaaccgatgtggatgtcaccctcggtgtagcaagggaactggctcgccagcaggtggaggccagtagatgccttcaacttcatcgcaatgtggaaaatttgagggatctcgagatggaagtggcccgtgcccacacagcgttggctgtcaagaacaagatcaccaacaatatcaaacaaacggtggaagataagcagcgggagcgggccgaagctttggcggaacagcgagccgtggaaaaggagctgaaggaggagaagcaaagaagggctcagaaggcagccgtgtttcgtagagatctaatggcccagattaccgaggggcgtaccaagcggatacaagatcatcgaatagctgtggccgagggtcgtcaagagctaaaggaatgcaaggagatagtggagcagggaatcctaaaggatgcagttacaaaggcgcagcagcgcaaggtgctcctcgaatccctagaccaatcggcagccatgttgaagcaaacccgcgaggcctacgctctggcccaaaagaataagcccgagagaggactccttgatgccctgggacccgttacggcggcctatgtgtcaaaggcacggaaacgacgccttgatgagatcgaggccagggacattaatgccgctcggctgggcttccagctcagccagatcaagcacgatctggagtcccgagatcaagtcatcaccagtctgctaatccgcgagcacaaggccaaggagaacgcgaaggccttggaacaggctagaaccaaaatggccaagaagcaggagattcgcgaacagctcctcagccagcgggaagagcagaagttcttccgagataagggtgtgcaggatgccctggtcatgcccaaggatcccatgtgcttcggcgaacgacagtatcgaatgcaagtggcccagcgggagaacacccggcgcttggatgtccaatgctaccaggacatggcccacatggtcgtggaggccaagaataacaggaaagccgctgcccaggaggtggttgacattgtacaggaggtctacaaccaacagaatcgccaggatgagcttgtggctattgagcggatgaagctgctctccaagcagccacctgaagttctttcagcgctcaagaaatccattctcaccgaagaggagatcaagtctttaaaccttaagaagtagttaatgagttttcatttaatacgcgctagatgcccgtattaaggcttgtagaaacaaaaaatacaaaaaagtactttttgtttttttcttcgggttattattaaacctacgcccccctggatgttggctattatttatcaagtatactacctcatgtgaagcagcccactggcacaggatgtgcttaattttccattttgctgctctgcacttttaaatagactttgctggcgctgccgggatggcaaatgaaattcactttcttatccattctttggccaagcttttgcagcaggtcaggtttccaggtttcgtactcgagcaaccggtttaccgacattgcagctggaaatttgtttacaataatacggttcgaacgcacgcagatgggagcgtaagtgcactttgaaaccgggcttacatacatttcctttactttccatttctggactcattagccggctgccggaggagacaggtttatatttcataactggctggcgaagaaggctcaagaatgttggcaaagtcagttttttggcaaccattttggagcactctcttgacgacctgcggaaactttccctggcaataactttggctccaagtttcagcttcaatgtgcagaaaaaaagatatatttatgctttcagtacactgtaaactatcgaaagaaactctttttgggtgctgcgagctcaactagttctataaactgtagtcatactattaaaatgaaacatgctagttgtactaaccaggaaattagggaaattcttgttagatcaatgcttggtttctttcagtgcagacttatagaagcgaccagcacaatcacaacccagtttctgtttcaacttaagtctgctgaatggtgtgaggttgttttgtcttttcgactctggtctggtcatagaggagcagcttggttggcaaactttttatgccgaaactttttttttgggccagatcttcaagttggccaaaaagatgtgaagtt

SEQ ID NO: 6887 - DNA, 1611 bp, DROSOPHILA
tcgttaggttactagcacaaaaaaaaaacattttgagtgaactaataccactcaaaacgccttgacatatcacatatttcattcccagttaaattttcctaagtaatttctttaaaaggaagtggtttgttttcttgaaccacgatggaaaatctccaaccggagtcggatcgcgttggccatattgtctgggatgaaccgggagcctcgatttttgccaccgcctcccaggagcccgtaccgaatcttctgaccgagttcaaaccaatgccgaagggcgaggacgactgtgtttctgataaggatgtgtgccgcattcttacacagtcgtctgtcgcggagagctcattgttccgaatggtcaaacaccaggtggacgaagtggccgccatgctcaacagtcacctgcatccgcgccaacggaaggagcaaaccgatgtggatgtcaccctcggtgtagcaagggaactggctcgccagcaggtggaggccagtagatgccttcaacttcatcgcaatgtggaaaatttgagggatctcgagatggaagtggcccgtgcccacacagcgttggctgtcaagaacaagatcaccaacaatatcaaacaaacggtggaagataagcagcgggagcgggccgaagctttggcggaacagcgagccgtggaaaaggagctgaaggaggagaagcaaagaagggctcagaaggcagccgtgtttcgtagagatctaatggcccagattaccgaggggcgtaccaagcggatacaagatcatcgaatagctgtggccgagggtcgtcaagagctaaaggaatgcaaggagatagtggagcagggaatcctaaaggatgcagttacaaaggcgcagcagcgcaaggtgctcctcgaatccctagaccaatcggcagccatgttgaagcaaacccgcgaggcctacgctctggcccaaaagaataagcccgagagaggactccttgatgccctgggacccgttacggcggcctatgtgtcaaaggcacggaaacgacgccttgatgagatcgaggccagggacattaatgccgctcggctgggcttccagctcagccagatcaagcacgatctggagtcccgagatcaagtcatcaccagtctgctaatccgcgagcacaaggccaaggagaacgcgaaggccttggaacaggctagaaccaaaatggccaagaagcaggagattcgcgaacagctcctcagccagcgggaagagcagaagttcttccgagataagggtgtgcaggatgccctggtcatgcccaaggatcccatgtgcttcggcgaacgacagtatcgaatgcaagtggcccagcgggagaacacccggcgcttggatgtccaatgctaccaggacatggcccacatggtcgtggaggccaagaataacaggaaagccgctgcccaggaggtggttgacattgtacaggaggtctacaaccaacagaatcgccaggatgagcttgtggctattgagcggatgaagctgctctccaagcagccacctgaagttctttcagcgctcaagaaatccattctcaccgaagaggagatcaagtctttaaaccttaagaagtag

SEQ ID NO: 6888 - protein, 488 aa, DROSOPHILA
MENLQPESDRVGHIVWDEPGASIFATASQEPVPNLLTEFKPMPKGEDDCVSDKDVCRILTQSSVAESSLFRMVKHQVDEVAAMLNSHLHPRQRKEQTDVDVTLGVARELARQQVEASRCLQLHRNVENLRDLEMEVARAHTALAVKNKITNNIKQTVEDKQRERAEALAEQRAVEKELKEEKQRRAQKAAVFRRDLMAQITEGRTKRIQDHRIAVAEGRQELKECKEIVEQGILKDAVTKAQQRKVLLESLDQSAAMLKQTREAYALAQKNKPERGLLDALGPVTAAYVSKARKRRLDEIEARDINAARLGFQLSQIKHDLESRDQVITSLLIREHKAKENAKALEQARTKMAKKQEIREQLLSQREEQKFFRDKGVQDALVMPKDPMCFGERQYRMQVAQRENTRRLDVQCYQDMAHMVVEAKNNRKAAAQEVVDIVQEVYNQQNRQDELVAIERMKLLSKQPPEVLSALKKSILTEEEIKSLNLKK

SEQ ID NO: 6889 - DNA, 2676 bp, DROSOPHILA
ttatttaatatcggctggcaatttcataacagcaatggatcgagtaatcacaattaataacttttggaatgcttcagcttttggcactcggtattgtggttattgtgatccagacctctttaggaatgagcggattgtggacttttctgctgatttttatgtctccgatggcagtaagaatcgaatgcgtatggctaatagatggcactatagaataattgatatccaaagatccgaggacacttcgaattcaataatgtagtctgcctcgtgcgcgacaggatgtttatggactttgagtactgttacttgaagtccgtgaaccgcacctacaagtacctttcgctaaaaacaaagatgttccgcctgcccgtcgacaactgcgaggtaagagtatagaactgtgtcggtctcacaccacccgaccatcttccagaccagattccagctgaggatgcgcgagaacaggcgagtcctgtacaactttgatttcaaggtggactcctgcaagttcatgcgcgaccgcaagcacgtgatcgccaactgggtctaccagaccttcggcccctactcgaacctgaaccacacctgcccctacgacgtgagtgagcgttgccatgttcatgccgcataaccttcgcctttctcacccacccacccacagcacgacatcgtgctcgacaagcttcccgtgcagcatctgaacaagctggtccagtcgatcatccccgatggcagatacatgatgaacagcacatggatggtcgcgggcattccgcgcaccgatgtcatcctatactttaccaagagctaaacagtcaaatccagtaatatccaggctcttcaacccgtaagcagaaatattggtaaggtgttatgccgttttagtattggatgggggtcagcaggaccaatatagtaaatatagtaagtctaagtgggtctgtatgtgatgtatttgtcacattactgagatttacgaaaataaatatagtgtagtgacgaaagttaacttaaacatgtacataggtttcagactaggccagttcgtaagcgttaacaattatgtgcagagtttctgcacaggtggctggcagtgacctggatgcactgcacctgtcgtctgtcaagtggctgctaatgcgattagggagcacacagaaaacgggattggcactcgggactggcaactcagctgccaatcaggtgggccagccacaaacttcacacatttcggacacatatatcaatccactccacaaccagaaggacacgaagtaaagtaaacacaaccccacacccctgacaagatgccggcggacatagtgaccacggagcagctgcgctaccagctcgccttcagtcatgccatggaaaggacgacgaggcactggcaggagaccttcgcgtggtaccctaagatgcagtgctgccattatcagcggattgaccagatctatctgacgagtcgccagcggtacggcgacggccacttcctcaagtacgccaaccgcaggcgcctggcaaagaagttcgtggttaccgcccaggaggttgcggaaggtttggaggatctgaagatgctggagcaagacggcattacgggcctcaaagttgcggtcaccgagaacggggagtacggccgaatgaagccctccaagctgtacatgtgctaggacaccctgtgaccagccggcccgctctgctccccaatcctcgccagaacccctcacgattaaactatcattctctgctgacaatgcaactctcaatggccgtcactcattacgcgattttagcatgaccgtgcgcataattaacaaggtgaaaacgtcagtcccacctgcaactgcttgccccgcccgcctcgccgccgtagcgagtgctcactgtaccttctcctactggggcgcagttgaaaagttcacacaggtaattaagtgatcgcgtctgtccactccatgagatgacttgcctcgcttgttcgggatctcggaaactgctttatggcgcccataaactgggaaatattatgctcagtgaattaattatagataccatgcgaatcttaaggatttcgtttaggacagtcacttcgcctgataactgattgataaatttacaattgtgaaatataatctgggatactgtttgcgaaaatatagttatttcggggcacgccgcactgcgagttccttgataaatgtgtccatcgacgcagctgctcctcctgcgattgcagacgtaagcccaggtgtcgtgggccaacttcgagcagtatgatttaaaagttccatatgcaaattaccctcaaagtttccggcgagcccatccgtctatcggagtgcgtggtagatggaaatgcgaaagtggcaagtggaaatgtgaactgtgaaatggggaaaataggaaatgcaaatgcccatgcaagtgtgcaaattacacaaaggacgctaactttgggccaacttgcgaactgggccagcgactcattagacacatgacagcattcacagagtgggtggtggttcaatcggcccaatgtgcggggaaggggaggtggatcgtcaggtgggcagcggcaagtgcgtgtgaaaaatcagccatcagcagcccacagaatcgccaagcgcgcaattaaacggtagcggataattgctatcgaaagccataatg

SEQ ID NO: 6890 - DNA, 676 bp, DROSOPHILA
gacgaaagttaacttaaacatgtacataggtttcagactaggccagttcgtaagcgttaacaattatgtgcagagtttctgcacaggtggctggcagtgacctggatgcactgcacctgtcgtctgtcaagtggctgctaatgcgattagggagcacacagaaaacgggattggcactcgggactggcaactcagctgccaatcaggtgggccagccacaaacttcacacatttcggacacatatatcaatccactccacaaccagaaggacacgaagtaaagtaaacacaaccccacacccctgacaagatgccggcggacatagtgaccacggagcagctgcgctaccagctcgccttcagtcatgccatggaaaggacgacgaggcactggcaggagaccttcgcgtggtaccctaagatgcagtgctgccattatcagcggattgaccagatctatctgacgagtcgccagcggtacggcgacggccacttcctcaagtacgccaaccgcaggcgcctggcaaagaagttcgtggttaccgcccaggaggttgcggaaggtttggaggatctgaagatgctggagcaagacggcattacgggcctcaaagttgcggtcaccgagaacggggagtacggccgaatgaagccctccaagctgtacatgtgctag

SEQ ID NO: 6891 - protein, 121 aa, DROSOPHILA
MPADIVTTEQLRYQLAFSHAMERTTRHWQETFAWYPKMQCCHYQRIDQIYLTSRQRYGDGHFLKYANRRRLAKKFVVTAQEVAEGLEDLKMLEQDGITGLKVAVTENGEYGRMKPSKLYMC

SEQ ID NO: 6892 - DNA, 4664 bp, DROSOPHILA
gtcggtgcggtgtgtgtgcgattcggtggcttttagtggcgctggtccgctgataactgctccgtgtgcgtttcgtttggcatgaattggtggtgctggtgctctgttatctctcgttttgtgcttttgtccgactgtgtgagtggtgagtatttcaatgttgctcgctttttaaatatttagaagctaaaagaagacgcactttagttgaatattcgctatttacttttctctaatgttcccaagaacaacaagtgacacacttacgcacacagccacacacacacctgtgtacgtgtgcccacctatttgggcactcactgtggttgttgttgctgctgctgctcgctcacctgatgaatttagatttgatcatcgtcatcgtctccgctgctttccgctctccgtgcatcgtgcatctacacccattactgtttagtggcccttcttagatgggttttcacgcttgcagcatttgcagcgtttttttttttggcactttggcaattacaattacaaatacaattaagtggtagtaccaacacttccgcagatttgcggactagatttgcgttcttgcagcacgaaattcgcgcttttggcgcgggttttgaagtcaagaaagggaaggcagtccggcccgcactttattgcctcattttgcactattttcgtagtgtttccaaagcaattctgcgtaaatatttacaattatatctgcacggaaatagaaagttagcgatgagcagctatcaatataacatatcgatgtttcgattatacctgagatacatcgggaatttttgacatcggggtgtagcaattccattttagttttatttttatctaattatctattcacttttaaaacagcgtgctatgatcacaagtattagtttgattaaatgcgttctgtttcattatcccagcgttccacttaccagtatttcttatcgcctgtgtgaccagacttccgcgcttctatcagctgttcgcgctaccgccatttgaatttaatgaaatggtaaatacaaaaatttgatttatttaattccatttccctaatcatttattcctaaagcggcgcagtctggctcccagccaacgtggaccactgcgtcccgagtcccgtcactccttcacgccgccactgctgaagaaaaacaagcgatcctgccagcaggaactggagcgagagcaagaactggacagaagacgactgggcgccctccgagatgccagcaacacatcagagctcccactgcctattcgcttcacggcgaacagcgagtatgagttggccattgccaaggttctggcacggaagttcaaggtgcccatggacaattacgtaccggattacggtggtaaacgggtcctgggcgtgcggcgctgcatttcccgacgacccctacacgatccgatggcctgcaacgccttggtactcttccatccacccgcctacacagaacacgagcgcatgggcatggatccgaccaaggttctggtgcacgtcgtcgtcgatccgctgctgagcaacatattgcggccgcaccagcgcgagggagtgcgtttcatgtacgagtgtgtggagggaaagcggggcaacttcaatggatgcatcatggccgacgaaatgggtctcgggaagacgctgcagtgcgtaacgctggtctggacacttctaaggcaggggcccgagtgcaagccgacgatcaacaaagccattgtcgtgtctccatcatcgctggttaagaactgggagaaggagtttaccaagtggcttcacggtcgactcctttgcctgcccatggagggcgggaccaaggagaacaccatccgagcactcgagcagttctccatgacttctgcccggctggggacacctgttctgctcatcagctacgagacatttcgcatctacgcggagatcctgtgcaagtacgaggtgggaatggtgatatgcgacgagggacatcgcctcaagaacagcgacaatctgacgtatcaggctctcatgggactgaagacaaagcgacgggtcttgctttccggcactcccatccagaacgatcttactgagtactacagcctggtgaactttgtaaacccggagatgctgggaacggcggccgtgtttaagcgcaacttcgagagcgctattctgcggggccagaatactgactccacggaacaggagcgacaacgggccatagagaagacacaggagctgataggtctggtcgatcagtgcatcattcgtcgcactaatcaaattctaaccaaatatctgccggttaagtttgaaatggttatctgtgcgaaactgacggcgattcaactcgagctatacacgaatttcttgaagtctgatcaagttcgacgtagtttggcgggtaagtcattaggcaatactaccacaacattcctaccatttacaattcccttcaagattgcaatgaaaaggcttcgcttacggcgctggcagacattacaacgcttaagaagatttgcagtcatccggatctcatatatgagaagctcactgcgcgggaaaagggattcgaaaactcccaaaatgtgctgcctagtaattacaaaccaaagtacgtcgcctgttgcgcgcgaatagcaatggctattaatgaatcttttgtgttccagggatctcaatccagagctaagtggcaagttcatgctcctggatttcatgctggcagcaatacgtgcagagggcaacgacaaggtggttctcatttccaattacacacagaccctggacttgttcgagcagctcgcgaggaagcgaaagtacggatttgtccggcttgatggcaccatgtccatcaagaagcgatcgaaggttgttgaccgattcaatgacccggagtctgacagcttccttttcatgctgagcagcaaggctggcggctgcggcttgaatttgattggagccaaccgcctgttcatgtttgacccagactggaatccggccaacgatgagcaggcaatggccagagtgtggcgtgacgggcaaaagaagccctgttacatatatcgcctcgttgccgtgagtacctgaattggttctgcacggaactttctttttcaactcaagaaatctctttcagagtggttccatcgaggagaagatcctgcagcgacagacgcacaaaaaatccctgtcgagcaccatcattgacaacaacgagtcggccgagaagcatttcacccgcgacgatctgaaggacttgtttacatttgatgcgaacattctgtccgacacacacgacaagtaagaactggctttggataccctttagatcatgatcgtgtaacatatcttttcaggctcaagtgtaagcgctgcgttcaaaatatacaaatgaagccaccgcccgaggacacggactgcacctcgcatttgtcacaatggtaccattgctccaacaacagaggcctgcctgacaatattctcgcccaggcctggatggattgcaagtgcgtgtcctttgtcttccaccaccgatcgcaggctcaggaaattgtgccgagtgctgaggaggaagcaacagatcagccagaggaaaaaccagaaagccgcaaacgatcatccacgcccgccagtgatgacagtgccgatgaggacttccgtggattctagcaattgtttgcagtttattgtttctcgaatttcctttttcttcgcacttaagtctaaacttaagataactttttctggcttcctttgcaatcctaacaagttattaatttaacatttcaaaaatggaaccagcacaaaatgttaacgtgctaggggtgaaggcttctataaactaatctggcaatgtaggagtcagtccagaaaatagtttacttttttgtgaaatactgatcaatttctatactcttaactggccgccaatcgggcaaagtagtaggttaacatagcttaggacaaatacaagcaaacatcgaaattcggattctagtgtgtattcacttgcttaagcgcaaagttatttaagttggttacttaaaatcaacagccatctccgctagcacgttattctctgcacataaaaagcaatttggcgtatagcaacgtccggattaaaaccctgtcagatacagattaatattatgcgtgtgtatatgtataagtattaaaccattcgcagtgttaacacagtcaattgaacacttgatgtattcgggtctatacatcaataattttatgctccagctccacccagacgttgctcttctccggcgccttgaggagcggctgttgctgcagctcggccaaaaacccaccgatggcctgatagtacctaaaaagcaagcacacccatggataaatgggaaagtgaagattaattgccggccatacccgtccactatccaagtgtcgttgtgcgatccgccggggaattcgagcaggcgctttatctcgctgccgcatttggtatacaaggcacgcatcatgcgcggtggcactaagttgtccgcaaggcccgaaataaacaaaaagggaaccgaacacttgcctatcttgctcatggagtgatactgcatgtgaaacaacaaacaataatgtggtaatgagataaagtaaacagagggctcaaccggcgacgactacccaccttattcttaaataa

SEQ ID NO: 6893 - DNA, 2376 bp, DROSOPHILA
ccgccatttgaatttaatgaaatgcggcgcagtctggctcccagccaacgtggaccactgcgtcccgagtcccgtcactccttcacgccgccactgctgaagaaaaacaagcgatcctgccagcaggaactggagcgagagcaagaactggacagaagacgactgggcgccctccgagatgccagcaacacatcagagctcccactgcctattcgcttcacggcgaacagcgagtatgagttggccattgccaaggttctggcacggaagttcaaggtgcccatggacaattacgtaccggattacggtggtaaacgggtcctgggcgtgcggcgctgcatttcccgacgacccctacacgatccgatggcctgcaacgccttggtactcttccatccacccgcctacacagaacacgagcgcatgggcatggatccgaccaaggttctggtgcacgtcgtcgtcgatccgctgctgagcaacatattgcggccgcaccagcgcgagggagtgcgtttcatgtacgagtgtgtggagggaaagcggggcaacttcaatggatgcatcatggccgacgaaatgggtctcgggaagacgctgcagtgcgtaacgctggtctggacacttctaaggcaggggcccgagtgcaagccgacgatcaacaaagccattgtcgtgtctccatcatcgctggttaagaactgggagaaggagtttaccaagtggcttcacggtcgactcctttgcctgcccatggagggcgggaccaaggagaacaccatccgagcactcgagcagttctccatgacttctgcccggctggggacacctgttctgctcatcagctacgagacatttcgcatctacgcggagatcctgtgcaagtacgaggtgggaatggtgatatgcgacgagggacatcgcctcaagaacagcgacaatctgacgtatcaggctctcatgggactgaagacaaagcgacgggtcttgctttccggcactcccatccagaacgatcttactgagtactacagcctggtgaactttgtaaacccggagatgctgggaacggcggccgtgtttaagcgcaacttcgagagcgctattctgcggggccagaatactgactccacggaacaggagcgacaacgggccatagagaagacacaggagctgataggtctggtcgatcagtgcatcattcgtcgcactaatcaaattctaaccaaatatctgccggttaagtttgaaatggttatctgtgcgaaactgacggcgattcaactcgagctatacacgaatttcttgaagtctgatcaagttcgacgtagtttggcggattgcaatgaaaaggcttcgcttacggcgctggcagacattacaacgcttaagaagatttgcagtcatccggatctcatatatgagaagctcactgcgcgggaaaagggattcgaaaactcccaaaatgtgctgcctagtaattacaaaccaaaggatctcaatccagagctaagtggcaagttcatgctcctggatttcatgctggcagcaatacgtgcagagggcaacgacaaggtggttctcatttccaattacacacagaccctggacttgttcgagcagctcgcgaggaagcgaaagtacggatttgtccggcttgatggcaccatgtccatcaagaagcgatcgaaggttgttgaccgattcaatgacccggagtctgacagcttccttttcatgctgagcagcaaggctggcggctgcggcttgaatttgattggagccaaccgcctgttcatgtttgacccagactggaatccggccaacgatgagcaggcaatggccagagtgtggcgtgacgggcaaaagaagccctgttacatatatcgcctcgttgccagtggttccatcgaggagaagatcctgcagcgacagacgcacaaaaaatccctgtcgagcaccatcattgacaacaacgagtcggccgagaagcatttcacccgcgacgatctgaaggacttgtttacatttgatgcgaacattctgtccgacacacacgacaagctcaagtgtaagcgctgcgttcaaaatatacaaatgaagccaccgcccgaggacacggactgcacctcgcatttgtcacaatggtaccattgctccaacaacagaggcctgcctgacaatattctcgcccaggcctggatggattgcaagtgcgtgtcctttgtcttccaccaccgatcgcaggctcaggaaattgtgccgagtgctgaggaggaagcaacagatcagccagaggaaaaaccagaaagccgcaaacgatcatccacgcccgccagtgatgacagtgccgatgaggacttccgtggattctag

SEQ ID NO: 6894 - protein, 784 aa, DROSOPHILA
MRRSLAPSQRGPLRPESRHSFTPPLLKKNKRSCQQELEREQELDRRRLGALRDASNTSELPLPIRFTANSEYELAIAKVLARKFKVPMDNYVPDYGGKRVLGVRRCISRRPLHDPMACNALVLFHPPAYTEHERMGMDPTKVLVHVVVDPLLSNILRPHQREGVRFMYECVEGKRGNFNGCIMADEMGLGKTLQCVTLVWTLLRQGPECKPTINKAIVVSPSSLVKNWEKEFTKWLHGRLLCLPMEGGTKENTIRALEQFSMTSARLGTPVLLISYETFRIYAEILCKYEVGMVICDEGHRLKNSDNLTYQALMGLKTKRRVLLSGTPIQNDLTEYYSLVNFVNPEMLGTAAVFKRNFESAILRGQNTDSTEQERQRAIEKTQELIGLVDQCIIRRTNQILTKYLPVKFEMVICAKLTAIQLELYTNFLKSDQVRRSLADCNEKASLTALADITTLKKICSHPDLIYEKLTAREKGFENSQNVLPSNYKPKDLNPELSGKFMLLDFMLAAIRAEGNDKVVLISNYTQTLDLFEQLARKRKYGFVRLDGTMSIKKRSKVVDRFNDPESDSFLFMLSSKAGGCGLNLIGANRLFMFDPDWNPANDEQAMARVWRDGQKKPCYIYRLVASGSIEEKILQRQTHKKSLSSTIIDNNESAEKHFTRDDLKDLFTFDANILSDTHDKLKCKRCVQNIQMKPPPEDTDCTSHLSQWYHCSNNRGLPDNILAQAWMDCKCVSFVFHHRSQAQEIVPSAEEEATDQPEEKPESRKRSSTPASDDSADEDFRGF

SEQ ID NO: 6895 - DNA, 3798 bp, DROSOPHILA
aaactacaagcaattgcaccactcaaactcacaaaatcatgcggggttgtacttctcaaaaggattctgctccacttggaagagtgttttaaatttggaattctgatttgttagcgatccttccgcgtaaaaccaatgtaagcagtgcagtggaaaacccaaccattattttaattgtatatataataaattagacatatttcaatcggcctatatctttgccagtgtagatgcagcgagggacatagctcgagtttgagttcgagttttagtttgaggtcgtcgctgcgggaagatcccaggcacgtagctccctcggctccttaagcaaccccaggctcccactccacggggctgtcttcgctaagtcctttataataaatagttgagtcgctttgggggattagtgctgaaattagtttatgccaatgagattaggcatgacatgccgaacgccatgttcatcccggctgagaactgaaactagtcgcacatgctcatggaccttagtgagtttactccaggaaaccagcaaagtagcttagtcatcagattggagttatctgttcgaattaatccgttttgtgtgtggccatcttgctaccatctaatggaatatttcgattaggatctatttatatatctcagttacgtcatttgattttcccatttcgcaatggggttgaaagttgcgccgaaatttgtagcttatgtggtttttgaatatattgttaatggagcatgcaatagcattcagatagttcttataaatataattatattatgttcttgtgacttccaatgctaattgataagcaaacttattcttttaatgtttgttttttatttcgctttcgcttaatcaggtaaactcatacacacactcacacgttttgccggttttttctctcccgctatatatgtgcctatagtatctctctccgagatagcttatatatatacagaaagagcgcacattgtttatttcagtggcgtaccgtctgttgactggcgaagtagctctctgaatttttcggaacctccacgcgctgcgcagctcgattagagtcccctactccctactcccacgctccatccccaaaatcccgtcatggttttcgtggagttgtcgatattcgtagccttcatcggtttgctattgtacaaatggtccgtctacaccttcgggtatttctcgaagaggggcgtggcccacgaaaagccaattcctctgctaggaaatattccgtggtcggtgctgatgggtaaagagtcgtacataaaacataggcaagtaaatatgacgattttttttagctccttctaattacgttttaccgtttctattagcattgacctgcacttgcgcctgaagcagcacaaggtctatggagtcttcaacctgcgggatcccctatactatctctccgacccggaactcattcgccaggtgggcatcaagaacttcgataccttcaccaaccatcgcaaggggataactgaaggattcaacgataccagcgtgatttccaagagcttgctcagtctgcgggatcgtcgctggaagcaaatgcgcagcaccctgacgcctactttcaccagcctcaaaatccgacagatgttcgagctcatccatttctgcaatgtagaggcggtggacttcgtgcagcgccaactggatgccggcacttccgaactggagctaaaggacttcttcacgcgctacaccaacgacgtgatcgcgacggctgcctttggcatccaagtgaattccttcaaggatcccaacaacgagttcttttccatcgggcagcgcatttcagagtttactttctggggcggactcaaagtaatgctatacattctgatgccaaaattgatgaaggtaaagacatcaccactccattcttttttcaaattgtaaaacctttccgcccttttaggcacttcgggtccccgtgatggacatgaataacgtggactacttcaaaaagctggtcttcggtgccatgaagtatcgaaaggagcagagtatcgtgcggcccgatatgattcatttgctgatggaggcgcagagacagtttaaggcagagcaagaaggatctgcggagagtgcagcacagcaggataaggccgaattcaacgatgacgacttgctggcccagtgcctcttgttcttctcggcaggattcgaaacagtggccacctgccttagcttcaccagctacgaacttatgatgaaccccgaagtgcaagaaaaattgctcgcggagatcctggccgtaaaggagcagctgggtgagaagccactagactacgacaccctgatgggcatgaaatatctgaactgcgtggtgtccgagtcgctgagaaagtggccaccggcgttcatcgtggatcgaatgtgtgggtctgatttccagttgaaggatgaggaaggcgaggtggtggttaacctgcgggaggacgacttagtgcacatcaacgtgggggcacttcatcacgacccggataacttcccggaacccgagcaattccgaccggagcgctttgacgaggagcacaagcacgagatccggcagttcacgtacctgccctttggagtgggccaacgaagctgcataggcaaccggctggctctcatggaggtgaagtccctgatcttccagttggtcctgcgctaccacctgaagcctacggatcgcactccggcggacatgatgagcagcatctccggtttccgactgctgccccgggagctgttctggtgcaagttggagtcccgtggacccgcttaattaaaaacacgcccccagacacacataaatattaataaagcgagagaaacgaaacaaaaacgggccatttatttcatctggacacccttgtgctgacaaatttgtcgcggccatgtttcattctccattcgctttgttttcccttggttctccggctttaaagtccatgtcacgggcagagattccgggttaggagcgggcgacgagcaacgtcataatactgtcaggacatgatggcctcgtccaaccacctaggttgtatgtgttgcggttacaccgcataaaataacagggggtgtgggtggtgggcggtgtcaccagctacacatacgccctcccgctctcccgtccacttgcacaccagcacagccacccactcacacacacggaacattaaggattatttattgggaggtatttttcaagcggcattaacatttttcggtacaatatgaattatattacactcgtgtcataaactcactgtcgcagggcgtgaaaaacgttggctggtaagggaaaatctctcctccttcttccgattttcacaccccgcaatagtctgtctaaaatatgccgtgcagcaaagtcagataattaacatcatcatgtgttgcaaggatatattcgaaatttgcggtgacttcagctatctgaactggagaaccaaattaagttagttagtctttggcccattgaaatgcagaaatcggtcagaagtccttggcgttatgttttccttttggaaaacgttcgggtcaaaccctgggaaactcaaagtgggctgcttttgattataagccatattccactatacttcatctactttacgactttacaactgcagtaatactgcgctaacctgcttagtttcatctctttacttttagtggtgctttgtaagccatgtttactacgtactggcaattcacttggcctgtaaatctgattagcttgaagaacttggcccaactttctgcatctattgatggccatggtg

SEQ ID NO: 6896 - DNA, 1680 bp, DROSOPHILA
tctgttgactggcgaagtagctctctgaatttttcggaacctccacgcgctgcgcagctcgattagagtcccctactccctactcccacgctccatccccaaaatcccgtcatggttttcgtggagttgtcgatattcgtagccttcatcggtttgctattgtacaaatggtccgtctacaccttcgggtatttctcgaagaggggcgtggcccacgaaaagccaattcctctgctaggaaatattccgtggtcggtgctgatgggtaaagagtcgtacataaaacatagcattgacctgcacttgcgcctgaagcagcacaaggtctatggagtcttcaacctgcgggatcccctatactatctctccgacccggaactcattcgccaggtgggcatcaagaacttcgataccttcaccaaccatcgcaaggggataactgaaggattcaacgataccagcgtgatttccaagagcttgctcagtctgcgggatcgtcgctggaagcaaatgcgcagcaccctgacgcctactttcaccagcctcaaaatccgacagatgttcgagctcatccatttctgcaatgtagaggcggtggacttcgtgcagcgccaactggatgccggcacttccgaactggagctaaaggacttcttcacgcgctacaccaacgacgtgatcgcgacggctgcctttggcatccaagtgaattccttcaaggatcccaacaacgagttcttttccatcgggcagcgcatttcagagtttactttctggggcggactcaaagtaatgctatacattctgatgccaaaattgatgaaggcacttcgggtccccgtgatggacatgaataacgtggactacttcaaaaagctggtcttcggtgccatgaagtatcgaaaggagcagagtatcgtgcggcccgatatgattcatttgctgatggaggcgcagagacagtttaaggcagagcaagaaggatctgcggagagtgcagcacagcaggataaggccgaattcaacgatgacgacttgctggcccagtgcctcttgttcttctcggcaggattcgaaacagtggccacctgccttagcttcaccagctacgaacttatgatgaaccccgaagtgcaagaaaaattgctcgcggagatcctggccgtaaaggagcagctgggtgagaagccactagactacgacaccctgatgggcatgaaatatctgaactgcgtggtgtccgagtcgctgagaaagtggccaccggcgttcatcgtggatcgaatgtgtgggtctgatttccagttgaaggatgaggaaggcgaggtggtggttaacctgcgggaggacgacttagtgcacatcaacgtgggggcacttcatcacgacccggataacttcccggaacccgagcaattccgaccggagcgctttgacgaggagcacaagcacgagatccggcagttcacgtacctgccctttggagtgggccaacgaagctgcataggcaaccggctggctctcatggaggtgaagtccctgatcttccagttggtcctgcgctaccacctgaagcctacggatcgcactccggcggacatgatgagcagcatctccggtttccgactgctgccccgggagctgttctggtgcaagttggagtcccgtggacccgcttaa

SEQ ID NO: 6897 - protein, 522 aa, DROSOPHILA
MVFVELSIFVAFIGLLLYKWSVYTFGYFSKRGVAHEKPIPLLGNIPWSVLMGKESYIKHSIDLHLRLKQHKVYGVFNLRDPLYYLSDPELIRQVGIKNFDTFTNHRKGITEGFNDTSVISKSLLSLRDRRWKQMRSTLTPTFTSLKIRQMFELIHFCNVEAVDFVQRQLDAGTSELELKDFFTRYTNDVIATAAFGIQVNSFKDPNNEFFSIGQRISEFTFWGGLKVMLYILMPKLMKALRVPVMDMNNVDYFKKLVFGAMKYRKEQSIVRPDMIHLLMEAQRQFKAEQEGSAESAAQQDKAEFNDDDLLAQCLLFFSAGFETVATCLSFTSYELMMNPEVQEKLLAEILAVKEQLGEKPLDYDTLMGMKYLNCVVSESLRKWPPAFIVDRMCGSDFQLKDEEGEVVVNLREDDLVHINVGALHHDPDNFPEPEQFRPERFDEEHKHEIRQFTYLPFGVGQRSCIGNRLALMEVKSLIFQLVLRYHLKPTDRTPADMMSSISGFRLLPRELFWCKLESRGPA

SEQ ID NO: 6898 - DNA, 4293 bp, DROSOPHILA
aaaattaagcacaagctatgtggacgttcttctttatttcatatttatattaaatatctttaaaatctaacataagatttgtaacttaattccacgtattacagctatttgattgataaaggctgtggctacgtatggttgttgttctcgctctcattctcttttttgattcacttgcatttgtattagtcgcgtgaatgacgcatcgtcagctgttctaaaagaaccgtaatttcctgaacgttgttttatattttattgaattttccgcagacgggcgcgaaagtcactcctgttgtccaagtgactttaaagtttaataaaccgcattaattacggttcgaattaaaattagcggtgagttatttactgacagctgtccgcttctcaaggaaaattttgcattggcttagtgagacacactgcttgttttaattaaatttaaagtgcagttttcgttttggcttagacgcaaaaaacagcaaaatacgtcattcgctggataatgaaaagtaattgtaggcgaaatttctttatcgcaatgagagtgcggttttcgaaaagagagaccaagttgtcggcttctgtatgtgtgtgtgactgtgcacttggctccaaagtctccgggaaaaaaacaattgaatgatcggaagggagggggagaaacaaacaattgttgactgactgcatttttaatggcaaagagagggcctgcatatttcgctctctccctcattccttgttaatttaataacgccgcacagcgtacatgtttgtcacgcttttactttctccacgtctccccgttaatttattttgcattgatttttatcacagcttccgccctcactctgtgaattctcttcgctctgcgctcacttctctccacaaagtaaacaagactcgtgtagaattccataccccgatcttcgtagatttatctccactgtacagtctggcttcaatgtgttaattaatttctgtcggaattctgagattcccgtcgtcggtcataaaaacgaaaagcatgtgaacgatactttgtgaagatttgaaaacgactttagcttagttaatatatgcaacagtaaatatttttaaacaattttaatgattactctctgtttaaaacgatatcttgtttcgggatcaacgtatctgtgggacatcggtaaaagtgtagtggccaatggggcgtatgattcataaaagtggcactgataacaaaaatactgtgaatgccacacgcattaccgctgaataatgcgaggcgtcctctgtgttatgtactattatacacatatgtacacaaattcacccgccctcgaaatattttccaccagaaagtgtgtgaattatcaattgcgcggtagcccctagaggagctgcaataaatatcttttacgataacttagatttcccgcacaagggaccgataagaatgttgtagtttcgattacttgtaaaccccttatctgccacgaagaaagggaaaaacaataattgcgcctagaaagcgcatataaggtttcccctttgtgtttgccaaagtatttttagttgttgatggatttgtatttgcacatgtaattaagaatgtttgtgtttgtggatgtttgaagcagtcacgcaaggaattttctaaacacaactcataacattgaacatctaatcgtggaacaattgctttcactgattttcctatcacaagcttatcagtactattatgttgccaagtgacacaaatagtaatgatatgttttcggatgtgtaacacttataaatataaatataaataaactaatataagctctaatgtgagtttttgtagggcgtactgctttcaatttcaattgaatttatcagtgaccattggcagacgcttcccttttcctctgtttcatttactgatggaaaacgtcggctttttgtgcatattctcggatatgtacatattgaactgggcttgtcgacggcgtcattaaacaaacaaaggcgccacacaatcatctgatggttttatgtgggttttatattcatccacatgggcagcatgttttcaaggggactgagtttaagccctaaaaacgtaccattatggcagaagaattggaagcactcaatttcgtttttatccgtctccattataaatatgtacattatttgtattttgcagattccgcatccacactcagcagcaatcttagcagaaagacttactcagcagaagagggagtgagttgcagtaaccgtccgtagaaccaaatatcagttgccatctcagaggaggaagagcgcatccacattcgcatccgatccaacccgaaccgatcatggcaaccactccacgcagcggcggtgccagcggcactggaacggcgcagcggcccaatggcacctcgcagaacaaaagctgccaattcaagttggtgctcctcggcgagtccgctgtgggcaagtcctcactggtgctgcgcttcgtcaagggacagttccacgagtaccaggagagcacgataggtgcggcctttctgacacagactatttgcatagaggacactgtcgttaagttcgagatctgggacacggctggccaggagcggtaagtatcgctggatagatcacccaactgaaagcttcatctgacatacttatattcgcttttgtaggtaccacagcttagctcccatgtattatcgaggagcgcaggccgctattgtcgtctatgatatacagaatcaggacagttttcagcgtgcgaagacctgggtcaaggaactgcataaacaagtgagtgtcagcggggaaacttgaatatcgtgcagagtgttttaatattataatcatttatattattgctcatgaagtgcctcagttcaatattcttaactcgagaaattcgttcacttgatacgtaaattatattacataaaatatgtattaataaaacttttttccaggcctcaccaaacattgtcattgcgctggccggcaacaaggcagatttgtcaaacattcgcgtcgtagagttcgatgaagcgaagcaatatgccgaggagaacgggctgctgttcatggaaacctccgccaagacgggcatgaatgtgaacgacatcttcttggccattggtaagctataaggagccgtcgtaaacgcttcgaaaactttgctaatcactaccccaaccacagccaagaaactacctaagaacgatggcgccaacaatcagggaaccagcataaggccgactggaaccgaaacaaatcgaccgacgaacaactgctgcaagtgatgtcccttcgtaggtaagttaattgcgttggaaatacggttgcattactaacacagtttttttttggctttacagaaaatgaaatttccaacgagagatttgaaaagtttatgctgataattataaataaaaaaattatttaaaaattcaacagaatcagaaagaaatacctaaagccggctctcgcaggggacgaatttcatttgagagccacgaaaccaataatgataaagaccacataagaattataagcattaaacaaaggagctcccattcccaacataaacgaaagttgcaattaaagaaagttagttacaaattcccacacccgatttcccccattacgctcgatatctgtccaaaaaatatacaagcaaactgacactcacgcaattgagctaaaatatcagtataattccaacataaaccatttcaaataacaacgcaaattaataatgaaaactaaacatgagaagaaagcgcagggtttttggagatttcatcgtgtcgtagaaagtttgaaatcgtattgtataaaaaaaagagagaaaccccgaaaccaactaagcgagcaaagaatatttgtaaagattacatgtcgtgtaagattctgagcattaagtaaggggcagattccagttgcagttgttctcagcagcgttccaaataaaacaaacaaaacaaacaaacaccacaaggagcaaatgttcaggccagcggctgaagatcctcgctcgcctcggtttgtggcaatgtgtgtgtctctacggctccggagctcggactccagatccggatacggacgcggatgattcgactccgggtcgcggcggacacgtgtgatagttgcaatttatataaattatatatacacatatgaaaatgaaggaaaacgaaaaccacaaaaaaaaaaagaaaaccaattatgcatacttttagatttttttatttttcaatttcgccttgcgttgaactattttccacattctagcaacaatcg

SEQ ID NO: 6899 - DNA, 904 bp, DROSOPHILA
ccgtcgtcggtcataaaaacgaaaagcatgtgaacgatactttgtgaagatttgaaaacgactttagcttagttaatatatgcaacaattccgcatccacactcagcagcaatcttagcagaaagacttactcagcagaagagggagtgagttgcagtaaccgtccgtagaaccaaatatcagttgccatctcagaggaggaagagcgcatccacattcgcatccgatccaacccgaaccgatcatggcaaccactccacgcagcggcggtgccagcggcactggaacggcgcagcggcccaatggcacctcgcagaacaaaagctgccaattcaagttggtgctcctcggcgagtccgctgtgggcaagtcctcactggtgctgcgcttcgtcaagggacagttccacgagtaccaggagagcacgataggtgcggcctttctgacacagactatttgcatagaggacactgtcgttaagttcgagatctgggacacggctggccaggagcggtaccacagcttagctcccatgtattatcgaggagcgcaggccgctattgtcgtctatgatatacagaatcaggacagttttcagcgtgcgaagacctgggtcaaggaactgcataaacaagcctcaccaaacattgtcattgcgctggccggcaacaaggcagatttgtcaaacattcgcgtcgtagagttcgatgaagcgaagcaatatgccgaggagaacgggctgctgttcatggaaacctccgccaagacgggcatgaatgtgaacgacatcttcttggccattgccaagaaactacctaagaacgatggcgccaacaatcagggaaccagcataaggccgactggaaccgaaacaaatcgaccgacgaacaactgctgcaagtga

SEQ ID NO: 6900 - protein, 219 aa, DROSOPHILA
MATTPRSGGASGTGTAQRPNGTSQNKSCQFKLVLLGESAVGKSSLVLRFVKGQFHEYQESTIGAAFLTQTICIEDTVVKFEIWDTAGQERYHSLAPMYYRGAQAAIVVYDIQNQDSFQRAKTWVKELHKQASPNIVIALAGNKADLSNIRVVEFDEAKQYAEENGLLFMETSAKTGMNVNDIFLAIAKKLPKNDGANNQGTSIRPTGTETNRPTNNCCK

SEQ ID NO: 6901 - DNA, 3426 bp, DROSOPHILA
ttaaagggaatatatagaagggggcgtggccggtcggtgacaataaatctagcgcatggaacaaatgcgtttcgagtcgaagacggcgacgtttgatccacaaatggcgctggatgaaaacaattgagagcaaaagtgacatattgacacattaaccgatgcacacacccacacatcaatacacacgcgcgcacacacacacacacacacaaaggcgacagttttatggctttgtgatagttcatcctgccagcaaaataagaaaaataaaggaaacaccaactgcacttagtcaaaacttggctgggaaaatgcggagaagaagacagataccaaagaagaatgcacacaatataataacaacaaataataatttaatatataataaaaaaaatacaataatataataattttaatttaaatatattattgatttttaaactaattggatatggaagcaaatattcgacattgcatcaaaagtctggaaaaaactttatttattttttgcatgcagtttaaattttcctctgctcttaattatgttttattattgacagtaaatcgactaattaaatagcggaaaaaagggatttaaatattattctaaggccaacaattcaacgaaaaatcctgcaaaataaatctgtggaaaacatcatttatttgcaggaaatttatatatatttttttttgtgatgggttatctttttttaatccctggccaggactccgtatagccttttaaatcaatttcattgtaagaaataaattgaccatttcatggttataaaaccacaaattggcggaaaacttgatttattggaattgcgatttgaaatacggctgccaattggattgttactccattcgacatcaaatagtaccgccccagtataaagatgacatatgcatgtattgactcacctttggtgttccgcccgcacgaatgtcgctcacttggcagagctctatgacatcgccatcagaaaaaaaaaacaaccaatgaaaaataaaggataccaaaatcttgtaaggtattttgtgctaacaacacaataaaaacggtacaccgataagtttagaccacacacagtgcgtttcgcagctaaaagaactatatttttgttcttttgagcggtgaacagttcgcactgtacacaatcatatatgtatacataacaccaacctaacaccctgccccatatagtcgtacgtttcaagtgaacaacttacatgagtttccgattctccacctaatagcttagccaattaactaaccagtaagccgaagccatcaattaaccagttaagcaatccaaggcgcccacaattattcggacacccaaacagccccagacagaaatgtttatgtaattcggtaaaaaaatatagtaagagctggagagtcttttgaagagcatttattttgcaaaaccttcggaggaaaaccgttaaaaaaaataacaaaagccgaaaacagtttcacatgtcgtatataatataaatataattaccaaagtattaaatgtgtaattcaaacaaagaaacacccctaccggcagttatatatataacacacgctcacacctaccacacacgaaagtaataataatttctgaattattaaaaacgttaaatagtttacttacataaaatgtacatttttattcgctctgtattagttccgatcttatttccaaattgataacccgaacgagataaagatattgcgattgtgtactaccagaaaaaaagtagccaaaaatatatacatatatacacacagaacaaagcatacatatgtagatttagtaaatattataccaaagtaagagacaaaactaacaacttaagatagattctgtttgaattgtcaaaagcgtttatgttgcactcaaaatttgctgtttgcatgtatttgtagttgttgcaaagccaaacgaaaaaaattaacaaagaagaaaaccaagtacataagaaaccgaaaatgtagaaaattaaatgaacgaaactaaggcaaggatgcaaagaaatgtaatgtaatttcccataaattctgaattggttttaaacttgaatatgtgccctaaagatcgaaaacggagaagcgtttacactgtgctattaacgaatcgaaaacatttagttaactcatacaaggtaactgtactaaattatgtacaatatttaaccaacgcctacgactatgtatttagagaattgatcgagttttatgaatgtgataagcggttacattttattacacgaacgcgagaaaaagcgaatcccaactaccctttatctccaatactttcgcctttgccaacactgtcttaattataatttctccccaagggcacgagttgaaggttggttggatggaggaaaacgattgcaaagctttgtatgatatgtaatataatgtgccaatcccaatgttaaccaaaaaacgagaaagtgaaacgaacattgtctaactgagatcgcaactaatttatttattcgctcgtataatgtatacattagatagaggcctagcctcttagtcgaaaagccctcaaatttggcacacttataacacacaaaaattattggcgcgggtaaaaactattccggttaatacttcaaggacttgttcctttttttttcaagttattgtttcaataattgaaggtattacatttactacgaatataattcatacattggcttctcaagagcactattagtgaaggttttttttttcaaaggcaagtggacttttccctaaaaccaaagaaagcgtataacgaaaacaaacaagaatgttgccatataaaaccaaaactgaatcactcgaggtcaatttaagaaacgttaccccgccaatcgacggattctctacacttagtaaatgtgtcaattttttatgtttattttttatatattttgttggtattttttttttttttttgtaatcttaataagttgtagtctttaatgaagcgctagagcaaaaatgttacaggatatgcacgatggtgtaacccatacacttggggccaccctgttgtagtttgtacttctgtgagagcaaaaacccagattatgattatgaatagcgatagcaagcgagacagataactcgcggatgtatctactatctacgtattaattgattatgtttttgcgaacaaacaaacaatgtaaaatgaatagtttaaaaagaggtcgcgggacaagaaggttcttgtcgatgaaattaacttatattaaaaatgctgcgtatgaacttatgattatatactatgaactatatatattaaactattatgattattattattatctttattatgattattattacgattgttccgatatcgaataactttaattgcaataaatcctattccaaagcgactctagagattttccctagat

SEQ ID NO: 6902 - DNA, 4907 bp, DROSOPHILA
agagcaagcgacgggggacagatcttgatctggcttagatatatatcgcatgtgcagggcaacggaaacggaagcgtcagcggcaacggaaacagcaacggaagtggaaacggaaacggaagtggctaagctaacgtcacacagtctgcaataatgaccaagaagtacgagttcgattggatcattccggttccgccggaattgaccacgggctgcgtttttgatcgctggttcgaaaacgaaaaggagacaaaggagaatgactttgagcgtgatgccctcttcaaggtcgatgaatacggattttttctgtactggaaaagcgagggcagggatggcgatgtcatagagctctgccaagtgagcgacattcgtgcgggcggaacaccaaaggactccgacaggatccgaagatacttgataaggtgacgaagaagaacggcaccaatataccggaactggataagcgatccctgacgatctgttcgaacacggactatatcaatataacatatcaccatgttatttgtccagatgcggcaacagccaagagctggcaaaagaacttgcgtctcatcacgcataataaccgcgccacgaatgtgtgcccgcgcgtcaacctgatgaagcattggatgcgattgagttactgcgtagagaagagtggaaaaattccggttaaaacgctggccaaaacctttgcatccggcaaaacggagaaattggtgtacacgtgcataaaggatgccggtctgcccgatgataaaaacgcaacgatgaccaaggagcagttcaccttcgacaagttctacgccttgtaccacaaggtgtgtccccgaaacgacattgaggagctcttcacctccatcaccaagggcaagcaggacttcattagcttggagcagtttattcagtttatgaacgacaaacagcgcgatccgcggatgaacgaaattctgtaccctctctacgaggagaaacgttgcacggagatcatcaacgattacgagctagatgaggagaaaaagaagaacgttcaaatgtcgttggacggatttaagcgctatctaatgtccgacgaaaacgcacctgtattcctggaccggctggatttctacatggaaatggatcagccactggcccattactatatcaacagctcgcataatacctacctatccggtcgtcagatcggcggcaaaagttccgtggaaatgtaccgacagacactcttggcaggttgtcgctgtgtggagctggattgctggaacggaaagggtgaggacgaggagccaattgtcacccacggtcacgcctactgcactgaaatcctctttaaggactgcatccaggcgattgcggattgcgccttcgtgtcctccgagtatccggtaatcctgtccttcgaaaaccactgcaaccgcgcccagcaatacaagttggccaaatactgtgatgacttcttcggcgatctgctgctaaaggagccgctaccagatcatccgctggatccgggccttccgttgccgccaccctgcaaactgaagcgtaagatcctcatcaagaacaagcgaatgaagccagaagtggaaaaggtcgagttggagctctggctgaagggcgaactcaaaacggatgacgatccggaagaggacgccagtgcgggcaagccgccagaggcagccgccgcacccgcacccgccccggaagcagccgccgccgccgaaggagcggccgaggggggcggtggagcggaggccgaagccgccgctgccaactacagcggctccaccaccaacgtgcatccgtggctctcctccatggtcaattacgcgcagcccatcaagttccagggcttcgacaaggcaatcgaaaagaatattgcccacaacatgtcctcgtttgcggaatcggcgggcatgaactacttgaagcagagctccatcgactttgtcaattacaacaagcgtcagatgtcgcgaatttatccgaagggcacacgagcggactcctcaaactatatgccgcaggtgttctggaacgccggctgccagatggtctcactcaatttccagagctccgatttacccatgcaactcaaccagggcaagttcgagtataatggcggctgtggctatctactaaaaccggatttcatgcgtcgagccgacaaggattttgatccgtttgccgatgcgccggtggacggtgtgattgcggcccagtgttccgttaaagtgattgccggccaattcttgtccgacaagaaagtgggcacctatgtggaggtggacatgtttggattgccctcggacacggtgaaaaaagagtttcgaacgcgtttggtcgccaataatggcctgaatccagtttacaatgaggatccctttgtgttccgcaaagtggtccttccggacttggctgtgctaagatttggcgtttatgaagaaagcggaaagattctgggtcaacgtattctgccgctggacggtttgcaggctggctatcggcatgtttccctgcgcacggaggctaacttccccatgtcgttgcccatgttgttcgtgaatatcgagctaaagatctacgtacctgacggctttgaggacttcatggccatgttgtcggatccgcgaggtttcgccggtgccgctaagcagcaaaacgaacagatgaaggcacttggcattgaggagcagagcggcggtgccgcccgagatgctggcaaggccaaagaggaggaaaagaaggagccaccactagtctttgagcctgtcacgttggaatctctgcgccaggagaaaggcttccaaaaggtgggcaaaaagcaaatcaaggagctcgacaccctgcgcaagaagcatgccaaagagcgcacctcggtgcaaaagacccagaatgcggccatcgacaagttgatcaagggcaagagcaaagacgacattcgtaacgatgccaacatcaagaattcgatcaatgaccagaccaagcagtggaccgacatgatcgccaggcaccgcaaggaggaatgggacatgctgcgccaacatgtccaggactcgcaggacgccatgaaggcactgatgctcaccgttcaggcggcgcagatcaagcagctggaggatcgtcatgccagggacatcaaggatctgaatgccaagcaagcaaagatgtcggcggataccgccaaggaggtacaaaacgacaagaccttgaagaccaagaacgagaaggatcgtcggctgcgtgagaagcgccagaacaatgtgaagcgcttcatggaggaaaagaagcaaatcggagttaagcagggtcgtgcgatggagaaactaaagttggcgcattcgaagcagatcgaggaattcagtaccgacgtgcaaaagcttatggacatgtacaaaatcgaggaggaggcgtataagacgcaaggaaaaacggaattttatgcctaagattcccagatcaatgagaaaaaaaaaacaaccaatgaaaaataaaggataccaaaatcttgtaaggtattttgtgctaacaacacaataaaaacggtacaccgataagtttagaccacacacagtgcgtttcgcagctaaaagaactatatttttgttcttttgagcggtgaacagttcgcactgtacacaatcatatatgtatacataacaccaacctaacaccctgccccatatagtcgtacgtttcaagtgaacaacttacatgagtttccgattctccacctaatagcttagccaattaactaaccagtaagccgaagccatcaattaaccagttaagcaatccaaggcgcccacaattattcggacacccaaacagccccagacagaaatgtttatgtaattcggtaaaaaaatatagtaagagctggagagtcttttgaagagcatttattttgcaaaaccttcggaggaaaaccgttaaaaaaaataacaaaagccgaaaacagtttcacatgtcgtatataatataaatataattaccaaagtattaaatgtgtaattcaaacaaagaaacacccctaccggcagttatatatataacacacgctcacacctaccacacacgaaagtaataataatttctgaattattaaaaacgttaaatagtttacttacataaaatgtacatttttattcgctctgtattagttccgatcttatttccaaattgataacccgaacgagataaagatattgcgattgtgtactaccagaaaaaaagtagccaaaaatatatacatatatacacacagaacaaagcatacatatgtagatttagtaaatattataccaaagtaagagacaaaactaacaacttaagatagattctgtttgaattgtcaaaagcgtttatgttgcactcaaaatttgctgtttgcatgtatttgtagttgttgcaaagccaaacgaaaaaaattaacaaagaagaaaaccaagtacataagaaaccgaaaatgtagaaaattaaatgaacgaaactaaggcaaggatgcaaagaaatgtaatgtaatttcccataaattctgaattggttttaaacttgaatatgtgccctaaagatcgaaaacggagaagcgtttacactgtgctattaacgaatcgaaaacatttagttaactcatacaaggtaactgtactaaattatgtacaatatttaaccaacgcctacgactatgtatttagagaattgatcgagttttatgaatgtgataagcggttacattttattacacgaacgcgagaaaaagcgaatcccaactaccctttatctccaatactttcgcctttgccaacactgtcttaattataatttctccccaagggcacgagttgaaggttggttggatggaggaaaacgattgcaaagctttgtatgatatgtaatataat

SEQ ID NO: 6903 - protein, 91 aa, DROSOPHILA
MTKKYEFDWIIPVPPELTTGCVFDRWFENEKETKENDFERDALFKVDEYGFFLYWKSEGRDGDVIELCQVSDIRAGGTPKDSDRIRRYLIR

SEQ ID NO: 6904 - DNA, 9933 bp, DROSOPHILA
agcgtgggcgacgacttggagcgctcctccggttgggtaacccagaaggcgtgcagagtgacatcgtcgggtgtcttgatgctgaccgtaatgtgcggcaggttgtgcattgtcggaatgggtatgtaaatgcgggagttggctggcaagtccggatggtagagaagcaggtcctgggcatagtagaatatcactgcaagggcaggcacttagtgacgaatgactggtctgaagcagaatacgtacgcaggatgatcccagcgaagagtgccaacgtcatgtaaccgccgtagaaatagtagaaaatgaagcacaacaggaaggcagcgagtactcccacgcccacgccgcgggacttgggcagagcgatgcccacttctttcatgttcgcctgtggtccagctgcgctacatgtccaacgctctaatttaattaaattgcatcaattccagcgccagcaacacaaacgatttgtaattgtacaccgcccacagctgatttccaagacacctgtgcagtgcgaaaagttatcgataacgcagtacagtaactactgacgatcagcgaccccgataaggttgtgatcatgtggctataatgaactactactactaaaattattaaatatcgttcaactcaacattcaactcataaaataaaatcagtcaagtaattaagtagtttatttctttttgacatattctggataacttgaaacgctacatttaataattttatgcctatgaaaaggaatatataatatcaatataaattcaattcatgactctatttactttattttatatttatataaatgttgtacatgttttatattattatgcaagcgatatatcccgcatcatcactgtcgcgcggtgtgccatctctactgcagcacgcacggtcccactaattcaagatggtggaaagatttctgctgcgtcgcatgagtaaaacgtgaaaaacgatcattttgtttcgaaaaagtgcatttcaaaacaagtgggcagcgggaaaaacataaacattcgccagcgaccgcatgcaagtgagccccctgtatttaatgagcgctacaaggcaactgtgtgtgctaccacgacaatataatgagccaggtgagtaggccttgaaaaagctgtggttgtcaaacatcggtgtgtgtggaaaaatcggaaaaactatgaatttcttatatcatttgaaaccagacaagtcaaaacagtttgatccaggctgtcgtgtgagtaaaaacgtaaatcaaatgctacacacaaggcaatcgctcagttttgtgggcgtggctgctcagcaacgaagtctgtagaagtcccctcgtcgcgagacacctacactttgatgactggccgtgcggctgctggcggagcatttggataaaaggatttatttctccactattccgagagtgtttcatccttccgacagtgcctgacagttcccaaggcttcaacgtggcagccaaggtggattttgtggaaatccattgggtacccattttcgcaaattctactcaaattcaagaatttctgtttgtttttatcaatagcggctgttaaaatcctgtaatttccatggatttccttcctttttcgataaaatggaaaattttcaccgattacgtaatcagaaatggctaggtgcaaagtttcctctcttgtacttctgaccaaattccagggattttcgagcccgccaaaaggctaccagcaataattttccttaaattcctcctcttttcgacagatacaatgattaaaaataattttttccgctttgccattcctatttccacagttttgtgcctttttcagggaaagatcccgcccagaacatcgatttcccgcttgtttctaaggatatccgggtttctaatcaccaggaagaagtgtcgtgtgattaccgcgttctcttcaaagtagtcatgtgcttctgtcgtgtgcttcctggaactacaaaacgcaatacattttgttttaccctttttggccaaaaactgccataaacaaatttctggagaggattagtcctgtgtaagccatgagagtgcgttttatgaaagtttcttcacgccgttttgttttataatctgttcagcacggcccaagagccaagttttcgaagttttccgtggttttaccaggcttttgtggaatctaaagtgcgacctcactctggacaggattgagccatcttcttgttttaaaatgtcactttaagtcgttgcctatagttcagtgattgtgtaacccattccttacttctaaggagctgaataaggggaatattaaacatgttatgccaatttcgatgcactctgtactcacaatttctggccaggattggctggcccagagccggtgtgttacttcaaccttttcgtatccgacggtttatctttaactaagattgattgatcttcaacctagattgattttgaaattacttttcatctgaccaggcactcaatgaatcggcgaatagtattggctcagacgaacaagatgacactcgggaagaggccaatggcaccgaccatagtggcagtggcagcggtagtggctcctccggctcagactcagattcagacagctcctcgggcaactctagcgatggacggagctccccagaacccgaggacaaatcgttatcggtggcagggtttccaccgacagccgctgctgcccaggcggacagtaagacgaacgggttcacggatgaccaggaggacagctccagtgacgggtctagtggcagtgattccgattcagacgccgagggcccatcggatcaaaggaaccagagcatcaacaatgccaacacaagcagcagtttgcctaagccggagcagaatgaggaggaggacaatgagactgaggctggtcagcagcagccagccagcgatgcctctgccgatgaatcaagtgatagttctgccaatgtgtcacccacatcctccagcagcagcagtgtaagtttggaccggcggtttcatcttaaaaagttcctaaccattctccacgcaggaggaggaagaggaggactatagacccaagcggacgcgccaggcgcgcaaaccaccgactgctgctgagaagtcgaaaaaagctccagcacccaagaacaagaagaaaacgtgagatttccagcatcccctttccaaattattttctacaaagcattcgtttcatttgccagctgggactcggatgaaagcgatgaaagcgaggacagtgatgacgaggtgtccaccgcccaaaagcgcaaaccggcagcaactacctctcgcagcaaactcgcacagcaacagcagcggcgcagggtgaaaccctttagttccgaggacagtgatgatgacgacgctagcaaacggtaatgaccccagccctttgctttttgcctttccctgacccatgtccatcttttttataaagctgcgctactcgtcgcaagggtgctgccgttagctacaaggaggcttcggaggacgaagccaccgactccgaggatctgctggagtttgagtacgatgaaagccaggcagccaccactgccgctacggctgaggaggaggaaaagtgcgaaaccatagagcgtatcctggcgcagcgtgctgggaagaggggatgcacgggcaatcagacaacgatctatgcaatagaggaaaacggctttgatccacatgctggatttgatgaaaagcaaactccagacgcggagaccgaggcacagttcctgatcaagtggaagggctggtcgtacatccacaacacctgggaatctgaggctaccctgcgtgatatgaaggccaagggaatgaagaagctggataacttcatcaaaaaggagaaggaacaggcctactggcgccgatacgctggccccgaggacatcgactacttcgagtgtcagctggaactgcagcatgagctactgaaatcgtacaacaacgtggaccgaatcattgccaagggctctaagccagacgacggcaccgaggagtacctgtgcaaatggcagtcgctaccgtacgccgagtccacatgggaggatgccgccctggttcttcgcaagtggcaacgctgcgcagagcaattcaatgaccgcgagtcctccaaatgcactccctcccgccactgcagagtgatcaagtatcgccccaagttctctcgaataaagaatcagccggaatttctttcgtcgggcctaactctaagggattaccaaatggacggcctgaattggctgctgcactcatggtgcaaggagaactcggtgatcctggccgacgagatgggcctcggcaagaccatccaaactatttgcttcctgtactcgctgttcaagatccatcacctgtacggcccgttcctgtgcgtggtgccacttagcacaatgacggcctggcagcgggagttcgacctgtgggcgccggacatgaatgtagtcacgtacctcggtgacattaaatcccgcgagctcattcaacagtacgaatggcagtttgagagctccaagcggcttaaattcaattgcattctcacaacgtacgagattgtgctcaaggataaacaatttctgggcacgcttcagtgggctgcgctcctggtggacgaagcgcatcgtcttaagaacgacgactcactgctctacaagtcgctgaaggagtttgacactaaccatcgactgctcataacaggtaccccgctgcagaattcgctgaaggagctctgggctttgctgcacttcatcatgccggataagtttgacacgtgggagaatttcgaggtgcagcatggcaatgcggaggacaagggctacactcggttgcatcaacagctggagccgtatattctgcggagagtgaagaaggatgtggagaaatcgctgccggctaaagtggagcagatcctgcgggtcgagatgacctctctgcagaaacagtactacaagtggatcctaaccaaaaactttgatgcactgcgcaagggaaagcggggcagtacctccactttcctcaacatagtcatcgagctaaagaagtgctgcaaccacgcggctctcatccgaccatccgagtttgagcttatgggtctgcagcaggatgaggcattgcaaactcttcttaagggatccggaaagcttgtgctgctcgataagctactctgccgactgaaagagacgggccaccgcgtgctgattttttcccaaatggtgcgcatgctggacgttctggctgactatctgcagaagcgtcacttccctttccagcgcctcgacggcagcataaagggagagatgaggcgccaggctctggatcacttcaatgcagagggtagccaggacttttgcttcctgctttcgacaagggctggtggattgggcattaacttggccacagccgatactgttatcatctttgactccgactggaacccccaaaacgatttacaggcgcaggcgagagcgcatcgaatcggtcagaaaaaccaggttaacatttatcgcctggtcaccgcccggtcggtggaggaacagatcgtggagcgagccaaacagaaaatggtactggaccacctggtcattcagcggatggacactacaggacgcactgttctggataagagcggcaacgggcactcgtctaactcgaatccgttcaacaaggacgatctttctgctatcctgaagtttggtgcagaggagctgttcaaggacgaacaggagcatgacgacgacttggtttgtgacattgatgaaattctgcgcagggcggagacccgcaacgaagatccggaaatgccagcagacgacttgttgtccgccttcaaagtggccagcatagctgctttcgaagaggaaccgagcgattcggttagcaagcaagaccaaaatgccgccggcgaggaggatgacagtaaggactgggacgacatcattccggaaggcttccgtaaagcaatcgacgatcaggagcgagcaaaagagatggaagatctctacttgccaccccggaggaaaactgccgctaaccaaaacgaagggaagcgtggagctggcaaggggggcaaggggaaacagcaggcagacgactccggtggcgactcggattacgagctgggctccgacggcagtggtgacgatggacgacctcgcaagcgcgggcggccgaccatgaaggagaagatcaccggattcactgatgcggagttgcgtcgcttcattcgcagttacaaaaagtttcccgctcctctccaccgcatggaggccatcgcatgtgatgctgagctgcaggaaaagccactggcggaactgaagcgcctcggagagatgctgcatgaccgctgcgttcagttcctgcacgagcacaaggaggaagagagtaagactgcggcgacggatgagacgccgggcgccaagcagcgccgcgcacgcgccaccttctccgttaagctgggtggcgtctcctttaatgccaaaaagctgctggcctgcgaacaggagcttcagccgctcaacgagatcatgcccagcatgcccgaagagcgccagcaatggagcttcaatatcaagacacgcgccccggtcttcgacgtggattggggcatcgaggaggacacgaagctactgtgcggcatttaccagtacggcattggatcctgggagcagatgaagctagaccccacgctcaaactgaccgacaagattttgcttaacgatacgcgcaagccccaggccaagcagctgcagacgcgtgccgagtacctgctcaagatcatcaagaagaacgtggagctgaccaagggaggacaacgccgacaacggcgccccagagcatcgcgagctaacgatgccaaggcggcaagccagtctgctagttcgaccatcgatgctaagccgcacgatggcgaggacgctgctggcgacgcacgcaccgtcgccgaaagcagtaacagtcaagtagatccatctaccgcgtcgccgcacaatgctccagctacggaacagcacggtgaccctgcgaagaaagccaaaaaatccaaggctcgttcgaagaaaaccagcgcctcggacaacaacggcaacaagccgatgcactttacggcgaacaatgaacctagggctttggaggtcctgggtgacctagatcccagcatttttaacgagtgcaaagaaaaaatgcggccggtgaagaaggccctcaaggcgctggaccagccggatgtcagtctttccgaccaggatcagctgcagcacacgagggattgcctgcttcaaattggcaagcagatcgatgtttgcctcaatccctacgccgagacagagaaaaaggaatggcgcagtaacctttggtactttgtgtcgaaattcactgagctggatgccaagcgcctattcaagatttacaaacacgcactcaagcagaaagcgggcggcgatggcgaggcgaagggaaaagacaagggctcgtcaggaagtccggccaagtctaaacccaacggtgtgactactgaagaaaaagaaaaggagcgcgacaggagtgggggcaaaaagaagaaaaaggacaaggacaaggaacgcagtggacaggcgcggtatccggaaacgggtatacccacctccggtcgttacgctgaccctcccctaaagcgtaagcgggatgagaacgacgctgatgcaagcagcggactagcaggtgcccccggcggaggcatcggcgacaacctcaagtccatgtccttcaaacggctgaacatggaccgtcacgaggaccgtaagaagcaccatcgcggtcccgactactacggtggcagtggcccacccatgggaagtggtagctacgaaggcggcagcaattcccggcgccagggccccacctccccatctacaccccgtactggccggggcggctatgatccaccgcccgcgccatccggctacacgccggaaatggagcgatggcaatcccgcgataggtaatgatcgaaacgggctttgttcctgcaagtggatttctaatatgctttacttttgcagatacagccaggattacaaacgggatcgctacgatggatatgggcgcagtgggggaggtcaaggcagctatcatcgcgaacgcgaccgtcgtcccgagaagcgcaggtaattaatcgctcaggcttacatccttttcctaaatttgttttatctaacattgtgtatcatttgactcatttcgtggtccttcatttcagatatccgtctggcttgccaccgcatccttactcaagccactacctgccgcccaattactatggattgcctaatggagccgttccgggcctaccgccaccgtcgtctgtctaccgcagtgacccacgcggatatccggtcatgccgcgagactatcctgccgactacagacgcagcgactacgagcggcgcacgcagacctgaggagtcagctctgggggccgactgtcgattgtacataaaacacttagacttaagcccggctggcgggccatcgtgtcctggccagccactcgacacagtaaaaccaacccgcatacagtacgttaagcgtagctccatacacctgtacaagtaattcctagcagctaactatacttctataaatgactatacatccgatcgcacagagggccggcattgcatcatccagggtttagtggcaatacctgcaacctaatcttagactttccgtgtataaatcgtagcgtaggctttaactcgtccttcatcattgcggaacatcgtttttatactggccaactgcacggaagatgcggctggctgcgaatgcatgctgtgtggtttattaggtggcccacggtgcgaaccagtcgttcaaaagcttttaaaccaacaacaaattctcactatatttaaacactatcatcatatgattgtaagcacgaaagcaatgggtcccttgaagattcgtattacggttattaaagcaagcagcagactaatcatttgtttaatgtctccattgcattcgaacttttataagacgtttaaaaataaaaaaaatcagtgaatgatccagagaattgtaatctagttaaaattaattatacataaatatttaaattacgttgtagtgtctgagaaatctattatatatatatatatatatatatcaataaattataaaatatataaattgaaccctatgtgttatcataattctaaaagcatccccctatatttaaattgtttacagaataaaattgcccaaattcagatttttctcgttccattttcgaaaccaaccttacggcgctatcttgacccgacgcacatgcatctgcggctcagctgtttcgaacttcgaaaacatttgcctccgcgtttgatttgattgctgcggattaattacaaaataaccacgaaataatggatagcgagctgaacggatcggaacttggcaccaaggaattttgggagtccagctacaaccgggagatacgaaactacaagagccacggcgacgtgggcgagatctggtttgacgaaagtgcccaatggcgaacgatcgactggctgcttaacgaggagaagatcgacaaggaggcgagtcgagtgctggacctgggctgcggcaatggcatgttcctagtgggcctggcaaatgaaggcttcaccggagacctgaccggcgtggactactctcccaaagccgtcgagctggcgcaaaacattgcggaggataacaagctgagcatcacatacaaggtggcggacttaacccagccgcagaacgagctgggccaatttgacgtggtgcacgacaagggaacctacgatgcagtcagtctttgtccggataatgccaaggagaaacgtgctctctacctggacacggtggaaaagttgctgcgaactgctgacagcctgtttgtaatc

SEQ ID NO: 6905 - DNA, 6240 bp, DROSOPHILA
aagtgggcagcgggaaaaacataaacattcgccagcgaccgcatgcaagtgagccccctgtatttaatgagcgctacaaggcaactgtgtgtgctaccacgacaatataatgagccaggcactcaatgaatcggcgaatagtattggctcagacgaacaagatgacactcgggaagaggccaatggcaccgaccatagtggcagtggcagcggtagtggctcctccggctcagactcagattcagacagctcctcgggcaactctagcgatggacggagctccccagaacccgaggacaaatcgttatcggtggcagggtttccaccgacagccgctgctgcccaggcggacagtaagacgaacgggttcacggatgaccaggaggacagctccagtgacgggtctagtggcagtgattccgattcagacgccgagggcccatcggatcaaaggaaccagagcatcaacaatgccaacacaagcagcagtttgcctaagccggagcagaatgaggaggaggacaatgagactgaggctggtcagcagcagccagccagcgatgcctctgccgatgaatcaagtgatagttctgccaatgtgtcacccacatcctccagcagcagcagtgaggaggaagaggaggactatagacccaagcggacgcgccaggcgcgcaaaccaccgactgctgctgagaagtcgaaaaaagctccagcacccaagaacaagaagaaaacctgggactcggatgaaagcgatgaaagcgaggacagtgatgacgaggtgtccaccgcccaaaagcgcaaaccggcagcaactacctctcgcagcaaactcgcacagcaacagcagcggcgcagggtgaaaccctttagttccgaggacagtgatgatgacgacgctagcaaacgctgcgctactcgtcgcaagggtgctgccgttagctacaaggaggcttcggaggacgaagccaccgactccgaggatctgctggagtttgagtacgatgaaagccaggcagccaccactgccgctacggctgaggaggaggaaaagtgcgaaaccatagagcgtatcctggcgcagcgtgctgggaagaggggatgcacgggcaatcagacaacgatctatgcaatagaggaaaacggctttgatccacatgctggatttgatgaaaagcaaactccagacgcggagaccgaggcacagttcctgatcaagtggaagggctggtcgtacatccacaacacctgggaatctgaggctaccctgcgtgatatgaaggccaagggaatgaagaagctggataacttcatcaaaaaggagaaggaacaggcctactggcgccgatacgctggccccgaggacatcgactacttcgagtgtcagctggaactgcagcatgagctactgaaatcgtacaacaacgtggaccgaatcattgccaagggctctaagccagacgacggcaccgaggagtacctgtgcaaatggcagtcgctaccgtacgccgagtccacatgggaggatgccgccctggttcttcgcaagtggcaacgctgcgcagagcaattcaatgaccgcgagtcctccaaatgcactccctcccgccactgcagagtgatcaagtatcgccccaagttctctcgaataaagaatcagccggaatttctttcgtcgggcctaactctaagggattaccaaatggacggcctgaattggctgctgcactcatggtgcaaggagaactcggtgatcctggccgacgagatgggcctcggcaagaccatccaaactatttgcttcctgtactcgctgttcaagatccatcacctgtacggcccgttcctgtgcgtggtgccacttagcacaatgacggcctggcagcgggagttcgacctgtgggcgccggacatgaatgtagtcacgtacctcggtgacattaaatcccgcgagctcattcaacagtacgaatggcagtttgagagctccaagcggcttaaattcaattgcattctcacaacgtacgagattgtgctcaaggataaacaatttctgggcacgcttcagtgggctgcgctcctggtggacgaagcgcatcgtcttaagaacgacgactcactgctctacaagtcgctgaaggagtttgacactaaccatcgactgctcataacaggtaccccgctgcagaattcgctgaaggagctctgggctttgctgcacttcatcatgccggataagtttgacacgtgggagaatttcgaggtgcagcatggcaatgcggaggacaagggctacactcggttgcatcaacagctggagccgtatattctgcggagagtgaagaaggatgtggagaaatcgctgccggctaaagtggagcagatcctgcgggtcgagatgacctctctgcagaaacagtactacaagtggatcctaaccaaaaactttgatgcactgcgcaagggaaagcggggcagtacctccactttcctcaacatagtcatcgagctaaagaagtgctgcaaccacgcggctctcatccgaccatccgagtttgagcttatgggtctgcagcaggatgaggcattgcaaactcttcttaagggatccggaaagcttgtgctgctcgataagctactctgccgactgaaagagacgggccaccgcgtgctgattttttcccaaatggtgcgcatgctggacgttctggctgactatctgcagaagcgtcacttccctttccagcgcctcgacggcagcataaagggagagatgaggcgccaggctctggatcacttcaatgcagagggtagccaggacttttgcttcctgctttcgacaagggctggtggattgggcattaacttggccacagccgatactgttatcatctttgactccgactggaacccccaaaacgatttacaggcgcaggcgagagcgcatcgaatcggtcagaaaaaccaggttaacatttatcgcctggtcaccgcccggtcggtggaggaacagatcgtggagcgagccaaacagaaaatggtactggaccacctggtcattcagcggatggacactacaggacgcactgttctggataagagcggcaacgggcactcgtctaactcgaatccgttcaacaaggacgatctttctgctatcctgaagtttggtgcagaggagctgttcaaggacgaacaggagcatgacgacgacttggtttgtgacattgatgaaattctgcgcagggcggagacccgcaacgaagatccggaaatgccagcagacgacttgttgtccgccttcaaagtggccagcatagctgctttcgaagaggaaccgagcgattcggttagcaagcaagaccaaaatgccgccggcgaggaggatgacagtaaggactgggacgacatcattccggaaggcttccgtaaagcaatcgacgatcaggagcgagcaaaagagatggaagatctctacttgccaccccggaggaaaactgccgctaaccaaaacgaagggaagcgtggagctggcaaggggggcaaggggaaacagcaggcagacgactccggtggcgactcggattacgagctgggctccgacggcagtggtgacgatggacgacctcgcaagcgcgggcggccgaccatgaaggagaagatcaccggattcactgatgcggagttgcgtcgcttcattcgcagttacaaaaagtttcccgctcctctccaccgcatggaggccatcgcatgtgatgctgagctgcaggaaaagccactggcggaactgaagcgcctcggagagatgctgcatgaccgctgcgttcagttcctgcacgagcacaaggaggaagagagtaagactgcggcgacggatgagacgccgggcgccaagcagcgccgcgcacgcgccaccttctccgttaagctgggtggcgtctcctttaatgccaaaaagctgctggcctgcgaacaggagcttcagccgctcaacgagatcatgcccagcatgcccgaagagcgccagcaatggagcttcaatatcaagacacgcgccccggtcttcgacgtggattggggcatcgaggaggacacgaagctactgtgcggcatttaccagtacggcattggatcctgggagcagatgaagctagaccccacgctcaaactgaccgacaagattttgcttaacgatacgcgcaagccccaggccaagcagctgcagacgcgtgccgagtacctgctcaagatcatcaagaagaacgtggagctgaccaagggaggacaacgccgacaacggcgccccagagcatcgcgagctaacgatgccaaggcggcaagccagtctgctagttcgaccatcgatgctaagccgcacgatggcgaggacgctgctggcgacgcacgcaccgtcgccgaaagcagtaacagtcaagtagatccatctaccgcgtcgccgcacaatgctccagctacggaacagcacggtgaccctgcgaagaaagccaaaaaatccaaggctcgttcgaagaaaaccagcgcctcggacaacaacggcaacaagccgatgcactttacggcgaacaatgaacctagggctttggaggtcctgggtgacctagatcccagcatttttaacgagtgcaaagaaaaaatgcggccggtgaagaaggccctcaaggcgctggaccagccggatgtcagtctttccgaccaggatcagctgcagcacacgagggattgcctgcttcaaattggcaagcagatcgatgtttgcctcaatccctacgccgagacagagaaaaaggaatggcgcagtaacctttggtactttgtgtcgaaattcactgagctggatgccaagcgcctattcaagatttacaaacacgcactcaagcagaaagcgggcggcgatggcgaggcgaagggaaaagacaagggctcgtcaggaagtccggccaagtctaaacccaacggtgtgactactgaagaaaaagaaaaggagcgcgacaggagtgggggcaaaaagaagaaaaaggacaaggacaaggaacgcagtggacaggcgcggtatccggaaacgggtatacccacctccggtcgttacgctgaccctcccctaaagcgtaagcgggatgagaacgacgctgatgcaagcagcggactagcaggtgcccccggcggaggcatcggcgacaacctcaagtccatgtccttcaaacggctgaacatggaccgtcacgaggaccgtaagaagcaccatcgcggtcccgactactacggtggcagtggcccacccatgggaagtggtagctacgaaggcggcagcaattcccggcgccagggccccacctccccatctacaccccgtactggccggggcggctatgatccaccgcccgcgccatccggctacacgccggaaatggagcgatggcaatcccgcgatagatacagccaggattacaaacgggatcgctacgatggatatgggcgcagtgggggaggtcaaggcagctatcatcgcgaacgcgaccgtcgtcccgagaagcgcagatatccgtctggcttgccaccgcatccttactcaagccactacctgccgcccaattactatggattgcctaatggagccgttccgggcctaccgccaccgtcgtctgtctaccgcagtgacccacgcggatatccggtcatgccgcgagactatcctgccgactacagacgcagcgactacgagcggcgcacgcagacctgaggagtcagctctgggggccgactgtcgattgtacataaaacacttagacttaagcccggctggcgggccatcgtgtcctggccagccactcgacacagtaaaaccaacccgcatacagtacgttaagcgtagctccatacacctgtacaagtaattcctagcagctaactatacttctataaatgactatacatccgatcgcacagagggccggcattgcatcatccagggtttagtggcaatacctgcaacctaatcttagactttccgtgtataaatcgtagcgtaggctttaactcgtccttcatcattgcggaacatcgtttttatactggccaactgcacggaagatgcggctggctgcgaatgcatgctgtgtggtttattaggtggcccacggtgcgaaccagtcgttcaaaagcttttaaaccaacaacaaattctcactatatttaaacactatcatcatatgattgtaa

SEQ ID NO: 6906 - protein, 1883 aa, DROSOPHILA
MSQALNESANSIGSDEQDDTREEANGTDHSGSGSGSGSSGSDSDSDSSSGNSSDGRSSPEPEDKSLSVAGFPPTAAAAQADSKTNGFTDDQEDSSSDGSSGSDSDSDAEGPSDQRNQSINNANTSSSLPKPEQNEEEDNETEAGQQQPASDASADESSDSSANVSPTSSSSSSEEEEEDYRPKRTRQARKPPTAAEKSKKAPAPKNKKKTWDSDESDESEDSDDEVSTAQKRKPAATTSRSKLAQQQQRRRVKPFSSEDSDDDDASKRCATRRKGAAVSYKEASEDEATDSEDLLEFEYDESQAATTAATAEEEEKCETIERILAQRAGKRGCTGNQTTIYAIEENGFDPHAGFDEKQTPDAETEAQFLIKWKGWSYIHNTWESEATLRDMKAKGMKKLDNFIKKEKEQAYWRRYAGPEDIDYFECQLELQHELLKSYNNVDRIIAKGSKPDDGTEEYLCKWQSLPYAESTWEDAALVLRKWQRCAEQFNDRESSKCTPSRHCRVIKYRPKFSRIKNQPEFLSSGLTLRDYQMDGLNWLLHSWCKENSVILADEMGLGKTIQTICFLYSLFKIHHLYGPFLCVVPLSTMTAWQREFDLWAPDMNVVTYLGDIKSRELIQQYEWQFESSKRLKFNCILTTYEIVLKDKQFLGTLQWAALLVDEAHRLKNDDSLLYKSLKEFDTNHRLLITGTPLQNSLKELWALLHFIMPDKFDTWENFEVQHGNAEDKGYTRLHQQLEPYILRRVKKDVEKSLPAKVEQILRVEMTSLQKQYYKWILTKNFDALRKGKRGSTSTFLNIVIELKKCCNHAALIRPSEFELMGLQQDEALQTLLKGSGKLVLLDKLLCRLKETGHRVLIFSQMVRMLDVLADYLQKRHFPFQRLDGSIKGEMRRQALDHFNAEGSQDFCFLLSTRAGGLGINLATADTVIIFDSDWNPQNDLQAQARAHRIGQKNQVNIYRLVTARSVEEQIVERAKQKMVLDHLVIQRMDTTGRTVLDKSGNGHSSNSNPFNKDDLSAILKFGAEELFKDEQEHDDDLVCDIDEILRRAETRNEDPEMPADDLLSAFKVASIAAFEEEPSDSVSKQDQNAAGEEDDSKDWDDIIPEGFRKAIDDQERAKEMEDLYLPPRRKTAANQNEGKRGAGKGGKGKQQADDSGGDSDYELGSDGSGDDGRPRKRGRPTMKEKITGFTDAELRRFIRSYKKFPAPLHRMEAIACDAELQEKPLAELKRLGEMLHDRCVQFLHEHKEEESKTAATDETPGAKQRRARATFSVKLGGVSFNAKKLLACEQELQPLNEIMPSMPEERQQWSFNIKTRAPVFDVDWGIEEDTKLLCGIYQYGIGSWEQMKLDPTLKLTDKILLNDTRKPQAKQLQTRAEYLLKIIKKNVELTKGGQRRQRRPRASRANDAKAASQSASSTIDAKPHDGEDAAGDARTVAESSNSQVDPSTASPHNAPATEQHGDPAKKAKKSKARSKKTSASDNNGNKPMHFTANNEPRALEVLGDLDPSIFNECKEKMRPVKKALKALDQPDVSLSDQDQLQHTRDCLLQIGKQIDVCLNPYAETEKKEWRSNLWYFVSKFTELDAKRLFKIYKHALKQKAGGDGEAKGKDKGSSGSPAKSKPNGVTTEEKEKERDRSGGKKKKKDKDKERSGQARYPETGIPTSGRYADPPLKRKRDENDADASSGLAGAPGGGIGDNLKSMSFKRLNMDRHEDRKKHHRGPDYYGGSGPPMGSGSYEGGSNSRRQGPTSPSTPRTGRGGYDPPPAPSGYTPEMERWQSRDRYSQDYKRDRYDGYGRSGGGQGSYHRERDRRPEKRRYPSGLPPHPYSSHYLPPNYYGLPNGAVPGLPPPSSVYRSDPRGYPVMPRDYPADYRRSDYERRTQT

SEQ ID NO: 6907 - DNA, 6384 bp, DROSOPHILA
tgtttggggcttttccggcaatcgccgactgatttgctctttctgtgctgttgcccttgcagccaattagtgtccatttcattgaacattgtttgcctttgctaaagttcagcggaaagattttcgaagagttaggtaagaccggaggtggaaaaaagggtatatgttagttgcaatacaatgaactgtccaacctcagagtaatttttaattcagaatttatagcggattagtggaatggtgactacattcatacctaataattattccaattaaagatactattaactgattgaaaattctttatgtgacccatattcgggcaatcctgaaatacatttggtttatgataatagagtcatacagtagaatcttcaggctaatctaagtataatcggatacccatgggcggttaacgaccagccacgccctcttttggcgcagcattacaatgttgataataaacattcgccacaatggcaatttgtaacaccttctcccgctggaggcggagtttcgatccgaagagccgaaacgctcttcacgctccgccgaatccaacgcgcttttccacaaacagccaaataaaataaagccgaatgaaaactgttacaacaaattaaattaaataatcgtgaaaagcagacgcacgcaccacaaaatatacggcgaatggatgctaaatggtatatatgtatgtttgggaataagacatacattttaactgctgcactaacctttccacccgatgagctggtgaccccaacacagctgtttgagctgtctaattggggttttcttttcgaggtacaaattttccattgtgtggagtgaaagtatttcggttgtgttttttgggggggcgacttgagaaaacccttctccgtgggtgctcgcatctgttttggtctgtttaacgctttgctggccatgttacactttccgctttgcatatcaagccccattcattcgcattcgctgctctttctctttttttcccatgccaccaatgccacaaatgccaccgatgccaccactgcagctggacaagaacaccctggtcggccatctgagggagcacgagcgggccctgatctttggatcacgatctccggaagagggtaagtgttggccccgggcactggacttaagatgaagtaagtagaacgggtggcggtgcacagaaaaacccattacagttacaaatccgtccattttagttacactgactacaactggtactttctttttcgttcattaactaaaatgtcgagcaaatcctataattgttattcacctctttggaaagtcagtagttttgttaaaaggcgttctgcccagaatatttatgacccataattttgctatgtcacgggtgcattttcaataacttataatttgagtcttttttctgagtgagtgaagtattttagccatgacctataactaactgcaacatgtcattaggccaggagcccaaacatcaaccactgcaatcgataaacgctaaacttgagctgttaactgacgggcggtggagaggtagtgggttaaggtgccggggaggagtgggttaaggtgggcggggtcttggaaggggcgcggaaatccgcgcagttgttggcattgatccatggcaggcatttatgttgtttgtttacctggcagcgcccgaattcaaactcgtgcacttggcacaacaacgacctgaggagcagcagcggctggaggagaggaagcggccaggtgaggcggagcagcatgggggcaatcctcaccagagacgtcagcggcgcagcctgccatcagaaggtgagcgaaacagccaaatcgaaatccagagagcacatcgtgctgctccagttgcggtcattatgcgaacagtttaattaatgcaaatgcattcgccagatgggaatgggccactgccgccggaggaggaggagcaggaggctggggaagatgtggaggcgcggttgcagctgcagcagtcgccgcagctgatcgatgacgccttcattttcatccgacgcaccgagaacggcacccagttcgtggagcactcgccgcagctgctcaagcgcctggagagatgcttctatcggagtccagcggctgctctcgatctctgcgagcccggcaatgtggtaagcaagtaaacttaagcttattaaaggtggctttcattagaaatactatgatttctaaatcgatctgtttaaatatcaatctttataattctaattactaattggacttccataaatatgtttatctcatcccggccggttgttaattcttcacgcctcgatcccgcagcgcggcgtgttccaacagaatggcagtgacctggtgatccatccgcttcccgcgcgcttcggcactgggacgcacgtgctctaccaagcgagggtggacaagagcggcggcggctacagtgaggcgtcgtcaaggcgaacggcgtcgccgttagacagccagctgcagttcgagcccgatgcggaggagttcaacgaaccgcggcggcgattgcgggcccagtctcagttacagtccccgttgagattgcgcttccagccacgacatcatcacccacatcagcaccatcagcagcgaagacgccgctacattggggatgcgccgcgctcccgctggtcggatattcctgaggaactcttcattgagacggccatctttgtggacagcgatctctatgctcacatgcagaagaacttccccacaaacacggagagcaaggtggtcagtttcctgctggccatgatcaatggcgtccaactgctataccatcaccccactctgggtcgtcgcatcaatttcgtgctgaagcgcctagagatctggaagtcctgggatccaccgggcctggttcgttccagggatgtggagaactacctgaacagcttctgcaagtggcaggagaaactgaatcccttctccgacgcagatccgctgcactacgatcacgccctggttctgacaggtctcgacctcgtcacctacgacaagggcaaggccaatagccaggtggtgggcatggcgacggtcaagggcatgtgcacctctatctactcctgcaccatcaacgaggccaagcacttcgagagcgtctttgtggtggctcacgaaattggacataagtaagtggaaatcatcctgttgagaatatcatttcatcgcccattatttagtttgggaatgcgacacgatgccaaggagattagctgcgatcctaccatgcacatcatgtccccgaagctgggcagcggcaaggtcacctggtccaagtgctcgcgcacctatcttgaggatttcctaatgtacgtggcttcactagtttcacttaaccacactagttattgaaatatctatcttagggatccccaggcagagtgcctcttcgatcgggactcgttcgcgggtccttgggatcatacggcaggtggtcgtcttcctggcgaacgtttcaatgccaatcagcagtgcatgctgcgctttgggaagaacttcatgcaggctagcacccagagcaagatggaaatctgtcgggatctccactgtcgccaggatggactgccctggacttcgcatccggcgctggagggaaccgaatgcggccccaacatggtaagtctaatgatttgctcggagcattatctcaggtaacaccatatccctaaacttcagtggtgccgaggtggaacctgtgaggcacgttcctccaaacagggcagctactcagccctcaagtcctggcctcctgaacatattcccgaggccacccacgagaagattatccgacatgagccgaacaggattcccccgctgctgcacgactacaatccgatggataatgagctgccaggatcgccctcgaattggggcgagtggagcgagccgagtgcctgtgagtccggctgcctctacgggcagtcacgccgcctcctggagggcagcacaggtctccgaacgttgaacagaagctgcctgaactttccatcgcgctgcattggcagggatcggcgatttgtcacctgcaacacaccgcaatgccacaaggtgcccgtccagacaatcaacgactttgccacccaagtgtgcatgcaggcgaggaagtcggatccggaactcaccggcgagggccagcagctgcccagcacgctggacgcgtcctgcaagatcttctgccgcaccaggaccaatggcaccaagtcccggcgctggacattcccggatggcaccacctgcaaagcgaagcagcacaaccccgaggatatcacctattgcatttccggtcgctgtgagcgcttctcctgcgataattccacctccaacttcttcaagatggacagcagtttctgcgaggcgagatcagtgcgccccacaagggattcctcggatcaggagagcagacagcagaccaacaggcagcgatatgcggagcgccaggagggaaaaccacagaagaatcactacgagaatggtaagctatagttaaataagatagagatatatgtagtaatgcttttcgcttttacagaggtagctaagcgaccttcgtatggccaaggcaaccacatcaatgcgccagcatcgccgtacaagaggaggaactatcacaagccatatcctccagagattccgcgtcccccaccgcctgcctctgcatcactgatcgcattggatcgcagctcgtcctcggaatcggagtgggtggcccacccgggctgccactccaactgcatgacagactcgaagggcgtgcagggtgtcacctcgcggctgaccggtgtggagagcatccaactgtgctcctatcgcattcaaccctgcgagcgtttgcagacggcggcggagtatgcggaacagacgtgtgccaggtatcgccagaaggtgcgcggtctgtccggccacggggcacagatctcggctagcatcgatgagccggaccgcagctgccgcgttggctgccaggatgagttcattaagtacaggtactacctggtgaatggccggaacggacactttccgccaggcactcgctgctcgccggtgggcaaacgatattgcgtgtatggcaggtgcctggaattcggcgacgatgatctgccgctggacaagacccacattagcttgggtcaactgaggacgcgacggaaaaggagctcgatctccaatgatttgttcaacataacggagatattcattaaaccatcacattcaggtgggtgtgcaagtgtaaataattccgataataaccctttttttctttgtacagatatctccgccgaaaacatcgaattcacccaacccattcacgtctccgcagacgaactgagtagcaaaagccgatagcccaatggcttcctggccaccattcccttagtcgattaagttctaagctagcttaagttgcaggctgctcaaaggaaaccgcctgaaaaacacattgatacaagagaggatgctatagtcgatttcctcgactatcagataccccttactcaactagtggcagtgcgaacgagaaagttctttttggtataatcgtataataaaatgaaaaattgcaacatttttgttcaaaactcaaatatccatcttctttaaagaaatgaatgaaacacattgcacatgatggttgaaggactaatagtttgatttcaaactcaggctgttcgaaaaaatgcaattagagcattccagtcacaaaagggctattaaagtgcaatgcaaaaaatatgaacagataataatggtaaaattgaaatcgaaaattcgtttgcggggagccgccttcacctttcaatatcggctacacttgaggcattttccacacccaccagcgattttccatcggtaatatttgtgtaggttcacttttttgaggttcgcatgcaaacgacggcagcaattaccaatactcgataccaaaaagggtaccagcaatcagccaaacattcatacaacacacaaaacacgagtttcgctggtgtgcgtgaagggaaaaattagataaaacacctacgaaacgctgaatatgccacagtctgcagggaaagcgcgcgccgtgtaaatcgaatcgaaacggaaacaaagccccgaaaacagtggaaaaaggaaaaaggaaacgcggaaagcgtcggaaaagcgaagtgtgtgtttagtgcaaggctaacttgtgttttggcccacagcagggtgaagacatatccttctggactcatcctgtcgagttcagtgcacccaagtgcagtgcctcttatgcgaacagttctacaaaccatgaataatgcatagatcagtttaaaagtccacgtgaagtgaaatcctgactgttaattcaaagatatatataacaaggca

SEQ ID NO: 6908 - DNA, 3287 bp, DROSOPHILA
atgccaccaatgccacaaatgccaccgatgccaccactgcagctggacaagaacaccctggtcggccatctgagggagcacgagcgggccctgatctttggatcacgatctccggaagaggcgcccgaattcaaactcgtgcacttggcacaacaacgacctgaggagcagcagcggctggaggagaggaagcggccaggtgaggcggagcagcatgggggcaatcctcaccagagacgtcagcggcgcagcctgccatcagaagatgggaatgggccactgccgccggaggaggaggagcaggaggctggggaagatgtggaggcgcggttgcagctgcagcagtcgccgcagctgatcgatgacgccttcattttcatccgacgcaccgagaacggcacccagttcgtggagcactcgccgcagctgctcaagcgcctggagagatgcttctatcggagtccagcggctgctctcgatctctgcgagcccggcaatgtgcgcggcgtgttccaacagaatggcagtgacctggtgatccatccgcttcccgcgcgcttcggcactgggacgcacgtgctctaccaagcgagggtggacaagagcggcggcggctacagtgaggcgtcgtcaaggcgaacggcgtcgccgttagacagccagctgcagttcgagcccgatgcggaggagttcaacgaaccgcggcggcgattgcgggcccagtctcagttacagtccccgttgagattgcgcttccagccacgacatcatcacccacatcagcaccatcagcagcgaagacgccgctacattggggatgcgccgcgctcccgctggtcggatattcctgaggaactcttcattgagacggccatctttgtggacagcgatctctatgctcacatgcagaagaacttccccacaaacacggagagcaaggtggtcagtttcctgctggccatgatcaatggcgtccaactgctataccatcaccccactctgggtcgtcgcatcaatttcgtgctgaagcgcctagagatctggaagtcctgggatccaccgggcctggttcgttccagggatgtggagaactacctgaacagcttctgcaagtggcaggagaaactgaatcccttctccgacgcagatccgctgcactacgatcacgccctggttctgacaggtctcgacctcgtcacctacgacaagggcaaggccaatagccaggtggtgggcatggcgacggtcaagggcatgtgcacctctatctactcctgcaccatcaacgaggccaagcacttcgagagcgtctttgtggtggctcacgaaattggacataatttgggaatgcgacacgatgccaaggagattagctgcgatcctaccatgcacatcatgtccccgaagctgggcagcggcaaggtcacctggtccaagtgctcgcgcacctatcttgaggatttcctaatggatccccaggcagagtgcctcttcgatcgggactcgttcgcgggtccttgggatcatacggcaggtggtcgtcttcctggcgaacgtttcaatgccaatcagcagtgcatgctgcgctttgggaagaacttcatgcaggctagcacccagagcaagatggaaatctgtcgggatctccactgtcgccaggatggactgccctggacttcgcatccggcgctggagggaaccgaatgcggccccaacatgtggtgccgaggtggaacctgtgaggcacgttcctccaaacagggcagctactcagccctcaagtcctggcctcctgaacatattcccgaggccacccacgagaagattatccgacatgagccgaacaggattcccccgctgctgcacgactacaatccgatggataatgagctgccaggatcgccctcgaattggggcgagtggagcgagccgagtgcctgtgagtccggctgcctctacgggcagtcacgccgcctcctggagggcagcacaggtctccgaacgttgaacagaagctgcctgaactttccatcgcgctgcattggcagggatcggcgatttgtcacctgcaacacaccgcaatgccacaaggtgcccgtccagacaatcaacgactttgccacccaagtgtgcatgcaggcgaggaagtcggatccggaactcaccggcgagggccagcagctgcccagcacgctggacgcgtcctgcaagatcttctgccgcaccaggaccaatggcaccaagtcccggcgctggacattcccggatggcaccacctgcaaagcgaagcagcacaaccccgaggatatcacctattgcatttccggtcgctgtgagcgcttctcctgcgataattccacctccaacttcttcaagatggacagcagtttctgcgaggcgagatcagtgcgccccacaagggattcctcggatcaggagagcagacagcagaccaacaggcagcgatatgcggagcgccaggagggaaaaccacagaagaatcactacgagaatgaggtagctaagcgaccttcgtatggccaaggcaaccacatcaatgcgccagcatcgccgtacaagaggaggaactatcacaagccatatcctccagagattccgcgtcccccaccgcctgcctctgcatcactgatcgcattggatcgcagctcgtcctcggaatcggagtgggtggcccacccgggctgccactccaactgcatgacagactcgaagggcgtgcagggtgtcacctcgcggctgaccggtgtggagagcatccaactgtgctcctatcgcattcaaccctgcgagcgtttgcagacggcggcggagtatgcggaacagacgtgtgccaggtatcgccagaaggtgcgcggtctgtccggccacggggcacagatctcggctagcatcgatgagccggaccgcagctgccgcgttggctgccaggatgagttcattaagtacaggtactacctggtgaatggccggaacggacactttccgccaggcactcgctgctcgccggtgggcaaacgatattgcgtgtatggcaggtgcctggaattcggcgacgatgatctgccgctggacaagacccacattagcttgggtcaactgaggacgcgacggaaaaggagctcgatctccaatgatttgttcaacataacggagatattcattaaaccatcacattcagatatctccgccgaaaacatcgaattcacccaacccattcacgtctccgcagacgaactgagtagcaaaagccgatagcccaatggctt

SEQ ID NO: 6909 - protein, 1091 aa, DROSOPHILA
MPPMPQMPPMPPLQLDKNTLVGHLREHERALIFGSRSPEEAPEFKLVHLAQQRPEEQQRLEERKRPGEAEQHGGNPHQRRQRRSLPSEDGNGPLPPEEEEQEAGEDVEARLQLQQSPQLIDDAFIFIRRTENGTQFVEHSPQLLKRLERCFYRSPAAALDLCEPGNVRGVFQQNGSDLVIHPLPARFGTGTHVLYQARVDKSGGGYSEASSRRTASPLDSQLQFEPDAEEFNEPRRRLRAQSQLQSPLRLRFQPRHHHPHQHHQQRRRRYIGDAPRSRWSDIPEELFIETAIFVDSDLYAHMQKNFPTNTESKVVSFLLAMINGVQLLYHHPTLGRRINFVLKRLEIWKSWDPPGLVRSRDVENYLNSFCKWQEKLNPFSDADPLHYDHALVLTGLDLVTYDKGKANSQVVGMATVKGMCTSIYSCTINEAKHFESVFVVAHEIGHNLGMRHDAKEISCDPTMHIMSPKLGSGKVTWSKCSRTYLEDFLMDPQAECLFDRDSFAGPWDHTAGGRLPGERFNANQQCMLRFGKNFMQASTQSKMEICRDLHCRQDGLPWTSHPALEGTECGPNMWCRGGTCEARSSKQGSYSALKSWPPEHIPEATHEKIIRHEPNRIPPLLHDYNPMDNELPGSPSNWGEWSEPSACESGCLYGQSRRLLEGSTGLRTLNRSCLNFPSRCIGRDRRFVTCNTPQCHKVPVQTINDFATQVCMQARKSDPELTGEGQQLPSTLDASCKIFCRTRTNGTKSRRWTFPDGTTCKAKQHNPEDITYCISGRCERFSCDNSTSNFFKMDSSFCEARSVRPTRDSSDQESRQQTNRQRYAERQEGKPQKNHYENEVAKRPSYGQGNHINAPASPYKRRNYHKPYPPEIPRPPPPASASLIALDRSSSSESEWVAHPGCHSNCMTDSKGVQGVTSRLTGVESIQLCSYRIQPCERLQTAAEYAEQTCARYRQKVRGLSGHGAQISASIDEPDRSCRVGCQDEFIKYRYYLVNGRNGHFPPGTRCSPVGKRYCVYGRCLEFGDDDLPLDKTHISLGQLRTRRKRSSISNDLFNITEIFIKPSHSDISAENIEFTQPIHVSADELSSKSR

SEQ ID NO: 6910 - DNA, 9939 bp, DROSOPHILA
tcctcaaacagcgaaaagccgagacaaagacggacttagattcccgggaatatttgaacgaaaactcgtttggaaatgttcaggagcacctagtcatctttcgccgactgtgtcttcgcttttccaccgttttggttattatttttggggtcgaggcttacaaattgccgtaaataaatagttttgcgcttagaactaaattccacttaacttaggctttttaaaatatacacgtatgaatagtggtcacaaaaaagtattcgttacggttaatcgtagttttctactatttatataacaataggcaacaacacagggcagagaactgttgtaggttgggtgtacatggctgtatgcacagcagcggtcaaggcaatagcacaataagacagactcgaagagaagcgtggttcagaattccaagcaattatcattagataagggtttgtaaatattgcttgtgataaatggcatttagggaatgccaaatggcatatggccatatgaaatgttgcactataaaacaattttaaaattcaaaaataaagaagtgactacaatgcgcttttgtttcgaccgctaccttcgacactgcagcccctttcaagcagcttttacaacttgaatcaatcagaagaggtcggtttttttacaatacaatctgggtgtacatatatacttgtatatatacatgtgtgtgtgagtcgttttcgcacgcaagtgaaagggagaggacgctggtagacatggacagagatagagatagacatagagtaagacgcgacttaggctaaacataaaaacaagctgggatctccggataccaatgattcctacaatggcgccgctccttttgctcaactgggggttcaccttctcgtaatcgctgtagaatccgccacgttagctttccatttacctctcaacgcgtccgccgccgggagctgccgtttctggtgtcctggcgcggattggacaattcttatgacgtctctaaaaatcataccttaaaggtcttctcgcgtcgctcccgctgttgctgttgttgctgctgctgttgctgctgatcccgcgcatggtgatcccgctggtgctggtgactgctgctcctgtgaccagtagttccattggctggctgcagcatggagctcatggagccggcgctgcagagcgctgaggagttgacctcttcgcaggcatagctggcaatgcggtgatcgctccgcgaccgctcgcgatcgtggctgcggtggtgatcctgactgacaatcggtgcacctgctcctccgtttctcttgctcggagccgcctgctgctgcgatcttcggttgcccaaacgcttcagttcatagtccctggcatcggccacatcgaaagtggctgctctttgctgaccttgcttgccgtgcttagaggcagagctagtagctaccgctcctccacccgtcggaccgccagttcctcctgcaaccgcatgcatttcataggcctgggggtagaactcatcatactcgtgctcctcacacagattggcgttgcagggcgcctgctgctcccgctctaggttgcgctccctctcccgctggcgatgcttcttgggtggcaggggaacaggcgcctggttctgcgattgcgtctggttttgggtgtgggtctgagtttgtgtagccgccgccgcgtgcagcgatgtggacgatgcgcctcggcgcaccacatccacaccgccgccgcagcaggcgcactcctacaactccgtcaccgagtacagatcgctctggttgctgatggcggctcctccgccagtaactcctccgctgccagtagatacgcgttctccccgtttcagggatctgtaaaacagcgcctgctgttgctgctgctgctgttccagcattagctgttgctgctgcttcgatgagaagttgttgttgtgctgcctttgataaaaggcctgctgctgctgctgctgatggtagctgctgtcataggagtgttgcttcttcatgttgctgctggttatcagatggctgggatactgttgctgctgttctatgtagctgcgtgcattgtccaaggtctcagccctccgcggacgctcccgctcccgttctcgctccctgtcgcgctcctgctgctgctgctgctgttgttgttgttgtctcaagctggctgacttgggcggcaaggtttgcatatgattggcattgctgctgtcgatggctccaccgcgattgctgtttttgtgccggttcttgggcgggagcgttggtggctgctgcggcgaggagatggcagccggctgcaatttctgggtttgaggacgctgcagcgagcggtactgccccaagctggcggcgcaaagcggctgagcggagatctttgactgttgttgattggtgggaatctcgggcaacggttggttcacaatggaggcgggatttagcgaacgctgctgcgcacgcggtgccgctgtgggcagcacctcactgctctcgatgctgtagacagccgaagcgggtagaatgtgggtggtcggtggatgcaactccctttgatgctgctgctgctgctgttgctgcagctcccgctcgcgctgctgctggagggtgagcagctgctgttgctgctgctgttgctgctgctgctgcagggccaacagttgctgctgttgttgctgctccttggcatacgagctgcccacgcccgtggtgccgggaatttccgtaaacgtattgactatctttggtttgggtggaggcggaggcgccggttgcggcggagcgggaggcaccatctgctgttgttggagttgcagctgttgctgctgaagctgctgctgcagttgctgttgctgctgttgttgttgctgctgcagctgttgttgctgctgctgctgctgctgctggaggaggaactcctgaggaatgcagtccggctgctggcaataatccttcgaaacggtggctatcgacggcgtcttggcgctcctcaagtttggcgaatggacagctggggcggcggcgggcgagggcgtggcattgacggcagacacacccttgagcgagccaccatagcgaccaacatgccgcaaggtggcacacttgttggcacctccggcgacggacataatatttaaattattattctgacccctcaccgctttggggccaatgcttatgtacttggggtcgaaacgattgaagctgttgttggtcacatccctaggatcgcgatcgtccaccatgtcgccgtccagtccgttgcccgtggagcggcaaatgcccgcattggaggtttgaacggagagcacggaccgaatggagctgcccgtcgagcggggcagggtggccgacgcaaagatgttcttcagcgtgctctggctttggttctgattgatgaggttgctctgctgctggtgctgctggagctgcaagttctgctgctgctgctgtgctgtgttgctgctactgcctgcatgggaactgcaggcaagcgaatctcagtagaagtcgttggactcgagcgttttacactgcttgctgagcgtcgcgtactttccattgttgggtcctggcaaatacgtcgccgattgctggtggtgcgatggaaggcgtcctagcgtgtggtgtcctgacctgaaagtcgaagtgtttattttagtgctcggccaatttcagttgagaaggagaggtgggtgatttagttgaatttagttagcctttcattatgaacgtaatgtttgctttaacggagatgctggtctacaactgttggaatatttaaggaagtcctacgatttcaatcaaagatgactgtactgcactaagtcgccttaaaaaggaacctctaggttaaagaaaatctgtttctaacttttttggcaacttatatatatatattatatataagttatattatgccgaaacaagcagattctattagtatttttaattgacatctgcagtggttagtaaggcgaatatgttggttttaggtctttgttaacagtgaaatcccgctttgagatctgtatgtaggttgggtctgtgctagtgtctttgtgttttttttgtagtgcgagtgctggtgttcattgtcggtgttcacatgcaggtgcagcacgacgaaaggatcagcgaaacagctaataaaccaaaacaaaggccaaacaaaaacgaaggtaaataaaactataagcaaacacgactaacaaggtctcaactagaagcgtaaatcaaaggatatgtagtcgatcgtctattgatcgactacgaggaacccgctgcccatattcatgctttttttttttttttttttttgcctcaaaacataacaaaacattttctgaccggacaaagaaagtgtcttatgctacgttaactaggatagctaatgaatcttgatcagcgagttgtaaaataggaaacggaaaggtacaaacgcataagggaaaagaaaggagggggattcggaagtcgagcggttggggaatatcaacaaatcaaatgaaattaaagttcatgccttgtgccatgcaccaaatcgtagacaggcggcggcgacggtgatcgctggccactgctgaccacgcccaccgccgctgctaccgcccccgccgcagggttagttctatgctgtgtgttgttgtagtggttgttgctgtggctgtagtggttgctgtacaggtggttgttgtgttgttggtggctgttgtggtaactggtggtgccgttgttgtaagtagcggtggatgaggtgtggcttgattgagatgaaggtgatgccaacccttgtctcaggcccgccgatccgttgcggtacggccccacgccattgtgtccattggcgccaacgcctccgccagcccctgcgcctcccccagatcccggcaaggtacccgaaccgccgcccgacgacgcctgctggtggtggagcaacgtcctgttgatcgtccccgtgctgagcggagctgtgggcgagatgctcgcgctcggcgcgtttgaggcgggaaatagtggcgctgtctccgatttgtccgcgtccagcgtaggcctttaaaaatagatacacaaatttacaataagaaggccatctcgatggggcagattgccacgcaagccatcataccgcttggtcagatagatccaggcgtgagaatcggcatacacgaggatcgtcagcaggaaggaggtcagcagaccagccaccatcatcagactgagtcccagtagcccgccgccgcaaagtccgcgcagtgcctcctcgtagtgcatgtcgatcgtgcggcggtccaatgtggccgacagtgtcgtcaggttgcgcagggtgatctctagatcgttgtccatggcgttcaaagtgcgctggatgtcgatgtgtggatatgtctcctgactcatgctgcaataaatgaatttgtttaagtttagttcctagtttcccaaagcactccaatcaaacgatttcactactcaccgctgcatatgctccacactttccctggcccgatccaccaggtcccgggattcgtttagccgcaggataaagcgattgcgcggtgtgccgcagtttagaaaatcaacatagggacttctctgaggatggcagacgagatgatagcacttagtatacgttttagaggaaagcatgtatcaatacccaccatgcccacctgacggcacatatagtcgtggggccgcatacagaaatctccggcagccacactggaggccaaataaacgccagctagcagccagcagatgatgatgcagaacagacccgagacgctgaagaagatcagggtgcaacgggatcgcctcgccacgccgatcaccaacaccgtacagagcagcaggagcacagtgagaaaggccagggtggctggccagcgaatggattcgtagaactcaccgagctaaaagagatcaatgttagttagttcggaggcatttgcgactaggaggacactggctcacctgcagtaatcccattagcgaggtgtcgttctcgctgcccttggccttcataaagtagtgaaccatgctgtccagcgaggccaccgcccgcgaggtgttctccgtgaccaagcgcgacgtctcaataagcagcatgaccaccgtctggttataatgaggcttctccaccagctgctccaccttatgcccagccattcgcgtctccaggtcgtgcttgatgctctccgtctgaaagtgagcaaatcattattttcgtaccagttgtatacaaatgacaccaccactttttggttcatttattttatttaaaatttaaaacatatgaagcaaggtaaaactatcaaatattcccattcccgattcgcacaggcaactcgagttcagcctccaaaaagggaaaagcagttcaaaagttaatgaccaaatactggtggattggaggcgaaaaaggggacccttccgcttcgtcctgtgcttttccacatgtcctttgcccctgtttctcagtctggcacaaaggacgccagaagaaaagggaaagaggcagaaatagtttctatcgtaatactttggcttccgcacttggctgggcgttcattgggggtcgggattccagggatgtatggctccacacacgcacgtcgccagctgcagccacgccccctctgttaagagtaaccacccacccgccccgttcgaccaccgtcctttgtgccggggataattaatagcgttttactcaagagtcgagcaatgccagccatctgtttgccccgcttttctgggagaatctctgctacgacgacgtcgtcgtcgtcgtcgtcgtctacctttgactcaccttcctcccctgccccacttcaaccacccaacccccagccaccccaacccttaaccttttggcttatcggctcgtttgccccgcccactcggtctccttccccgtctctctgtgtgtgtgtgtgtgtgtgtgctgacaaagtttgtgaatagcaaaggcaagagcagaagcaagagcaaatgcaaaagctttggccaggacgacaggaggacacttccccttgtcccatgtcccatagtcgcctagtcccctagtcagccccattacccatccagcgcgcaccgtgctgtcccacgtggccacgtaactgtcagcacagcagccagcttttaggttgattataatgaacaagaatgagccaaatgggcggctgcttcgaatggaataggaataggaatagaaatgggatagggaacgggaactggagtgcgaatagcgggcgcagaagttcatgcagccacgttgaactgagaaaggcatagccgtagccactgggcgtaacttagcccagtaaaagactccacttcagacttgcaattcatatataaaaaagaaggcagctctgcagtgcagtttgctggcctaacttgccatcttaattagtaaaaaaaaaaagagaaacagctccttcctcgcaaatttatgaaccacacttacctgtcgtttcagggtgagcaccagaccctcgacgctcttcccggatccaaaggcctgcagaagcccattatggaaatcatcgttgccgtacaagcctgcaaatggagcatgaatcgaaaagcggacatcagtcaaggagacagattagtattgcagagagatgcgtcgatgggcagccaaaagatgccagagatcaggagggcatcaaagatcagggcaagatcagcgcggtgcaggtcagtgatgtaacgcgagccgcggcacacatttcgccactccgattcaattaagtgctctgtgcgcggctctgcgcctaattaaattattatttcatcgtttgtgtcgccgccagccaagccacatccacatccacattcccacttccagcgcggtcggatgacgcatggtcctccagttttggctccacttctttgcgctccgcgactttgcatacgtgaccagccagtgtactccgctccattggcgataagttacgttttggctaattgccaattgcccaccgactacagtagcgactaccgaccaccgacaaccaactgccgccaacacgcgatgcaaccgcaaagggatgcatgcgaacgtgccttggcaaatgcaactgctgcggttcaatgcccttcgccacggcgattcggggaagcaggactcacctaatccgatggcggcgcaggtcatcagcgtaatgatgaccaaggagcagctctggcagcgctgggcgctcggcttcctctggcggcgatcgcagcatctggtcagcaggtagagcagcaggcccagtagggagccgatcagcagaccagcgggaatggatgccaggatgaccagactctgtaaaagtgcaaaaggaaatggaatggtttagcttaataatctttagtctaagttcagcaatcctccacctgattctaccaaacagttccaacacatatgcatgggtgtacaattcgcagtgacagcagcattgcactgaaagttacgattgcaccagaattgtttgttcggtttcaattaaaattgatttgattgatattgacattgattttgttgaacagaattcgattgaactatttgtataatgtgaaggtgaagtcccaatcgagagagaaagagtacatacatacacatatatatattaggatggaactggatactttgggatactcgacgttattaatcaaatatcatagcacatcatatgaatgaagctgcagaggagttggctattattgaatgaatcaacaaagtcgtgtgccatttttaattagaatgtatgctagtcattcggcagacagttgtgtgaacataactctctatataaaaatcagttttggtgaactcccatgttcaaggctctttgcgctggacattggagaaacttttaattgaataacttgcaactcgatgcctttttgttggcactgcaatttgttgttagttggcttcatggtcgagtgtcctttgcaaggataatttcttttttgctcggctccgttaccgaaattaaattgagttggccaatgtagagacacacaacacacaggacacaggacctggaccttccttaccatcctatggccacaaaaaatgccttgactgggcggtaatttcgttgcctgtcattaaaaaaggacgttgtgtgcgatgtgtactgcaggctttgggttacccgtccacgataggatattggatatttcggattcgaacgaatggcaaatgagtcaggccacttgaaacgtacattccagtcggtttgagtactatagaagagtcaagttccagttacacgattcacgatttcagactaagctcagtggcttagtggggtatacttcattgggagcaagtgaaagactccatgaagtttatttaaatgacagttcctggggaaccaaagcttctactgccaataaaaaccggataatcaatgctggccagtcatagttcgagcatacatatatgcagcaattcccagccgtcaatcagttttcaatagcaatagcaatcgcaatcggaattggaattggaaccgacaccggacgcaccaccatccatcccccaacccattccgacatggaacatcctctcgagcgcacttttctcctttgccttccttggctgcgaggcgtatttattatttattgcacttgtgtcatgtaaataatcattaaaactagttacagttgccgtcgtcgtcgtcgtcgttgttattgtagtcttgtagcctcggcacacttacttgtcctcctcgcagttgaatgaccctcgagaaatggcccacccacccatcgccacctttcttcctttcttcactacgcaccgaaaaaaaggcccagctaaggagttatttgtcttggaaattcacttgcgtaagggtttaagatctcttacagcaaaactaaatattggtgtgtgaataaatcttgtcatatgcattcagacttgcgg

SEQ ID NO: 6911 - DNA, 4110 bp, DROSOPHILA
atgaagccaactaacaacaaattgcagtgccaacaaaaaggcatcgagttgcaaagtctggtcatcctggcatccattcccgctggtctgctgatcggctccctactgggcctgctgctctacctgctgaccagatgctgcgatcgccgccagaggaagccgagcgcccagcgctgccagagctgctccttggtcatcattacgctgatgacctgcgccgccatcggattaggcttgtacggcaacgatgatttccataatgggcttctgcaggcctttggatccgggaagagcgtcgagggtctggtgctcaccctgaaacgacagacggagagcatcaagcacgacctggagacgcgaatggctgggcataaggtggagcagctggtggagaagcctcattataaccagacggtggtcatgctgcttattgagacgtcgcgcttggtcacggagaacacctcgcgggcggtggcctcgctggacagcatggttcactactttatgaaggccaagggcagcgagaacgacacctcgctaatgggattactgcagctcggtgagttctacgaatccattcgctggccagccaccctggcctttctcactgtgctcctgctgctctgtacggtgttggtgatcggcgtggcgaggcgatcccgttgcaccctgatcttcttcagcgtctcgggtctgttctgcatcatcatctgctggctgctagctggcgtttatttggcctccagtgtggctgccggagatttctgtatgcggccccacgactatatgtgccgtcaggtgggcatgagaagtccctatgttgattttctaaactgcggcacaccgcgcaatcgctttatcctgcggctaaacgaatcccgggacctggtggatcgggccagggaaagtgtggagcatatgcagcgcatgagtcaggagacatatccacacatcgacatccagcgcactttgaacgccatggacaacgatctagagatcaccctgcgcaacctgacgacactgtcggccacattggaccgccgcacgatcgacatgcactacgaggaggcactgcgcggactttgcggcggcgggctactgggactcagtctgatgatggtggctggtctgctgacctccttcctgctgacgatcctcgtgtatgccgattctcacgcctggatctatctgaccaagcggcctacgctggacgcggacaaatcggagacagcgccactatttcccgcctcaaacgcgccgagcgcgagcatctcgcccacagctccgctcagcacggggacgatcaacaggacgttgctccaccaccagcaggcgtcgtcgggcggcggttcgggtaccttgccgggatctgggggaggcgcaggggctggcggaggcgttggcgccaatggacacaatggcgtggggccgtaccgcaacggatcggcgggcctgagacaagggttggcatcaccttcatctcaatcaagccacacctcatccaccgctacttacaacaacggcaccaccagttaccacaacagccaccaacaacacaacaaccacctgtacagcaaccactacagccacagcaacaaccactacaacaacacacagcatagaactaaccctgcggcgggggcggtagcagcggcggtgggcgtggtcagcagtggccagcgatcaccgtcgccgccgcctgtctacgatttggacgccttccatcgcaccaccagcaatcggcgacgtatttgccaggacccaacaatggaaagcagtagcagcaacacagcacagcagcagcagcagaacttgcagctccagcagcaccagcagcagagcaacctcatcaatcagaaccaaagccagagcacgctgaagaacatctttgcgtcggccaccctgccccgctcgacgggcagctccattcggtccgtgctctccgttcaaacctccaatgcgggcatttgccgctccacgggcaacggactggacggcgacatggtggacgatcgcgatcctagggatgtgaccaacaacagcttcaatcgtttcgaccccaagtacataagcattggccccaaagcggtgaggggtcagaataataatttaaatattatgtccgtcgccggaggtgccaacaagtgtgccaccttgcggcatgttggtcgctatggtggctcgctcaagggtgtgtctgccgtcaatgccacgccctcgcccgccgccgccccagctgtccattcgccaaacttgaggagcgccaagacgccgtcgatagccaccgtttcgaaggattattgccagcagccggactgcattcctcaggagttcctcctccagcagcagcagcagcagcagcaacaacagctgcagcagcaacaacaacagcagcaacagcaactgcagcagcagcttcagcagcaacagctgcaactccaacaacagcagatggtgcctcccgctccgccgcaaccggcgcctccgcctccacccaaaccaaagatagtcaatacgtttacggaaattcccggcaccacgggcgtgggcagctcgtatgccaaggagcagcaacaacagcagcaactgttggccctgcagcagcagcagcaacagcagcagcaacagcagctgctcaccctccagcagcagcgcgagcgggagctgcagcaacagcagcagcagcagcatcaaagggagttgcatccaccgaccacccacattctacccgcttcggctgtctacagcatcgagagcagtgaggtgctgcccacagcggcaccgcgtgcgcagcagcgttcgctaaatcccgcctccattgtgaaccaaccgttgcccgagattcccaccaatcaacaacagtcaaagatctccgctcagccgctttgcgccgccagcttggggcagtaccgctcgctgcagcgtcctcaaacccagaaattgcagccggctgccatctcctcgccgcagcagccaccaacgctcccgcccaagaaccggcacaaaaacagcaatcgcggtggagccatcgacagcagcaatgccaatcatatgcaaaccttgccgcccaagtcagccagcttgagacaacaacaacaacagcagcagcagcagcaggagcgcgacagggagcgagaacgggagcgggagcgtccgcggagggctgagaccttggacaatgcacgcagctacatagaacagcagcaacagtatcccagccatctgataaccagcagcaacatgaagaagcaacactcctatgacagcagctaccatcagcagcagcagcagcaggccttttatcaaaggcagcacaacaacaacttctcatcgaagcagcagcaacagctaatgctggaacagcagcagcagcaacagcaggcgctgttttacagatccctgaaacggggagaacgcgtatctactggcagcggaggagttactggcggaggagccgccatcagcaaccagagcgatctgtactcgaaccaggcgcctgttcccctgccacccaagaagcatcgccagcgggagagggagcgcaacctagagcgggagcagcaggcgccctgcaacgccaatctgtgtgaggagcacgagtatgatgagttctacccccaggcctatgaaatgcatgcggttgcaggaggaactggcggtccgacgggtggaggagcggtagctactagctctgcctctaagcacggcaagcaaggtcagcaaagagcagccactttcgatgtggccgatgccagggactatgaactgaagcgtttgggcaaccgaagatcgcagcagcaggcggctccgagcaagagaaacggaggagcaggtgcaccgattgtcagtcaggatcaccaccgcagccacgatcgcgagcggtcgcggagcgatcaccgcattgccagctatgcctgcgaagaggtcaactcctcagcgctctgcagcgccggctccatgagctccatgctgcagccagccaatggaactactggtcacaggagcagcagtcaccagcaccagcgggatcaccatgcgcgggatcagcagcaacagcagcagcaacaacagcaacagcgggagcgacgcgagaagacctttaaggtatga

SEQ ID NO: 6912 - protein, 1369 aa, DROSOPHILA
MKPTNNKLQCQQKGIELQSLVILASIPAGLLIGSLLGLLLYLLTRCCDRRQRKPSAQRCQSCSLVIITLMTCAAIGLGLYGNDDFHNGLLQAFGSGKSVEGLVLTLKRQTESIKHDLETRMAGHKVEQLVEKPHYNQTVVMLLIETSRLVTENTSRAVASLDSMVHYFMKAKGSENDTSLMGLLQLGEFYESIRWPATLAFLTVLLLLCTVLVIGVARRSRCTLIFFSVSGLFCIIICWLLAGVYLASSVAAGDFCMRPHDYMCRQVGMRSPYVDFLNCGTPRNRFILRLNESRDLVDRARESVEHMQRMSQETYPHIDIQRTLNAMDNDLEITLRNLTTLSATLDRRTIDMHYEEALRGLCGGGLLGLSLMMVAGLLTSFLLTILVYADSHAWIYLTKRPTLDADKSETAPLFPASNAPSASISPTAPLSTGTINRTLLHHQQASSGGGSGTLPGSGGGAGAGGGVGANGHNGVGPYRNGSAGLRQGLASPSSQSSHTSSTATYNNGTTSYHNSHQQHNNHLYSNHYSHSNNHYNNTQHRTNPAAGAVAAAVGVVSSGQRSPSPPPVYDLDAFHRTTSNRRRICQDPTMESSSSNTAQQQQQNLQLQQHQQQSNLINQNQSQSTLKNIFASATLPRSTGSSIRSVLSVQTSNAGICRSTGNGLDGDMVDDRDPRDVTNNSFNRFDPKYISIGPKAVRGQNNNLNIMSVAGGANKCATLRHVGRYGGSLKGVSAVNATPSPAAAPAVHSPNLRSAKTPSIATVSKDYCQQPDCIPQEFLLQQQQQQQQQQLQQQQQQQQQQLQQQLQQQQLQLQQQQMVPPAPPQPAPPPPPKPKIVNTFTEIPGTTGVGSSYAKEQQQQQQLLALQQQQQQQQQQQLLTLQQQRERELQQQQQQQHQRELHPPTTHILPASAVYSIESSEVLPTAAPRAQQRSLNPASIVNQPLPEIPTNQQQSKISAQPLCAASLGQYRSLQRPQTQKLQPAAISSPQQPPTLPPKNRHKNSNRGGAIDSSNANHMQTLPPKSASLRQQQQQQQQQQERDRERERERERPRRAETLDNARSYIEQQQQYPSHLITSSNMKKQHSYDSSYHQQQQQQAFYQRQHNNNFSSKQQQQLMLEQQQQQQQALFYRSLKRGERVSTGSGGVTGGGAAISNQSDLYSNQAPVPLPPKKHRQRERERNLEREQQAPCNANLCEEHEYDEFYPQAYEMHAVAGGTGGPTGGGAVATSSASKHGKQGQQRAATFDVADARDYELKRLGNRRSQQQAAPSKRNGGAGAPIVSQDHHRSHDRERSRSDHRIASYACEEVNSSALCSAGSMSSMLQPANGTTGHRSSSHQHQRDHHARDQQQQQQQQQQQRERREKTFKV

SEQ ID NO: 6913 - DNA, 4744 bp, DROSOPHILA
aacctgcggccactctctcttctttgacttgccgaaatctggcaacactcgacaagagtactaaccttatcggccaaactgaagttttaactctgagcccacgcgatcgagtgactgactatagcattttgcggtagcccctatttattcaaaatatctctctctcgcgtcggcaagtgagaaaaagaaagacagaaagagagagagagagagtgtgtgcgtgggagaaagaccactgcttttttttgaggggagattttttgataaggcctgagatttggatttttgaaggccccagaaataccgcctaagatttgaacatgcatttgaaataccggtttgtacatcgaccgcaggttaccgttagaaatgttatgcgggatacatagttaagttgcataccctttgagttacaatcactagttaataatatctacgttattaccaacacgcacactttatcgtaatacctccttgaagtttaatttatacatcaactttatcagtcaaaactttgatttcgtctgacacttttttcgattacgatccgtcgccaataattgcgataaatcttatcaagtctttttgggattggcgctcaaatttacaatatggccgtacatcctacttatgtatgttttttaactaattaatcaccacaatgcaaagtactctttctttgttgagcccatatgcactcacatttgcaccatgaatcatgtcagtagctcgtttcatgtaacaatttctactttgccagattacgatgcgttcggaacaggcagataagaattcggcccatccaagaaaggccttgacagttctaccccaaaatagagatatcctcgtgatattagaaggaacccaacaatatgctcgttcttatcttcttatagaaatttgtgaattcccgtatccaatgaaatcattttacttagtaaaatgatttgttaggccttaaaaaaaaacaaaaacacccgaactatcagtaccacaatttaagagagaactcgttattatttaactttattaattatgtatttctttatcaaaagagcagactttttgtttgtgactgtcttcaacattagatccgtctttaacattagatcagatcacctgacacgggaaactctcgtagactttatacaattcaaaaaaaccaaaatcgttacttgacacaaatatcataactaatgcataaaatatgaaatgagagatatctaaaatagcttggcatattttcttggtaaaataaatgtgttaaatacaaagaatgtaaaatgcaataaatgatacatatatcaaaaatggaataccacggttactttaagtgctagcataacaaattacaataataattcaatatctagccattcgttgcacataatttggagggttaagagggtaaacaatggatgggaaatgggctgggttagttgcgaattggtttatatggtttataatccaacatcagtattatcgttttcgttagtatgtaaatacaatttgattttgttctatcgtgaatttcaattggaagcttttatgagttctgtcccaccacctgcacgtagttggctggaaagagtccgtagcggttcttgcacaatcccctccaccacccatcgtcgatcttctcgatgtgggtgatcacgtcatctggatcaaaggatatctcgtcgtcatccgccgcctggtagtcgtacagggcaatggcgtggattccggtgtcctccagatagtcggccaaattgtctgagttcgcgtagattgcctcctcgggaacggttgcggtgccactcggagcaacagcctctgaaacggttccattcgttggtggcaagggcgaggcagccttaatctcggcctggttctggtacagtggctcttcttcaactactggctcaggatcggcttgaggttgcggctcaggttggacttggacttgggcgtggacttcgggttgaggcgtcggcacatacactggtgattgcggctcacttctgggaggcgtgtccacggtctcaacctcaatttggggcaccacatctggtggtggagctgcagccttggccactggagctgtttccggctctcgagcggggaccactgtcggagtaggagcaaccgcagctgatgttgtacttgccgttggctcctcctttgcttctaattctattttaacaggctgcgccttgggaatgataatgggttcctttcgtgctggaggggtttcagaaacaggcgactgcatctggttaaatgcactgatagcattgccaatgccaccggtccgacctgtctggatggccgccctgctgccctttggaggcggtgcttccgtcgaggtacgaggagtgttctcggccacagtcttcttggcggcttcctcccgatcccgcttgtccttggcctcacggagacgtttctgttcctcggcccgcttacgtgactcctcctcggagtttttagccagattctcgaacttggcacgcaaattggaaggcttggcaccttcgatgactggcttgaccttgtggtccacctggctggcgtgcttctgcggagcctctttgtggtcccatcccaccgcggacttgtcctttcggtcctcctgaacgccaaacttgccgccaaagcccttggagtaatcttatgttgggagaagatataaataaaataatcagacatgaacatactaagaaaaaatcaatgagaaattcatttccgttaggtaacttacccttctgagactcgtgcttctccaccttctcgatgtgatcccagcccacggcggatttatccacccgatcggactgcactccaaatttgcctccgaagccggtggcgtaatccttctgggaggcgtgcttctcgaccttttcgacgtggtcccagcccacggcagacttgtccttgcgatcctcttgcactccgaactttcccccaaaaccatcgctgtagtccttctgcgaggcgtgctttcccaccttgccctggtagtcatgacccacagccgacttgtccatgcggtccttctcaacgccaaacttgcccccgtatccgtatcctgcgttctgatccttcagcagctgcttcttcttgtccagatcggcctgctccgtctcctcgcgcagcttgtccatgctaaaaagaataaagaaagggaacaatgaacccgatacccagtgtttcgagaatttcggatgactcactcgatggtgcctgctgtgcgaccgctgccgtcgatcgtctttgatccccagcgctgctcctgctcactgacatcgttcacgaagtccggatccgtctcccagtcgtcgtcctccgcggaggctgcactggtggcctgaatctggtgaccggcacttgccttccacattctttttaccggtttctggtcgctggttactcgcttatccttatctgctgggtagatagataaacaccatgacgagtgtgagtagtcggggcaggttttcagttgcaggggctccgcttccgattcgtggcccagataacaagtcacaaaacaccgaagaagggaggggccgacaaagccggatcgggaacaagatgccactggcgctctatgttcatatgtatactcacatcccgatgactaactcctactgcaagaggaacttatgatctgatgccgctagggatgtctgcaaatttctgggaggagaagggttaaacaattgattcataaagagaccaacaaacgggaaactaactgaactaaatttcattcgatacaatggatgcatcgatatgctacgaaaagccgataaattattgtgatgagcttgacaaaaggtagttgctgcagttttaggggcgcccaatttaaatgattaagagatacagtcgtggttcttttactttattcgataagtcaatgcaccgatatatactgcagtaccaatatatgtgatcgtgatcaatagaactgagtgctcgggcaaaaggtatttgatgttataccaagtggcgccatagtaatttgtataattaataagattctgccagaacggtaattaacaggtataagagttgacttttttcatataaccgcaaacatatcatcgatatatcgatagttttggatttgaatttgcttcgatgtcggctgacaattaacgtaattggtttttatatatagttataaaaatacaaataaaaatagttataaaacggcttaggaaggaacaggatatttatttaactgtattgccctaacggctgaatattgaagtcaaaggttacattttgaaattcaatgcgtaatcagatcttattttcccaatgtcgtcattatcacaacggaaatatcatgaatgtctcaacagcttccaatgccgatgattcatccatctcggaacactttagattctacggtgtatactatgacgacgcagaagataccagcttccagttaggcgctaccaccgaatatttcctagcaacaacaacctatcgccggttggttcatctctaatcgacttccagcgagagagcgcgagtataaaagccaaagacggagcgcaaacagctatggtatttattcacatcgcttgcagttcgcatcgtctgacttgtacgttgaaaatcgaatatcattggtaaatcaaaaggaatttgtagataaaactcattgtttactctcgctgtgccagaaatcgcaaaaaatcaagcggaaaatcagtcggaaaagtgagaaaagaaagtgtgtgct

SEQ ID NO: 6914 - DNA, 2399 bp, DROSOPHILA
agttagtttcccgtttgttggtctctttatgaatcaattgtttaacccttctcctcccagaaatttgcagacatccctagcggcatcagatcataagttcctcttgcagtaggagttagtcatcgggatataaggataagcgagtaaccagcgaccagaaaccggtaaaaagaatgtggaaggcaagtgccggtcaccagattcaggccaccagtgcagcctccgcggaggacgacgactgggagacggatccggacttcgtgaacgatgtcagtgagcaggagcagcgctggggatcaaagacgatcgacggcagcggtcgcacagcaggcaccatcgacatggacaagctgcgcgaggagacggagcaggccgatctggacaagaagaagcagctgctgaaggatcagaacgcaggatacggatacgggggcaagtttggcgttgagaaggaccgcatggacaagtcggctgtgggtcatgactaccagggcaaggtgggaaagcacgcctcgcagaaggactacagcgatggttttgggggaaagttcggagtgcaagaggatcgcaaggacaagtctgccgtgggctgggaccacgtcgaaaaggtcgagaagcacgcctcccagaaggattacgccaccggcttcggaggcaaatttggagtgcagtccgatcgggtggataaatccgccgtgggctgggatcacatcgagaaggtggagaagcacgagtctcagaaggattactccaagggctttggcggcaagtttggcgttcaggaggaccgaaaggacaagtccgcggtgggatgggaccacaaagaggctccgcagaagcacgccagccaggtggaccacaaggtcaagccagtcatcgaaggtgccaagccttccaatttgcgtgccaagttcgagaatctggctaaaaactccgaggaggagtcacgtaagcgggccgaggaacagaaacgtctccgtgaggccaaggacaagcgggatcgggaggaagccgccaagaagactgtggccgagaacactcctcgtacctcgacggaagcaccgcctccaaagggcagcagggcggccatccagacaggtcggaccggtggcattggcaatgctatcagtgcatttaaccagatgcagtcgcctgtttctgaaacccctccagcacgaaaggaacccattatcattcccaaggcgcagcctgttaaaatagaattagaagcaaaggaggagccaacggcaagtacaacatcagctgcggttgctcctactccgacagtggtccccgctcgagagccggaaacagctccagtggccaaggctgcagctccaccaccagatgtggtgccccaaattgaggttgagaccgtggacacgcctcccagaagtgagccgcaatcaccagtgtatgtgccgacgcctcaacccgaagtccacgcccaagtccaagtccaacctgagccgcaacctcaagccgatcctgagccagtagttgaagaagagccactgtaccagaaccaggccgagattaaggctgcctcgcccttgccaccaacgaatggaaccgtttcagaggctgttgctccgagtggcaccgcaaccgttcccgaggaggcaatctacgcgaactcagacaatttggccgactatctggaggacaccggaatccacgccattgccctgtacgactaccaggcggcggatgacgacgagatatcctttgatccagatgacgtgatcacccacatcgagaagatcgacgatgggtggtggaggggattgtgcaagaaccgctacggactctttccagccaactacgtgcaggtggtgggacagaactcataaaagcttccaattgaaattcacgatagaacaaaatcaaattgtatttacatactaacgaaaacgataatactgatgttggattataaaccatataaaccaattcgcaactaacccagcccatttcccatccattgtttaccctcttaaccctccaaattatgtgcaacgaatggctagatattgaattattattgtaatttgttatgctagcacttaaagtaaccgtggtattccatttttgatatatgtatcatttattgcattttacattctttgtatttaacacatttattttaccaagaaaatatgccaagctattttagatatctctcatttcatattttatgcattagttatgatatttgtgtcaagtaacgattttggtttttttgaattgtataaagtctacgagagtttcccgtgtcaggtgatctgatctaatgttaaagacggatctaatgttgaagacagtcacaaacaaaaagtctgctcttttgataaagaaatacataattaataaagttaaataataacgagttctctctt

SEQ ID NO: 6915 - protein, 559 aa, DROSOPHILA
MWKASAGHQIQATSAASAEDDDWETDPDFVNDVSEQEQRWGSKTIDGSGRTAGTIDMDKLREETEQADLDKKKQLLKDQNAGYGYGGKFGVEKDRMDKSAVGHDYQGKVGKHASQKDYSDGFGGKFGVQEDRKDKSAVGWDHVEKVEKHASQKDYATGFGGKFGVQSDRVDKSAVGWDHIEKVEKHESQKDYSKGFGGKFGVQEDRKDKSAVGWDHKEAPQKHASQVDHKVKPVIEGAKPSNLRAKFENLAKNSEEESRKRAEEQKRLREAKDKRDREEAAKKTVAENTPRTSTEAPPPKGSRAAIQTGRTGGIGNAISAFNQMQSPVSETPPARKEPIIIPKAQPVKIELEAKEEPTASTTSAAVAPTPTVVPAREPETAPVAKAAAPPPDVVPQIEVETVDTPPRSEPQSPVYVPTPQPEVHAQVQVQPEPQPQADPEPVVEEEPLYQNQAEIKAASPLPPTNGTVSEAVAPSGTATVPEEAIYANSDNLADYLEDTGIHAIALYDYQAADDDEISFDPDDVITHIEKIDDGWWRGLCKNRYGLFPANYVQVVGQNS

SEQ ID NO: 6916 - DNA, 6815 bp, DROSOPHILA
aaggtctaggaattttgtatcgctaaaaatggtaatattcaactcaagtcgaaaatcatacatattaaaaatcttttaagagtaaatcattaaggtttcaagtgttggatgcgcaccgacaatgatgttttcttcgtccaagccagaactcagtttgacaactagagcaacgcgaaactgcatggtctggcacccagaggacactggaggcttttttctcttgaatcgaggaaggggcatacgaggcgggaccactacgttcttcgacggcctcccaggaacatgttgaagcattttcaacgatatccgatccattttcctagagaagagttaaataattagacgactgacagttaatgcacattgtaacttatgattagatggcagagtattgcccctgattgaaacaccaccaccacttcgcgctctggtgatttaaggatgaaacaaattcatattttacagaatatgcactgtgagaatccaaagaccaaggcccatgttttaaacaaattgggcagtcactttgcaccgagggtctataactaacattaaccacgcttttcaagaatatatgcacgcattttgtatcttaaacgatcattatttacatgttccatatttgtcgaaacgatgctgttgcagctggggcaacctttttccaacagagccagtcgcataccgtgtatttctcgcagtagcatttcctcacgtagctgaaatagtgtatgtgattaaaatgactataatgaaaactgcttttgcaccggagctcaccttgtgttcttgtacgatttggtggagtcttatgttttgttcgctgagtccgtgagccaggccatctggacaggatatagtgaactgagccctctcctgaaatggtgttgggggcaacgaaatgatccccgacgacggaaattggtgtgcgctgaaagtagagttttttttttttttgattcagtccaatgggagatgccaccagtgagaaagtacacacaactcacctgccattttcagccgtgaacttcatatcgcgactgtagctcgagccgaaggtatttcgccgtattcgtccgcccgtcgagggagcatcgaatggcgactggcccacgaaccgctgaaggtcgggtgatataaagagactttcctcgccgttgtagccatcggatgccagcagggatccgttggcattggcattcgcatttgcatctttggctaacttttccggcttgcaacggtccggatttcccgtcgtctcccttggcacttgtaggtccaggtgatggggaaaagcgtctacccgctgcgggcatataacggcattcggtcttatgtgtaccttgggcaaattattgtagctctgactgattttactggcttggacagtgctagtcgactccagctttctatcaccactgaccagttccattgtgggggatgttatgtgatctctactgctattgtcgctgtttggtttttgtacgggctccgcaggaataagggtatcagtgctggtttcaattgcgccatgccacagggcgcgagaaatatcacttgtgtcttcagattttaaaggaactggactttgatctgaaatcattaagatagttaatgtaacgtattcattctattcttcattctaacatctcttaccgttttcggatgaaccaaatatgaaaaaaggtcgcccagattcagagttcagtttctgtgaggtcgccaaggattcttcagattccgaaggaactgcatttttatctaaaaccattaaggtagttaagtttagttaagttcttttgctttatcctaacatcttttaccgttttcggatgagccaaaaatgaagacagacccagggatcagctgtgaggactccaaggaacttcgcctttgcgtttgtgattccacttccaatatatcacgtttagaagctgtactttggtcgttatggaaatctggaatgggattatttgaacggccacatggacctacttcagttgcatccgtcacgtccagctctacttctttggagtctttaacactttcttggacattttcgctaacactgttgttggcctcggatcgtatgtcaaacatcgagttgctattggcattgaaacaatctgtaacactgaatcgtagggaaaagaacgaaattcattttgctgccggatcaaataatcttcagttgacctacatggattcaacggtcaggttgggatcactggacctcctggaaatggtgctctgtcccaactcattcgttgttaagtcttcagaagatcgtgtcttcgccatgaggcctattggttgtggcagtaaggagtaaaaagtgagtcaatttcaattaggagtactctactcaactcaccattgtgtccgctctgtctttcattacttagtaatggtagatcagttccatttttgttgcctaaactaccaaggtatacatcagaccaaaaatataaaaaccgcacactgtgcgctggccaaagaacctaaaaaaaaaaacacaaaaatcattagcattctcctttaggctgacagcatatatcaagttattaaccaccttttcagtctcatgcttatagagaggatttctatacatagtttccgctaaaaatggccacacggaaaacgttcggtcgaaaactgaattctcgatgcgttctctgagcgaattacataggaacgtgccgaagagacaggacaacgaatgttgcgccagtttgatctaaaaagaatgcatataacaaggagttaatgtgcacaactccgtgcgaaattccatgccaccacttaccaaatagcttatactaaactcaaaactgcatggatactgcctgtgtatttgatgcacaagatcaagccactgcagaaaaactggacatcgctcgttaacttcatcggaattgggaccatttccagagcgatcggcgaatttgtgtccaaagttcagccattcacgctcgacaagaacgcggaacccctgcaaatacaagcaagtaggtagagtattagtccatagaacacaaatgttgatgtatatcaacgtacctcaaccgttctgtagtagggatccaaacataattgcgccgtggccacgatctgtggagtgcgatcccaaccgtctgagcaatgtacaaggacgggtcgtccattcttctcgatggtgtgcacaacggtcatggtggctcccagcagacccgacaggtgctgcatccacatggtcttttccagttgtccgtaccagctgcaagaatatgattccattacataaatatatatatatctttaataatcagctagtaaacttactttggatcatcgggggatgacgcgcatagctgtcggacagcgtggaaactctttcgaatggcgtggatgttgcccaagttcataaactcaatctctgcacagggatagtactcgatgcactcacagccgccacctctggcacgatttgtaactgcggaggtgtagctgcgagcatccacaatgaggattttctgaaagcaaatacaatttaagagcaatgatcaaattatttcattagcacttggcggttttgacatcattttactgctccgtgttaagtaatttatgataattattcatgaatgttttcttatatggtaactgaaaccttcatttcaagaatacccggctattttggtaataaacttaccttgatttcatccagcgtgagttcctcatgcgaggaatcgtccagagatggtgaactcttgccggataagcccgactggccgttggtctccttggagccctttgttggttgcgcctttgcattggcgcaggtggaatgcctggcgtgctcgcccctgtcaaaggcacaggcatcggcgagtgccttgagtagctgctcgtcccttgtgttgcgccagccgagccaaccgacctccggctggctgcatcgggccaagatggcacccgacttttggtgccgccagacgacagccggcagccttcgtgatccccggaagttggccacgttgtggagcatctcatcggtgatacagcagggcacaagcaatttgggtggatacgagggacagagcttaaaatcggcattggccgtggagatgcgccacgagcccttcagatcgaatcccaagcgggcaacctcgttcttaaagtcgctttcatagcgcactgatcgttgcaggcgattgctcatggcggctgagatggtctcgctggcaggatcgggcagaggattcgacgctgtgacgttggctgttggctttgccaagccattgtgtagcgttaggcaacgatccttggcaatcaggccgtttccgttggcctgggcgctaacgataccgcttccattgccacttccgagcacatcgcaggtccaggagtagaagggaaaggcgaagagtgtctccagtgactcgggaaccccgatcatcagatggatccggcgctgccagtcggagcactgttccgccgacggaaaggagcagcgcacagtgctggcatccttacaattgacaatcagctggaacagatctcgcacctgtacggattcgattaatcccaatggaacgtaggtctcgtagccggttgactgcttggaaaggaatatccgataattggacagggcgaggataccatcatccgtgcgccccaggtacttaatcgattcgccggccactagtggtatatatactatagattagcatgtgttatcggttacagcatatgggggaacacctacactcttgaaacgggacgaacagctgggagtcttccttctccatttgtgactttggatacgattcggcggcacggataaagcaaatcgatggaggcggtgatccatcggacattgtgtgaatcggctaaaagaatacttaacatgtaacgtattcgaaattacttatttgcttatatttaggcaaggcgatttgggtgtcattggaaatccggttatcgcttataagtgcatatatctcttatatccaccatccgaatacataattacgcacaacagtgtgtgtgcgatgttattgggacgattcgatacgtatagtatagtggctcccataaataaataaataatactatgcacatatgtgcatgtgcattaagcagtgcacaaacaaagccaaataaatgtcactgggatgataaattgggcacaatcaacacttttagaacaaatcgaagttaatatttgagtttttgagtgtcgtggtggcaatatagataatgcactgcatatatatgcacgtatggatgtacaatgtacaatgaacatacatttatgtgagcacacacagttgcagttccacaaggtgcgcaatatatagtatgcacatatttgtgtgtcgctgcattacatacgcacgcacatatataccaatagactagattatcacgatttcatagccaataggcgaaaaatggccgattatcgtactcaacgtattctaatggccgtgtatgttgtcataaacaaagtaattaaacatttacgcatgtgtatgtttgcataaactcatatgtatatttgtctatgtaggtatgtttgtgtttcgatatttcggggagcaacaataacacattacaatcgtacatatgtatgcacacacatttggtttttggattccacaaaccgttcgctcagcagacttttcggggtatttagctcaaaacgtattgccgaattgaaaacgcgcttggcttctagattttctcgctctatttaccaccataaaatccataagcgtcagctattataaacaaagatttgcaaatgttgttgcacatacatatgtatgcatatgtattcatttagacactttttgtttcatttccattgaaattgctatcgttgtttgctgctatcgctgttatcgctgctgttagcgatggccaagtcatgtgactaagctatcgttactcgattgccgatgagatgtgcattcgagactaaccaacactggccagccgataaaatcaaccaaaaatttgtaaaacttaataattgtgcgtacgtttgcattccattccagctgatgtgtaactgaaatcagaaaaaaagagaaccgatcgcttggactctccgccggtgcacgcaattctacgcccactcctcgccagccgcattcgccattcggaagccgaacaagaatgtttggagccagaatcggaatcggaaagcttgggccgtgtgtggccctagttgcggtgagtcgacgtgttccgttctgtctggtcatgttgctggtcactggagtggctcacccgctcgatcagcgggcggggaaacagtggggaggggccggccagacagccccggcttttttttggctccccctaaccaaataactaactaaccagaactgacatcctatggaatttacagattctacagctactccagtacacacagccggccgatgccgccggagccgtgcccatgaccagtgataatatcgatatgaccctaggtgagatatgcccataccataaccatcacagtcatccccatgccattcccgctgccagcgtgagcgggaatcaattagccgacttgtcccattgacgtgtcactaaacaaaatcactggctcgctcaattcggcactgccaacgtggtaaaataagttttatgcgctttcgtaaaggacaaggtgtggaatttggataaaacttaattagggcggtttatatttcatgctgcatcggtccgatagtccgccaaaatgggcactagccattggtcggcagttctttgctcagaatgtccgaagtttggtctttgcatgaataggtcctttttat

SEQ ID NO: 6917 - DNA, 2678 bp, DROSOPHILA
atatgcatacatatgtatgtgcaacaacatttgcaaatctttgtttataatagctgacgcttatggattttatggtgccgattcacacaatgtccgatggatcaccgcctccatcgatttgctttatccgtgccgccgaatcgtatccaaagtcacaaatggagaaggaagactcccagctgttcgtcccgtttcaagagttggccggcgaatcgattaagtacctggggcgcacggatgatggtatcctcgccctgtccaattatcggatattcctttccaagcagtcaaccggctacgagacctacgttccattgggattaatcgaatccgtacaggtgcgagatctgttccagctgattgtcaattgtaaggatgccagcactgtgcgctgctcctttccgtcggcggaacagtgctccgactggcagcgccggatccatctgatgatcggggttcccgagtcactggagacactcttcgcctttcccttctactcctggacctgcgatgtgctcggaagtggcaatggaagcggtatcgttagcgcccaggccaacggaaacggcctgattgccaaggatcgttgcctaacgctacacaatggcttggcaaagccaacagccaacgtcacagcgtcgaatcctctgcccgatcctgccagcgagaccatctcagccgccatgagcaatcgcctgcaacgatcagtgcgctatgaaagcgactttaagaacgaggttgcccgcttgggattcgatctgaagggctcgtggcgcatctccacggccaatgccgattttaagctctgtccctcgtatccacccaaattgcttgtgccctgctgtatcaccgatgagatgctccacaacgtggccaacttccggggatcacgaaggctgccggctgtcgtctggcggcaccaaaagtcgggtgccatcttggcccgatgcagccagccggaggtcggttggctcggctggcgcaacacaagggacgagcagctactcaaggcactcgccgatgcctgtgcctttgacaggggcgagcacgccaggcattccacctgcgccaatgcaaaggcgcaaccaacaaagggctccaaggagaccaacggccagtcgggcttatccggcaagagttcaccatctctggacgattcctcgcatgaggaactcacgctggatgaaatcaagaaaatcctcattgtggatgctcgcagctacacctccgcagttacaaatcgtgccagaggtggcggctgtgagtgcatcgagtactatccctgtgcagagattgagtttatgaacttgggcaacatccacgccattcgaaagagtttccacgctgtccgacagctatgcgcgtcatcccccgatgatccaaactggtacggacaactggaaaagaccatgtggatgcagcacctgtcgggtctgctgggagccaccatgaccgttgtgcacaccatcgagaagaatggacgacccgtccttgtacattgctcagacggttgggatcgcactccacagatcgtggccacggcgcaattatgtttggatccctactacagaacggttgaggggttccgcgttcttgtcgagcgtgaatggctgaactttggacacaaattcgccgatcgctctggaaatggtcccaattccgatgaagttaacgagcgatgtccagtttttctgcagtggcttgatcttgtgcatcaaatacacaggcagtatccatgcagttttgagtttagtataagctatttgatcaaactggcgcaacattcgttgtcctgtctcttcggcacgttcctatgcctcatggcgaagacacgatcttctgaagacttaacaacgaatgagttgggacagagcaccatttccaggaggtccagtgatcccaacctgaccgttgaatccatcaactcgatgtttgacatacgatccgaggccaacaacagtgttagcgaaaatgtccaagaaagtgttaaagactccaaagaagtagagctggacgtgacggatgcaactgaaaaactgaactctgaatctgggcgaccttttttcatatttggttcatccgaaaacgatcaaagtccagttcctttaaaatctgaagacacaagtgatatttctcgcgccctgtggcatggcgcaattgaaaccagcactgatacccttattcctgcggagcccgtacaaaaaccaaacagcgacaatagcagtagagatcacataacatcccccacaatggaactggtcagtggtgatagaaagctggagtcgactagcactgtccaagccagtaaaatcagtcagagctacaataatttgcccaaggtacacataagaccgaatgccgttatatgcccgcagcgggtagacgcttttccccatcacctggacctacaagtgccaagggagacgacgggaaatccggaccgttgcaagccggaaaagttagccaaagatgcaaatgcgaatgccaatgccaacggatccctgctggcatccgatggctacaacggcgaggaaagtctctttatatcacccgaccttcagcggttcgtgggccagtcgccattcgatgctccctcgacgggcggacgaatacggcgaaataccttcggctcgagctacagtcgcgatatgaagttcacggctgaaaatggcaggtga

SEQ ID NO: 6918 - protein, 862 aa, DROSOPHILA
MSDGSPPPSICFIRAAESYPKSQMEKEDSQLFVPFQELAGESIKYLGRTDDGILALSNYRIFLSKQSTGYETYVPLGLIESVQVRDLFQLIVNCKDASTVRCSFPSAEQCSDWQRRIHLMIGVPESLETLFAFPFYSWTCDVLGSGNGSGIVSAQANGNGLIAKDRCLTLHNGLAKPTANVTASNPLPDPASETISAAMSNRLQRSVRYESDFKNEVARLGFDLKGSWRISTANADFKLCPSYPPKLLVPCCITDEMLHNVANFRGSRRLPAVVWRHQKSGAILARCSQPEVGWLGWRNTRDEQLLKALADACAFDRGEHARHSTCANAKAQPTKGSKETNGQSGLSGKSSPSLDDSSHEELTLDEIKKILIVDARSYTSAVTNRARGGGCECIEYYPCAEIEFMNLGNIHAIRKSFHAVRQLCASSPDDPNWYGQLEKTMWMQHLSGLLGATMTVVHTIEKNGRPVLVHCSDGWDRTPQIVATAQLCLDPYYRTVEGFRVLVEREWLNFGHKFADRSGNGPNSDEVNERCPVFLQWLDLVHQIHRQYPCSFEFSISYLIKLAQHSLSCLFGTFLCLMAKTRSSEDLTTNELGQSTISRRSSDPNLTVESINSMFDIRSEANNSVSENVQESVKDSKEVELDVTDATEKLNSESGRPFFIFGSSENDQSPVPLKSEDTSDISRALWHGAIETSTDTLIPAEPVQKPNSDNSSRDHITSPTMELVSGDRKLESTSTVQASKISQSYNNLPKVHIRPNAVICPQRVDAFPHHLDLQVPRETTGNPDRCKPEKLAKDANANANANGSLLASDGYNGEESLFISPDLQRFVGQSPFDAPSTGGRIRRNTFGSSYSRDMKFTAENGR

SEQ ID NO: 6919 - DNA, 21367 bp, DROSOPHILA
gggcgtggcgagggagtttctgctctcagcagggggcgtgctgggtgcgcaggtagtatgtgtgtgtacgagtgcggctgcgagggtgtgtgtgtgtgtgtttgacaggtgagcaggttggcccgatagactggtttgtcgctgccaaaggcggccactaggtggcgccacaagtaccaactccaaggaggctttaagactccctagaaaggattttcaaattaaaggttccattagaaaatgatagcagacctgtcatatataccacgctatgttgtttgtgtgcgtagcgttttttccttacaagcaagcccaccgattgtaaaacgtaaacaaatcattaagttaattcgtctgttgtccgcaactgttgattacccgtggaaatgcgtgtgccacagtttcgattgatccgaaaataagacccgaaaggagcagcggctaaataagaagacaaattataggttcaacaatcaatttaataattgagacctttgcatttaatcaacattatttaaaacgtcaaaatatttgcactttccacgggcagttccccctggaatttgcatatacacgccgtaagttccccaaatccgtggggacgcggggcgacaggccacgcctcaatctcgatgcgggccctagacctagacaaagttgacgagttgagcggcacaaaaacggggtcccagagcccagccccacccccgtgcacccggaacggggaaatttatagtattggtgcggtttctgcaccaccatacagagacaccaccgagaaaaccggttgcaaaccacccgattggcgacgctcggcgagagtcactgccagcggcttgggcctcagcagccgtcccgctccgacgcacggcgatggatgacatctgcgccgctcgcacaccactgctacagagcggcaaagcggcacggccgcaaagcgacagcgcagcgagtcgaagtctcgcgcaaccgcgccgcgaaaacctcacctagtcgtatacgcactttgttcgtgtgcagtcgtcgccgctgttctcgccgttgaattgccgtcgtcgatccgtcgtagcgttttgcgccttgcgtttctgcgtcgagctaagtgatccgtcgcggactataaagtgatttgtagtgatctgatctgatctgatttgatatgaattgatttgattgattcgcaaaacggagttgaaaatcgtgaaaatctacaaagaatatgcacagccagaaatcgaagtgatacaagaaagcaatttcgagtgagttgagttgctaacaagttgagtgtcagtgctgagaaaagtgcctcctcgccatctgaaaggatttacgcgctcaacagttccgccaaatcaagtcgccgaactgaactgaagccaagacattgtgtcctacaaaaaccttagatacgcaagccacacactcctactgtgcaagtatagctgatcattgccatcggatctctgagaacttccttcccgcgcgcatccccctgaacagccgtcaaaattcttgataaagtggcctcaataggcgccaacacgctcaatttcacggacctagggagcccctacgaggggcctcccagcaccccccagtcgggcatggacgcccccgacgccccgcacacgcccaagtacatggacggcgggaacacggcggccagcgtcacgcccggcattaacatcccgggaaagtccgccttcgtggagctgcagcagcacgccgccgccgggtgagtgtccccaagatcagtggagtggagtcaccgggaggattgcagaaagtgtttcggcgaaaagactcgatcccctccagacttcagccctgccaaaaccaaacctatcggaactcaatctcaatctgtgcggagcagttgacacacccgagaaaaaaggagtttgtggccagggcgttcccaaaactcgaatatgaatctttttaatgaatctaaagagcgctatacgtaccataaaaccatttggtctttaaaatcatttcattcatttcaagggaaaaagttagttggcataggactacaagctgcataattgcataaatagataatatagtacattgacattacaataaacaaattcaatttttaataataaataacagttggtaaaagcaagcagttaaataaagtcaggttaactcaagagtatattgtctaagtagttcatataactttttagggtcttaattactgattacattacaatagccaatagtcttatttcgatcgatacataaattttactattaaaaaacttgtataattattagttgtcttaaaaaatgaaagcaaccaattgtagatttatgaattcgtcaatgtaatccaaagttaaaaattattttgacttccataaaaatgtacttctaaagtaacaaatgtagtataaattcgaaatcacaattttaaatttcaatttgccaattcgccatttagccttctctaggccctcagccaaatcgactaagactgaatcgatgaaagttgccgtcagctttccatctttatgatactattttcgggatcgatttcgcgttggggtctcgctatactattagttttgattaagaaaatcacttcagctgcactttccggcttacagttcatgctggtgcctggctggccggcagcggaagccaaaaataaattcaattaagtgtagtttactcccggtccgtgttctaaataagcgtctgatccggagggttctgttcctatccaacaacacgttcctcatggggtagcaataagtcgggctcggtggtctgtttactgttaccgctcactcggcgaactgtttgcagccgcaaattgttttcccaacgcacgattcgatttttcattatacatattttattgcattcttggttttgagccttgcggtttccactgctctgtcatttgtgcgtgttgggctcttgggctgggacgggacttggaatgcttggctgcgccgaccagccctcgggagttgttcctggccacgacttttctccgtccccggagtggctgccatgttgttcgctgttcgctgtccgctgtccgttgtccgttctccgttgtccgttggccgctgtccgttgcggtttctgctgctttcggcccgcttccgtttccgtgtttgaggggccaggagagcattgaatatttcatgcagttcgctcggaacataatgcatgggaacttgctcaactgtttcgcccgcaaagtgttaacaaaatatttaccgcgagcgagcgggactgcaaacggaactgcggaccaaaccgaaactaaaacacagcgactctgacactcgtattgatttttctttgatatattaagccgcatccagttcgggctttggataggttttggttttgtttttggtttcggttctggtttttgtaaatgaagtcatggcaaaaatttccttcctctccgccagcctaattttttgttgtgagagaaaaagttttggtttcgacgcttcttgcattaaacatgaaacattttgggcccacttttagatattttcccgaccgaacgctcgtcctatgctcggcgacgtttgaatttaatagtgaatagtgaaaagtgtagacaaaacacgcaagtaggaaaagttttgtccccggcacgattcattcacattcacagccggtgtacgccacttccattacttccactacttcttccacaactgccacagctatattacagccccgtattgattattttccgtgcatttgcggcattccaggtacggcggcatccggagcacctatcagcatttcggaccgcagggcggccaggattccggcttccccagtccgcgcagcgccctcggctacccgttcccgccaatgcaccagaactcctactccggctaccatctgggcagctacgccccgccctgcgccagtccaccgaaggatggtaagtactgctcctccttatccgatcagtctcaggcccaatcccagtcccaatcccatacctactctcccagagatccgggtcttttgttgagaaagagatcttgaaaagatctcgctcgttgcttccctgtctattttttggcgacacttcaactcgagagctcaacgccgtcgagagccattgtggtcgccttctgcgggctttgtttgctcgttcacttcaagttcgactcgtctcaattaggctgccttcactgtcctcttgctactgcgctgcttttcacttttatcaaatttcaatttcaatcggctatagatcgaagataaagatatcagacttcattgtgtttatacgcctcattataatacttcttttctcgtagatcttccactaagttgttctttaaaggtctttttatttcacactaataagttagaaggctatgtagattgaacgcttcattggaaacttgcttaatttataaagacatctaagttgacacaagctctttaatacgaataatttaatgtacacgtactaaaatcgaaaatgccaggttaagttttaggtaaaatataatgcacgcaagtctttttttttgacatttatgttacttttccttcccatgaaacgtattctattgaaattgtgggacctctggaagctctttgttgctcatccacgtacgtgcaattttcccattttatttatttttacatctctctactttttgtgtgttctttatgttttttggaacatttttcccagtctctggcataattgcgcgcttgactgtgacaactcgttgttgctgcgatgcggctgtctctcgtatttgttgaacaatttgttgctatttcgatgcgttttggttgagcagttttgcttttcggtgagtgaaaagcaattcatttttatccattgtcggggatgtgagcaccgtcaaaagcagtaaaaacagtggaaacattactaacgacaacgacagcgccaacgcttcagccagcctccatttgttgtctttgactttcgtcactcatacgcaacgtgggccaattaaccttggtgcacttgctcttgaaaccgctcacttgctcaccgtttggacctggctaagagatctgcaaaacagttgatcgttagaaggaatccccatgtgtttgtaatcataattgctgcaattaggctttcgttagccttaattaattactccattctgttatgggcgaatgtgtggcagtctccgagtgagttggcccaatggcggctgtccactcgcacatactaacgctctgtgaagactacgagtaatgggccctgggcggctgaggtggccgaggtgacagtgagtgccgccatctctgctgctccgccgcactgagtcttgccatttgccattaagagtgtgcagcacgtgcgcctgctcgggcgccaaaaatatacggccgacaccaacattcggatggcagacacagatatagatacggacagagatagagatatagataccgataccgatacagatacagatagtgtggccatatttggcacttaataatagttcgtttggtggctccgtgtgttgttttcgaacaattagcaacgtcaacagttgcagtcgtcgctcattgaacttgagtgtcgaccgatcatcatcatcatagttttatgagctgtgtggacaactccgtcgtggagtgctttgaactttcgcttaagcaattaacgctaattcgttgacatttacaagttacttaacgaatcgatattcgagtggagcgggcggggccggacgatttctaagcgatgcggctgcaattaatgcaggtccataaatgtaacagtttcatgcattccagctgccgcgggaattcgctcataaatatgcatttggtgcacgggcacaaaaagggccattctggccataattccatagcctgattataaattcatcattggccagttccagcctgccatttacagactttactcaactgctcctttcatcgtattgttttctctctcccctctccctccgcagacttctccatctccgataagtgcgaggactccggcctccgcgtcaacggcaagggcaagaagatgcgcaagccccgcaccatctacagctcgctgcaactgcagcagctcaaccgccgcttccagcgtacccaatacctggccctgccggagcgagcggagctggcggcgagtctgggcctcacgcaaacgcaggtgagttccatcgctgtggttgggaatctggcggtcagagaacggggttacttatcttagtattacatctcttttcggtctaactactaatgagtgtataaatattccagactattgaatatacgttttgcaatcacaaaagcgtaaatattatgctgatattataaataccgtttgtgctaagcactctactgccataactcaacattacaggtttggcaaaggccactccacattgaacaggggaagtttttccctccgaaccaccaacgctcttaagccctggcaaggatcctttgaccatttcattggctgcgcccgtggttagttgacgttttcccaattgaattgttgacatgtctctaatgctgactgacaaacgagctaagacaacgaacaagtaacaatggcaacctcctacgcctgtgaccctctcccttgacaacacgccactcgggcgtatgtgcaatattgtaatgttctttttgttgctcctccacgtgtgtcaatgtcaactttgtgaaaagtttttcagttgccgttcggttttgtttttgcacgcgctactgcccacggcagggaggttccccgggggcggaggcccggcattgtcacaggcaacacccacccaagtcaagtactcatagtcgtactcgatgcccagttcgtctagttgccactgctccatttaatggctttccagatgagccgcaaccagcagcgtttgcaaaacggtgccgtgaatgagtctcgtgttttgagaaatttattgatagtgggcgtgggcttcctaattgaattagtgtgccacgaaagttcatgtgctcaagacggaggggcagaagccgaaactgcggggcgagagccgcaataatgttgtaagaaaaaacttgtaaaacaagttgaagaccctctgtatttgtgtgactggcattgtattggtggcgtgggtgttgctccgccgcaagttgtttatcaagatacatatttgaatatgtactgcacaccggtgctcggagagcgggtatcggggatcgggtctagaacgggcgtgccacacggcggctgtgcaataaattctcctgggccagggcctgggcctgcgactgggttttggtttgggtatggagcccaacaaaagccagacccattgttagtcaccccgcagaatcgggagagaccctgatttcccaaagtcgcgactgtggcagctgtcaatcgaggcagctaagcaaatagccacgcccctgcgcccccagcgacacaatcaactcgatctatctcagtgctccgtggccgcgggccttgaaggggttaaacgctaaacagttggccaaaagcctgaatttatgactgcattttggggtgcaagtcttggccgctttcgctttccgcgcggacggcgaaactctggccgcgtgttaattaaaaccgccctcgtcgtttgagcaacggaagttttttattgatttggccaggttcaggagctgctcctcctggtcatgatggtctgggatggtcagaggctagtcgccagtacacgccaatgtttgggccgtgcaaacaaaccgttgtgttggccctaagatttatgcgttgcacaaacaccaggccagcttaatggccttcagccttctggggcggtggggtggctttctactattgagtttttgttttttggggcgtgttatacaattcggttgttgtgccttacagtccgagctctcagctgacagcaacttgtccgttctaacacctgccggccagcagcagccactctccctgtgcaaaaagtcgagaacattagcgcaaaaaaaaaaatgtggcatactacttgctgttttatggcctttttttaattatggtaattttattatgattttttagctgctgctgcttcggcagcaaaaactcgtttgccagttgcatctttcacttggccacttgctgttcgcttgatttgaaagtgcatccggtgactgttaatgagctcagagcacagaaacacttggatggagtgtgtacaaacattcggagaataattaagtttcaattagagcaaaatcccggctactgtttctccctatctggctcgtttttgcaccccgactaattgaataattacatagaacgctcaagtggactgccaaatgttctcggtgcccgaaaagcagagtccagctgacagcgccagacaaaagtgtatgtacagtccgtgcgagcccctttcaacaggcttcgcggctccgatcttcgttcccgaaaaacggagacgagcagaaacaaaagccccgccaagcaaaatgaaataaaataataaaaaatacttttaaactgcgtgtttatgagctcatatcggcacattttgatctggttcctccgccgaggctctaaggcgcaacaaaaacaactgaatcagccacaacaacttcaacctcaacgagacggccacaaaagccacgaaattttgtaggaggccacgctggctgaaaacaaaggatttggcagacgaactgccaaaacggcgcttgtgggagcaagagacccaggaaagaggggtataagtcgtggaaaaaatattggtggtgctgcaagttgcataactaaactacatatatatgcatcttggggtatgcaagctaagcacttgatattatattagctagtattttcacttaaacatacaaagcatggacgacagattgaagtagatttatcacagtatatcacagtattttgaattatagttccgtcacattataaactaccattatcgacaaattgaaatgaaataagaaaagttgtacactttgccgcatgtttgagtttcttactggtttgcactaacatttcgccgtgggtctatggttctgcccgggcctgtcttcaaaaatcaacaacgcccgcttatgagtgtgtgtggtgtgtgttgtagctcagcaaatcttcgctgcacgcagatcagacttggtctgatgacgacgcagacgcagacgcatcgcccacggtgcacaccttcgccggctggggcttctcggcaagctgggggctccaagccgcgataagtctgctgctccacccctaatgtgagacgtggccaatgctctggtatggcgcaaaggtcatggactccgcggagaaacccaaaatgatacttcgctggaatttcaggccaaacaaaatacttgtaacgaaattaaattaatttccacatcaaataatacacacagcagacggcagcggcaaaaaatgcgcgcgtttttattgtattaggaaaaaaactagcacaacttgatttaaataatacaagtgtctagttagtatcaacggctaagcgagaaaaaaatgaaaaactggctgaccgcatttaaatgctcagctcacgttcgtttatgctgcggacagagccgcagcagcagcaacagcggcagcagcagcagcagcggcaacacatcgtatatcagatcagtgattgcctgatttacgcgggcaatgtcaattaaattatggcacataatacgctgtaactaagcagccgcacttgcgtcttaatcgcacgcatattgctgcaacatcggcgacggacccagcagcaacaccagcgactcttcgctcgcctgcctccctgtgtcgtaatttgcaccgctgctcgcgcaacaggaactttgaattaagtttgatcaatgctgatgctggtgctggtgctactacagcacaacaacactagtggcagcagcaacagcagcagccgcatcagcagcagcgacattcgacaacaaacaagttgccattaacaatgatgcatagtgagcggccaagcgagcgtttctcaatttctccccagcggttctccagcagatttccccctccgcgaagcccctttcttcatcttcctccgccgaccgcatttgcattttgaagagagctcaatctaacgccagtcaagagccaagcggacacatgtgaatacccggactcgtggatgtatcgcagatggctccgatgagtggctacgtgctgcttgtgcaatctcgattgcagctgacataattcgcgttggcaggtagcgatccgaaacacaaattaacccacaaagcgtgccaaaaagatgctccagctgaaagaccagtgtcaaagatacaagtactaaagatctgaaagctttgaaaatttcttgacttgggttggcttgagtgacctatggatgagaacccaaagtggaccagtttcaaaagagacaactttctgaatgtaacacaattttatataagtagctgatcgtccaatcccttgctaacatatattgcatcctcgtgccgcagatgagaaaatgaaagccagaagcctgggggatggggtaacctctaatggttccccagccaacatttactgcttcctctcgccatcagaatgagttcatcaacaacaactacactcgcctttccacccagcttgaggtccctgtgctgaaagcaagtttcgcgtttcattcacaatattggcagctttcaaaatgctcaaactggctctagctccggctccatttgcagccccatccgtcagcgtttcgatcaaaatcgtacgcaacgctcaggaaattacaaaatgctccaacgagcgtccaatggaggtgggcaggggaaggcagttatgggcctgctcaagtgagagtattcaaataaataaatttttacgactatcgcgcatagctggagtgcctggcatagatacccatgtcgtgggtatcttggccatcggtctattggccaacaaaacgagcgaggcaggcagggttaattacggcttcatttgctgacacacggcagaaaggtaaacaggccctggccagatgcggagccaaggatgcccctggttggcagatttctccgatgcgataataataataattattattttattgccgagactcggaggctgcggcacaactggtttggaaggaagtgatgggcccgagcctgccgagatagcccgctccagtgggtggctcttctgcagacaggctggtttcatattttaattggttctcaaatttgcagatatcgaaccggcgaacccgcaacccttctgcacttgtttggccttgtaaacgcgatgccaattagccgcactcgaatatcctgactatcgcatcccccagcagccttgttctctgacaccaattaaagcgggactctccggcatgcactgatagaggcggactcgtgggtgtgtgggggaaggggggatgtggatggcgggagatcggaaatcaactggcttaaattttccttggaggtttttccccaacgacaacaatggcgagacaacaaacttttaacgcttggttaactcgcgggtcttttttcgactcttttgttgctggcagcactatcatgatcgggctgtgaaaatgcatagggaaactgtgtgtaagcgacaaataatagtcagttgaccatgatttcattttccgactccgaactcaaaaaacagagggacacaccgaagagcaatatttaaattaccagccccgagcgaacaaaaagcagcccagtgaaagaatgcgcttatataaattgcacaattagccgccacacttttttgttagcgtttttcccccagttttgtttgtcattatctggccgatggatctgaccacaaaatgatttctgcccgccgaggggtcacccgccatcccgtctccccatttaatttcactccggaatctggttagccgtgcggaaaatgccttccttcgagtgcactttgatggggcggccatggctgcttggacactgcttataattgggccatctaattgagcttgatggccgggcagatgaagtgcaccccgcccaccgaggagttttctttcccatgatcgagcgggacttccccacttttagttattctacagttgggtctattgttaggtcccagttcgaagtgtagctttattgagagtgttttttgattcgacattcagaagaatcgcattaatattaaacaagtttcggggtttcccccacatgcagctgtacggaaatctactagacttggccaacaagctagtcagcccccgtactccatgccatctccaagaattaatgactttactaagcattgtgccaaattatctgcactgacacttgctacacgtaaaaagccgaaaactaatttagacatgactaacattttgcagtgactgtagaagtgactgcgacttgcagaaagtcgactgactaagtgagtccgttcaaaacaaatctatactgtatacaaactatgtgaacacgcccctctttccgccccttgggcaaccacttctacttgaaactgcacttgttgttgttgctccatccgtcgccgtcgtcatgatcgcagttattgtttttgtatctgcttaaaatctcaccttgacaattgctgatcaaatgctgccgccgatttattgttgaacaatttgtgtacgtcagctgctgccgccgctgctgctactgctgatttttttcatcataatttcgcgctgctgccgcgctgatggattacaaaagctgaactgagtcagtgtttcagcggcgaattagaattacaaaatttcaaggctttgcaggtgaatcaaaaaagcaaagttctcagtcgcattgcatgccagtcagtcagaacagctttgaacgttgctttggggcgtttttcagtgctcagtgctcagtgttcagttttcagtttttttgcgatcagcagttgctgttttttgctttcaatggctcgcactcgcaacgaacatgggaacagtttccggatttgacaacagcactttgttgcacaatgcgaggcgatcgcgtcaagaagtctgaatccacaaccgattgacaatcgctttgggccggatgagcgtcatcagccacagagtgcatagtacaatccgttcggctgatgccctgattggtccctgctcgttaatcgattctccgaactgaagtggtctcgaaatggcaacccaggcatttctctgcggccagctaagcactaattgagttagtaaaatgctcgatttgtccttggccgcggctaatttggcggttggcatgcggctgcacttgtcgctcgactaagccagaatcccagctccgttaccaaagaggctctgctccagactcggtcggcctaacaacataattaatatgaatttgagcgagttcgggtcgaaagctggtgaaatgctgcgaccggcgattgagcaatcatggctatatagaaattagatcaatatcttcatttctacacagcgagtctataaaaattgttccactcgtcactgccgcatttctcattagcagcagccgccacgatcgcatcgccgatggcttcgattcagtccactccaagtatccaagtcgtcaagtatccgagtatccaagcgtccaagtatccaagtatccgagttgccaagagttaattgctattagagtggctatagaacggagggaacatcttatataaacagctctctcgtctggccttgcttaattgcatatttattgtttattaagcaggggcttgccaccgctggcgcagctcataactgaccaggagctcagtgcctcgtccgcgtcttgtgccttctggtttcgctcatctcattcactttttacgcaccgcactgcctatatatgcataaattaatgaatctagccgggattgccgagagcttcattcatggcactggcgactctatcggcgtgcaactccttctccggctccattgataaagatcaatggcatagctgggacaacatacgcggcccccgagggaaaagcgcactagcaccagcactggcggtgacccaaaaatggtcaatcgaccgcatactttgcatcccaatgtccactgggctccactggggctcagtgaactttgaaatgccggtggagcagcaccagtagctccgatgagcatggaattaatagcaaattaattgtccgcaatgcggtgggttgcggtagccgccccacgtgcgtgccaccaacaagctgccacaagttcacaagttgccacggggtcagagttgcgttgctgccctgctgcactgcggccacgtgtttcaactttgaacgggcatcgatttgctttcaatttgtatgggcctggactggaccggatcggccggtgttaacttgcgttcatttgctggcagcgatcttgctccatggagccgggtccgaactgcgtccagagctggagcaggggagcggattcaaggcgttgttgcgttgttggccttgaagcctgggagcgctttttgttgaaactctgttgctgccgctttcctttctactgtttttggatttcgttttttcgggaaggcgttgcccaaaacagcccgcaacggttttatttggaaatcactttggttgcacgtcttcgcaacggcgaagatttctgtttgctctgccccatccatccattgcaagcgctattgccgtccctttccgcggctcgctctccttgctaacaagaacgaaagacttaggcagcgaacttgaactgactttagcatgcggtgttggctttaatgagctgaaagttgaggctggggatggagcatggagcatgagcacagagcacggagtgtgcgtgacacttgactctagggcaggcccgccacacgggaaacacaaaaaccttttcaaaagaaaactttttgtagcgtttttttccccatattttgccacgacatggcattgttgtatatgtttcgaagtcattgcctgcctagcggcgattgctgttgttgccgctgccgctcgctgcattcaaaattataaacaaattttttgttgagctgttggtgctgttgttgtttttgctgttgctgctgcggagcgtataacaacaaacaatcgcatgcaatgttcaaattttccaagcacaatgaaaaacgccaccgacaatgcggagagtttataataacaataataaaatgaaaatgctacggccggcaagttgcgtaatccgtcaaccatggcagtcaaaagagcatgcctcggggcgggggacgcggggcttgggccttcttggcggcagaagttgaggaagaaatatgctgatgtttctgtggccgccagtgggatggggcagtatcttctgctgctcgcgagggtgggcccagctccaactggctgcgttcagcacacgcaacagttgctgttgtcgctgtggcagcaacaatcactgcaatcgcttaaatcgcgcatttgcaatcgcttcggccagtgagaaatatattaaatgcgttttgttggcttttactttttggttttaactgtcccgagataaaaatcaggcccgaacatgcgcttaccaaaataaagacacagctacagcaacagcacagcaacggcaacaaaatcaaaagtgctacgcggccactgcttttatgaatgactgactgaccgaccgtcagcgagtgagttatactggccgaaagcacttgttgcgccaacaaacttgtacagcagcttcggccaacaacaacaaccaaaggaaacacgctacttgccgtcgccggctgttgacgaacaacttcagcgacaagatcataaatcaaaattttatttcgcgcagctcagatttttacctgtccctgtctctgtcccgctcccgctcccgcgtcctcatcctctctctctctctcttactctatcgcctatttaaatttttatagtttctgtgctttttttttacgattttccccttgtgcataaattaaaaatttatgcaagcgggttgcacgcgttttgctggcgattgcagcgcgattaaaaccgtttggtcagctggcgcgtgctgcgcgactcaaaggaaagttgttgctcataaaagtggatagccaggcaggttgtagccgaaaataaaacgaaagtgatccggctgatcttgagctgcgactgcgacccacagggcgtatgcgcgatgccccgtttggccatttggttatcaatttgcgagcaaatcgcaagtttagacacctttggatttggcgcctgcgaatgccgatcggaaatcgataatcccaaataagcgggtaatcgtatgcggctattaatcaacggctaagacaatgcctccggtcctggccgtaactcaaagccaccgctgaaagaagccgccaaaaagtgtttttcatgttaaccgctttggccagcaaattgaaatttctcgcaccaaaaatgtgctgcaaaaatgctaaaatcttgttgcacggaatttatgaatgaaaaccaaagcggcagcaacatcagcgaacataacaagcaacaagctgagaacaatgaggggaaaactcggtttggtagccataaatttgtggcaacaaaactgagaccatttcatgcctcgccatttgttgttgctgccgctgttgctgcagatcgttgttgttgcagcagttgcccctggtggcggggaaaagccataaacattttagttgctttttagacagacatcgtttgcgggtcgaggaggaaatatatttgcaacagccagctgtcaaaggaagaagctgagataccctatcaaatcggaggtggatataattaaatatgggctaactaaatactaaggatcgagtaatgtaacgtatttgtataatttcacaacagtctgtaaagattacacaatgggactggaaagagatctcctcaaattgaaaatttaaaaacggttggggttagaggacacaggtcccagggtgctaagctccataaccgtctcgcagtgcccacctgccactggagagcatcggactctattccatggaacgtttttggggcggtgtcggtgtcattaagccaaggcctctgtgtccgagccgtctctctatttacttagcacatctcccagccagctttgctaataaagccgtaagtttttgggtgtgtgctcgagggaagggcggcttctccggtttatgacttggcaaggggcggtcggctcgttgcgtcgtgatttatcagggaaaatacgtacgaaaaatggcgatgacgtgaagtgtttccgcggaaagcggaaaatcgtacagccagggatcccacacaaatcaatcgacggatcggttagcgttaccacggattggcttatcttttcccacgttttaaatgctcaactgtcaaatgaattagagcctggctggggcctgggacacatttggcaatgccccacgaaaccagttactacttgccgtggcacacaggtgtctccgtctccgtctctgtatttgtgactggcttttgtcgctcgaacggcaagtgctcgcaattagaaagcccgctccaagtggcgtttactccgcgctcctccctggtggctgcagatcactttagagctccatctccatctggagccccgtcatcgccagccacttggctgcgaagatctagcagcggctgcaggagaagcgcgttaccgtcgtcataaaacccatctgtaatctgcccctgcctccaacttggaaccccgggtcccagatcgcctgccatcccagaccaaggcgcagactcagactcttggctagccatcaattctgcgtttgactgcatgaattatatgccaagtgacatattgcggaagtgatcaagcaagtgttgctgccgcatgctggccatctgactacccgactatctgaatcgaagtgggttaaaaggataatgccgggcaggcagcttcgatccgttgtggttgctgtggagttgacacagtgacatgctaatttcttgccgtttttgccatatttgtccatgcgaaagtggtacaaattcggggagggaggcaagagagaacgcgaacggcataaggctgattgacatttgacagtctgtccgtccgatggattcgaaagacacttttactctcatgcaaactttttgtcctcgtcttcgcaaaggggaacttgttgacttgatatttcgcttatcttgtttgagcatttattttgttttttatataaatatacacactcgttggatcgtggctctaaagctgctgaccattagttttgacacctgctcagctctgtgaatgccaagtgacatagaaaagtgtttgattaaatgtttcaaaaagtgactacttttaaagagacctcgacagttttttcttgccgcagatttttcgcttggcctgccttgcgtaacatctaaacaaatgtgtgtatgctcgaaaaataatgttgtttcctagagcagttccttcctttgcttggcacaacccagatatgcaaagatgaattttcagtagccgaaagtttctccaactgaggtgatctgtgcggcctgacataacgattcgcgcttgattgaacactaaaatgaaatggaaatccaatcgtggatttcggctaccgcagttcggggctaccaatgtcaatgatccgacaatggatcgaatagcccaggccgaacggacagtcaattctggtagctatcggctaattgaaatcgatgggtggaatgcacataaaagccgagtctcctccgactgttttatgagcaaaaacgactaaccgaaagcccaaagtcagtgaaattcgccaaacacaaaaagcgagctccagcggcgctacaaaaattcagccaaccgcgaagaacgaccttgagcaagtctggccgggcaagtttatatagctagtgctggtacagtatctataatgcctagtacatgtacatgtgcataatgttagctcaacgtggacgccatggcagaatcaatgtacaagatttcaggcgcagatattaatactagcagatactcgcactcataagcagcattagatacgtgatattactgcttgtatctatatttaaaaggggcctgagtcaaactcagattcgtactcggactcggctggggattcagcgaagcttcagctgcggggctttcaaaagtgaagtgctccgccagctaacaactcacagctcagcgcacaattagttctaccagcagctggagctccagctccaaatgaaaaccgaaagtatccgcgagataattttcggctgccgtcgcctcaagtgctccaaagatacgggtttcgcaactgatgaaacacatctcgagctgcagcgcgattaagacgcgaatatgtgtcgcacgctgccaaaatccatagtttatagagccattttcctgccagccgcttttcacaagcgttcactcttaatttcaactgaaaagttgtttgaaaagctgccaacgctacacagtatatgtatctctagatgtaaatggatctgttagcggggttctgccccgattaaggatgccgtcgggtcgcattagccgataatcaattgcttttgtggccgattcccacgctaatcgagatcaatgtttgcttgcaggtgaaaatctggttccagaaccgacgctccaagtacaaaaagatgatgaaggcggcccagggcccgggcaccaacagcggcatgcctctgggcgggggaggacccaatcccggccagcatagccccaatcaaatgcacagtggtgagttagcgaacggaagattcctctgggcggccttagaaactaatggaactctcgctcttgtccattccacaggcggtaataacggcggtggctcgaacagcggctcaccctcacattatctacctcccggacacagtccaacgccatcgagtacacccgtgtccgagctttcacctggtgagtttgcatgcgcggaggcccagcgtcaagaaaccacttcatcagctgcctttgtgcccacagaattcccaccaacgggcctcagtccgccgacgcaagcgccgtgggaccagaaaccgcactggatcgaccacaagccgccgccccaaatgacgccacaaccacctcatccagcggcaacgctacatccgcagacgcaccaccacaacccgccgccccagatgggtggctatgtgccccagtactggtaccagcccgagacgaatccatcactagtgacgtgagtttcgagcccgatataccgtacccagttggctgtaaacgatgaatcagcccgtttaccaccagctccagccctcatccccctttcgaagtctcctaaccccgctatggggttcccttgatccgtttaacacacagtgtttggccggcggtctaacagcatccgaaccagctgccctcggctgcctggacgcagcaccagctgagcctggagcagcagcaccaacactcctgccaggagctggggcaccaactgcagctggagcagctcgagcagcagcaccaggcccaggcggaggcccagcacctcctccagcggcaggacctcgctggcaggaccttcgggggcggggcagtgcagcacacgatatcttagccaataaacaataaacaaccatgatagcaacctgtaaaatatctatgaaatgtcgagaaagaagcgagcgagagcactggcaagttaggcgtcaagttttgtacatttgaaacgtaatataaatatgtttaccaacgtaaataaagtcgttctaaaatgtagtctagctaagaagaaatcgaaaacacacacacacacacacaaacaacacaaaaagaaaacaaaaaaaaatacttaaagcagagaacattcctcaatcacagaagcaaggagagagtatgaaacgtgtcctttaattttgtttaatttagcaaattaactatgtataaacctatctatatgaacgtaactatatgtagtgagcaacaacaaagtataaatcgtaaaaagtacatcgtaaataaatgaaatcaaacaaatgaaaatcagctgttgatcttagagtttctttcgagtgatttgttcttaagtagaagagtcgaaaaaaggcaaaagaacgagcaacagaaatcagtaaaatcagatctcaaatgcaaaaggaaaagtcctcctaattcataaatgccctttaatttttttgtattttattttacctgcacccaaaagaggagaccggtttcgttctttattgtgcaatataatcttatttaccaacctgttgggcgttaactaattgcttgaagtgtacattttgtatagaccgcatgcagaatcaaatgtgtgcatcaaatgtcaagggatcccattttaacaatcgaatcaaggcgaattcagattcagactcgaaattcgactcgctgctgag

SEQ ID NO: 6920 - DNA, 1755 bp, DROSOPHILA
cgcactttgttcgtgtgcagtcgtcgccgctgttctcgccgttgaattgccgtcgtcgatccgtcgtagcgttttgcgccttgcgtttctgcgtcgagctaagtgatccgtcgcggactataaagtgatttgtagtgatctgatctgatctgatttgatatgaattgatttgattgattcgcaaaacggagttgaaaatcgtgaaaatctacaaagaatatgcacagccagaaatcgaagtgatacaagaaagcaatttcgagtgagttgagttgctaacaagttgagtgtcagtgctgagaaaagtgcctcctcgccatctgaaaggatttacgcgctcaacagttccgccaaatcaagtcgccgaactgaactgaagccaagacattgtgtcctacaaaaaccttagatacgcaagccacacactcctactgtgcaagtatagctgatcattgccatcggatctctgagaacttccttcccgcgcgcatccccctgaacagccgtcaaaattcttgataaagtggcctcaataggcgccaacacgctcaatttcacggacctagggagcccctacgaggggcctcccagcaccccccagtcgggcatggacgcccccgacgccccgcacacgcccaagtacatggacggcgggaacacggcggccagcgtcacgcccggcattaacatcccgggaaagtccgccttcgtggagctgcagcagcacgccgccgccgggtacggcggcatccggagcacctatcagcatttcggaccgcagggcggccaggattccggcttccccagtccgcgcagcgccctcggctacccgttcccgccaatgcaccagaactcctactccggctaccatctgggcagctacgccccgccctgcgccagtccaccgaaggatgacttctccatctccgataagtgcgaggactccggcctccgcgtcaacggcaagggcaagaagatgcgcaagccccgcaccatctacagctcgctgcaactgcagcagctcaaccgccgcttccagcgtacccaatacctggccctgccggagcgagcggagctggcggcgagtctgggcctcacgcaaacgcaggtgaaaatctggttccagaaccgacgctccaagtacaaaaagatgatgaaggcggcccagggcccgggcaccaacagcggcatgcctctgggcgggggaggacccaatcccggccagcatagccccaatcaaatgcacagtggcggtaataacggcggtggctcgaacagcggctcaccctcacattatctacctcccggacacagtccaacgccatcgagtacacccgtgtccgagctttcacctgaattcccaccaacgggcctcagtccgccgacgcaagcgccgtgggaccagaaaccgcactggatcgaccacaagccgccgccccaaatgacgccacaaccacctcatccagcggcaacgctacatccgcagacgcaccaccacaacccgccgccccagatgggtggctatgtgccccagtactggtaccagcccgagacgaatccatcactagtgacgtgagtttcgagcccgatataccgtacccagttggctgtaaacgatgaatcagcccgtttaccaccagctccagccctcatccccctttcgaagtctcctaaccccgctatggggttcccttgatccgtttaacacacagtgtttggccggcggtctaacagcatccgaaccagctgccctcg

SEQ ID NO: 6921 - protein, 322 aa, DROSOPHILA
MDAPDAPHTPKYMDGGNTAASVTPGINIPGKSAFVELQQHAAAGYGGIRSTYQHFGPQGGQDSGFPSPRSALGYPFPPMHQNSYSGYHLGSYAPPCASPPKDDFSISDKCEDSGLRVNGKGKKMRKPRTIYSSLQLQQLNRRFQRTQYLALPERAELAASLGLTQTQVKIWFQNRRSKYKKMMKAAQGPGTNSGMPLGGGGPNPGQHSPNQMHSGGNNGGGSNSGSPSHYLPPGHSPTPSSTPVSELSPEFPPTGLSPPTQAPWDQKPHWIDHKPPPQMTPQPPHPAATLHPQTHHHNPPPQMGGYVPQYWYQPETNPSLVT

SEQ ID NO: 6922 - DNA, 2412 bp, DROSOPHILA
gccagccaagccagaggtgaccgaacaggcgcccgtggctgtgatagtcacagaagcaccatccacagaagaaaccacaccaaccaccagcgaaccgcaggcggaggaagcacccgctgcagttgcaccggcaggacctgctgatgacttacccacaattgtgattgaagccaccgccgagtttgtacgcaccgtcagcgtggagcagctggcgcccagtcccggaacggccagcgagtcctcgccagaccagtcccaatcccaaccagagtcgacgcccgcttaaggcggaacagggagcttgttagctgggaaggaaggaaggaacatccccttaaatcgtttaaaaggaactctcgcaactactaaagcggcagctttaaattgcagtagtttagtttacggcgtacttagtttaatttacaattagagcaacacaacactgaagacagaatcgagagtaactttttatttattattattacttgtatattattaatggacgaccaaaggagccagtttcctcaatttgttaaccattactctatggaaatgaactacggtttcccactcacaaaagttgggaacgtgcaaggcaataaaatactaataaaataaatacacgtacatagacacaatataaccaagtcctgtttttctagtttcaaaacgattggaagtgctggtttcataactaactaaatgactcattgcctaggcagttttatgtgctctttctcgtagttgttctctgcttttaatctttaattaaaaattcggccgttactatatcaacttttcttcgcgatagttatcgataagtatatcaattgcagggcagcaaagcaaagttaagaggacgaggcgtgggtatcgattaacgatacttcgtaatttcaagcagctgatatcgattggacgacagggctggacctcacaaataaatataaaaccaaaatattcagtggtttctcaatttgaagaataatacaaacggaaaatgtctgccctgcgccgtgatgtgtcgcctttaatccagcgcattcgggccttcctcctgggtgtgagtatccgacatttggacagcgaccgcagagaactcggttctcagttatataagacggaaaatgtgaatctctgattaatctggacgccaattacagcgggagcacaacctggccctgcgcttcgaggacggactggccgatcgcacccagccacagccggaaatccctgacggtccatcgcatctactctcggccaactactactgccagcgggatggacgtcgcgaggttctgccgcccatcgacctggtggagcagcagaagcagctggcggcagagggggaagcggcgaaggccccgtcttccaagctgcccactcccggcaaggtctatgcctgggattaatgggccgcatcaccgcgggaatcgcctttttttgagttgtagtacgagccggttaaagctaatatagaatcaaattgaagcagaaatgcgtgcattggtatgttcagtgatgaagggccaagtgaaaggccccttaccagcccacaatgtttcgaaaccccacttccgggaaaaatcaccatccatttttttttgagttgtagtacgagccggttaaagctaatatagaatcaaattgaagcaggaatgcgggcattggtatgtccagttatggggggccaagtgagaaccccttaccagtccacattatttccaaatcacactcgccggaaaaaacaccatccatcactggatatcattatgtacaagtattttattcaaatatttacagagcccatcacttacaactagttaaaaaaaaaaaatcacaatccaggaacacctaatagacgcgcggcttgaggccacaattgattccggtggtcgagcgcaggataacgttcagtacgggctggacttcttcgcccagaggcagcaactcaaagtgtctcaccattttgctgatggtgctcttcatctcgagcattgcgaacttttggccgatgcagtttctcggacccgctgagaagggagtataggcgaatggactgatctcgcccttgcgctccatgctgaaacgatcagggatgaacttctccggatcagggaagtagtctggatcgcgctgagcatggtaaataagaatgatcacattcgagtcggcgggtatcaatttgccgtcgagtacggtgtcctgggaaatgtagcgtccaatgatcggcaccgagggaaacaggcgcagagactcctttatcacgcactctaagtacttgagctcgccgagtagcttcatagtaactggagccgacttgtcatcaccgataacatctctgacctcctggaagacgcgagcctgaacctcaggatgtcgagccagcaaataacaggtaaaagcaatgct

SEQ ID NO: 6923 - DNA, 312 bp, DROSOPHILA
atgtctgccctgcgccgtgatgtgtcgcctttaatccagcgcattcgggccttcctcctgggtcgggagcacaacctggccctgcgcttcgaggacggactggccgatcgcacccagccacagccggaaatccctgacggtccatcgcatctactctcggccaactactactgccagcgggatggacgtcgcgaggttctgccgcccatcgacctggtggagcagcagaagcagctggcggcagagggggaagcggcgaaggccccgtcttccaagctgcccactcccggcaaggtctatgcctgggattaa

SEQ ID NO: 6924 - protein, 103 aa, DROSOPHILA
MSALRRDVSPLIQRIRAFLLGREHNLALRFEDGLADRTQPQPEIPDGPSHLLSANYYCQRDGRREVLPPIDLVEQQKQLAAEGEAAKAPSSKLPTPGKVYAWD

SEQ ID NO: 6925 - DNA, 2958 bp, DROSOPHILA
tggaaacttcaagaaacattccggttgaactggcctaatcgcaattttaagccaatttaaacgtgactcatttcgaagatttccgaccaaaaaccatatacatatttatatatatacatatgtgcatgtaccgcatgctacgactcccaactttggatttggacacataatttggaagttgcgtacgggtcatagttcctgccgaaggagccttctgaccatctggattttagacgtaccataccaaatgtcaacaagttttcgactgccgcgtgctttgcgccacacctcccactacccctttcccatcacctcgaaaacctcacacaagagcgttgctatgcatacacacacaggcccacactcacacacatgtcgattatgcaagcaaagaaaaaaataggcattaaactaaaaaaaaaatgctggaaatatgaatgggtcgtatggtttttacagctcatttaatgttatgcatggtaatgatggtctaaaacaatagtttacaaattataagctatgctttcaacaatttgggcacattgttctcgaatcgaaattgtggcctcagcttgttttcgttttcaattgaggattccttgagggcggggttacatcgaaaagtcggaaattggggaaaatcggtaagagctagtagtgctaaaaatatatttctctgtcctcgcgacctggcaatgaattcatctggagtgtctgcgttgttcccctaatcacctcgtcacaattcttccgaaaaccgtatcgtatatatatagtatatagtgttttatgacagcgcatatatctatagatacatctgtgtgtgttgttcttgggagggcggcaaaaattagaatgtgtgtgttgtttagactgtggttttttttggttaaggaaacgttctttaatcgctttggaaaatacatttgactgttccaaactagtacaattagattaagattgaagggttcccttagtatgttaagtatagttattatgcttatgtgttctgttcagcgctcactcggatgcctttatttttgtattttagtatagtgtgtagcatgacccccaaaaaagtggctggagggagcacgaagaatggcccattcagggcagaagcgctggttgcagtccggagtggatccgtttccgatttggaaccggaatgggtaagtggtagatgtgtttccggcgtgtctggtgtgtgggttctgccctgtatgccagccacttcgtcttgctccctggccccgtatgttttgtatgtatgtttttgtgttcggtgtgtggtggtgtgatttgcccgggtgggcggggttggaccagcctaagcggaggccgccacctcaccggacttctcctcctttgtgtcggcgatggccacctcctcgaagttctcgaccagatcgggcacatcatcgtcaccggcatcggcggctgaagagccggctgctccgccggcgccgctcttgctggcaatctccgtggccagcttcttcagctggttgatgtcctggggacccagttgcgtcagaatgccgggcaccatctcggtgatcgtcttgttctcgccatgacccgtgatggcaaacgtgttcgtcggcagcgaggcctgggccttcggattgttgaagtggatgacggtgccatcgttcttgatgatgttcacctcctcgatgccgggaattgtgtttaccgacagcttcttgagcgacgactgcagcttcttgtcgtcggtggcgggcgtggagtggacgatcttcttcttgcggcgaggggtgcccttgccgccaatgcgcacctgcgcctgcaacttcttcagcttttccgcgttcatctgttcaattgagtacacacaatggtcgcatcagtaaaacgccaatcgaatgccgcactttccactactcactttgattttactagaatttagcacagagccttgccagaaaacacgtgcgcccagtcgtagtcaaatgtcaaaaagaaatcgccatgataaaaatggcaaaaggtgtatgtatatgtgagtagtactggtaggaagtactaaacgtgagtgttgactatcgatagctcacaaggtggcaaccaaagcgcgccaaagaaatttaaaaattctattgtttatataatttatacattatttttgaagtaatacgttttctgaattttgaatgaatttttagttttgaatatattcaaatttttagtagtatatggtgggaaagtaaatctactcagggcataaatctcaatttaatcgatttactttattttcatcgctttcaaccacatatataagtaaatatgtttaaaaatttgctatataaaattaaaaataaacgtggtaagaaaaaaaaccaatttactaaacatttggaatgttaataaacataattatgagccatcataaacccagcaataaagttttaaacacaattaaaccagatgtaatgtttgaattaattaattcttatattttctattccaatagtatcgattgctttgttgagttcgatagctatcgttggcttgcatcgactactcactaaactcagcagtcagtgctgcataacgtcatcattatgataaattgtaatgttttaaaaaatatctatacaaaatatacaagcttagtataacaaactcaatttagtaaatatttggaacgcaaataaataaaattatgagccattatataccttgcaataaagttttaaacacaattaaatcagatgttatgtttgaattatcgattgctgtgttgagtgcgctagctatcgccgctttacatcgactgctcactaaacatagccagcgcagtcagtgctgcataacgtgcacccattatcatcatgataaattgtattactttcagattaacgctgataagatatagttaattccaatcgggcttcaataacgaccttccggtagagtagttcactgatattt

SEQ ID NO: 6926 - DNA, 886 bp, DROSOPHILA
acgtgttttctggcaaggctctgtgctaaattctagtaaaatcaaaatgaacgcggaaaagctgaagaagttgcaggcgcaggtgcgcattggcggcaagggcacccctcgccgcaagaagaagatcgtccactccacgcccgccaccgacgacaagaagctgcagtcgtcgctcaagaagctgtcggtaaacacaattcccggcatcgaggaggtgaacatcatcaagaacgatggcaccgtcatccacttcaacaatccgaaggcccaggcctcgctgccgacgaacacgtttgccatcacgggtcatggcgagaacaagacgatcaccgagatggtgcccggcattctgacgcaactgggtccccaggacatcaaccagctgaagaagctggccacggagattgccagcaagagcggcgccggcggagcagccggctcttcagccgccgatgccggtgacgatgatgtgcccgatctggtcgagaacttcgaggaggtggccatcgccgacacaaaggaggagaagtccggtgaggtggcggcctccgcttaggctggtccaaccccgcccacccgggcaaatcacaccaccacacaccgaacacaaaaacatacatacaaaacatacggggccagggagcaagacgaagtggctggcatacagggcagaacccacacaccagacacgccggaaacacatctaccacttacccattccggttccaaatcggaaacggatccactccggactgcaaccagcgcttctgccctgaatgggccattcttcgtgctccctccagccacttttttgggggtcatgctacacactatactaaaatacaaaaataaaggcatccgagtgagcgctgaacagaacacataa

SEQ ID NO: 6927 - protein, 169 aa, DROSOPHILA
MNAEKLKKLQAQVRIGGKGTPRRKKKIVHSTPATDDKKLQSSLKKLSVNTIPGIEEVNIIKNDGTVIHFNNPKAQASLPTNTFAITGHGENKTITEMVPGILTQLGPQDINQLKKLATEIASKSGAGGAAGSSAADAGDDDVPDLVENFEEVAIADTKEEKSGEVAASA

SEQ ID NO: 6928 - DNA, 5563 bp, DROSOPHILA
gaaaaaatagcacaatttttcttgcagctctaaaaccatttagttcaaggatgaatatcaagtaattgatgcataaaaacaatttacttcatatttgtccaggatctaacatgatttcgttttttaacttgatatattcgttcctttttattcagaaatgttttttaggcacctttaaacatttttaggaaaataaaaactcgttaaaaatatttaaaagatggtatacatgtacatatatcagtatattgtgtagtttagcgaaagcgttttttttttgttcatattgttaggcaattataaacgaatttagggaaataaaaactcgttcggaatgggaaaaaaaatgaaaaatgaatgaatattggtaataacttctcgatgcgacgacacatgatgtcttgattaggattttagaggaaactagttttcgttattaaaccagtttcctgtgaaacctaaaccaagatatcaatttggttttttaacactagaagaatacagcgcgcgaaattatgctattaatatttacggaatttccgtttatccaagtttcgcaccatggattgagtctccgctgaacgcttaccgataatcatcgacgtttcgacccatctctaaccgcaaacgcatctggccactctaccgctgtgttgttattgtgccaaaagccaatttaccaatcaaaagcacaatatcgcgtatatagatagtgccctccagtgaatccggtgacctgcggcaagaatcgggttagtcccatgaggttgtgatatacacatactttacgtttgcgccggtgaacaagatgtggaaactgctgcagcgttcggggaatgcagtttctgtagttcccagacggaggtggtgttcacctggcctttcgaatgcagtgcgcctgtctagtagccagatggatccggctgatgaacgggtcctgcggaagcggaagtttcagccgcaacaggcggccgatcttagcgaggaactggccggtcagctgcccgtcaaatcccgggtggtcatctgtggcggcggcatcaccggcgcctcggtggcctatcacctcggactgaggggatggggtggcgaaacgctgctcgtggagcaggatcgcgtcggtggcgagctgccctggactgcctgcggattggcgggtcgcttcgaacctagctacacggaactcaagctggctgagtactccatagatttgatcaagcgactggcggagaacggtttgcccacgggatggcggccagtcggtagcctgaatctggctcgaagttgggaccgcatgaccgccttcaatcgcatgaaatcgcaggccttggcgtggggcatgcattgcgaaatcctttcgccagagcagtgcgcccagcactgtgaactgctctccttggacggcatcgaaggtggcctttggatacctgaagacggggtctgtgatccgcaactcgtttgccaggcctacatgatcgaggcccagcgattgggagtccgcatagtcgaacactgtgccatcaagaagattcacagcgagcatggcaaggtgaggagtgtggagacgaccgccggcgatgtggagtgcgagtactttgtgaactgcacgggcttttgggcacgcgaggtgggcactttgtccaaaccggtggttaaagtgccgctcaaggcggtggagcaccactatttgcacacgaaacccatcgaggggctcagtccggacacgcctttcgtcagggatttcgatggacgcatcttctttcgggagtgtgaaggtcacattctcgcaggcgggttcgagcgcgaggcaaagatggtgtacgaagatggagtgattcccctatcgcaaacagctcgccaacatccgccggattgggatcactttcacgagctgctcgatgccctgttgctgagggttccctcctttagagatgccacgttggataggctaacaaattcgctgcaggtattctctcccgactgcaagtggatcctaggggaagcacctgaaatccaaaattactatgtagcagctggcaacaagacaatgggtgtatcggcatccggaggcattggacgcgtcctcaccgatctaataaccaagggctctacttacctcgacctgcacatcctggacatcagccggtttctggggctgcacaacaaccgaaagttcctgcgagatcgctgcaaagaggcaccgggaaagcacttcgaaatcaactaccccttcgaggagttccagaccggtaggaacctgcgcatgtcgcccatctacccgcaactcaaggaggcgggcgccgtttttgggcagtcgatgggctacgagcgacccaactacttcgatcagcaggacaagcacggtacatttatgttaataggtttttgatcacatctattgtcggttattgagatgttcatatgatacaaatgaatgcgccattcaatgtctatctgaatatttaaaaagtacagataaatacgttcgaatggtacatcataagtaatttctcatacgccagcgagttgaatgtttacaacaactagataatgcgtaactacctaatgaatgaactgaaaatcattagttcgaaacgtattatttaattattgcaatataatagcatatgcatataatatgaatctacacacacagtttattacaagaatggtacatcataagtaatttctcatccgccatcgagttgaatgtttacaacaactagataatgcgtaactacctaatgaatgaactgaaaatcattagttcgaaacgtattatttaattattgcaatataatagcatatgcatataatacgaatctacacacacagcttattacgagatgttttttcgacgccagtaaactgaaaaatttcgccgagccaaattcggttggatttatagttaaaagacaaaattccaaccgtatttacctcaatgaaatttgtttctacgcaatagaagccattcccattcactcaccgagttgacgactcattcttccttctccggcttgattctatatttcagatgagttcgggttgccgcgctttcgtattgcccaaacacgcacctttggcaagccgccgtggttcgatcatgtggcctcagaataccgggcttgtagggaacgcattggcatagcagactacagctcctttaccaaatacgacttctggtcgaagggaaacgaggtggtggacctattgcagtacctctgctccaacgacgtggacgtggccgtgggctccatcatccacacaggcatgcagaatcccaatgggggctatgagaacgactgctccttggcacgcctctccgagcggcagtaagtagcttgcccatccagctcaacatggccagtgagacgctcatcattcgctatttcagctacatgatgattgcacccaccattcagcaaacgcgctccatgtgctggattcggaaacacatgcccaatcatctaagggccaaggttaatgtggcagatgtgacctccatgtacacggccatctgcatcctaggaccctactcccgcatcctgctttcagagctcaccgacaccgatctcacgcccaaaagctttcccttctttacctataaggtgagagatttcgagattcatgttaatttatattaaatattttttacctacctaatctttgccaggaattggatgtgggattggccgacggcattcgagtgctgaacattacccacacgggtgaattgggctatgtcctatatattcccaacgaatacgccttgcatgtgtactcccgtctgtatcaggcaggccaaaagttcaacatacagcatgcaggtgagtcgttgaaaagcgaactaacttaagcggcttcattacttgaactacctatttgcccattttaggttactacgccacccgcgccctgcgcattgaaaagttctatgccttttggggacaggatctggacacctttaccacgccgctggagtgcggacgcagctggcgcgtcaaattcaatgtgggttaacagacagagaatagtcccttaataccgaaaacttatatgccattcatattgtctttgcagaaacccatcgactttattggccgcaatgcgctgctgaaacagcgcgaggagggcgttaagcgaatgtatgtgcagctcttgctgaacgaccacgatcacgaggtggacatgtggtgctggggcggcgaacccatctatcgcgacggggtctacgtaggtatgaccaccaccaccggctatgggtacacgttcgagaagcaagtctgtctgggcttcgtgcgaaacttcgacgacgagggacgggagctgccggtgaccaatgagtacgtgctgtccggccactatgaggtggaggtggccggcgtacgtttcgaggccaaggtcaatctacactcgcccaatctgcccaccaagttcccggatcgggaacgcgaggcctaccatgccacgcgcgacaagccggatcaggcggatcttttatcgtatggtggtgtgaccacggtcaaaggcaccggaataccaacggatgggcacggactgtagggatcgacggagctgggctcccgaccaatatcatctgccatctggacgtgccaagcaatgaagaacttcgttcatttctggttcaactcgagagtctcaaaagcaaagcgatattattacgatagggaatcgagcgaatatgagataggcaaatgattacaaccaagtggttatgctgcttaacatagaggaaacccaaatgtggtggaatgttgagttggtcgagtaggtttgatgtggttaactagatatttttaaagggttttttttttgttcaatttcaatttgttatttgagacaactttaaccacatctgttagagaactattatcaaatcgtgttcgtttaagcatcgaagcctaagtaccaaaatgccagaagatttcgggtgattttgattgtttgtcaaaagtggtgtcaattaaacgtgtatgtacaataagctccacatgcgatgtatatataagatatatcgcagtatatataagaatcttccgtgatattggaataattgaggtttttgcacattgttaaaaaaatgacacaaaaaggttacacattttgctcatgaagaaaaataatcaataataaatttgttaatgaatatatgagctgaaaactaatagaaaatatttctgagcagtttttcagaaagttttgattaatcttttttttttactaacccagacgattgactttgtaatttatggtgtgctactgtgtgaatcacacctcatattataaattatattgtactatatttatacaaatacatttactgtttacaaatgccttataagatgttgatcacccaaagctgccaaaaaggttgagcagctgtttgttgctcggggtgtattggtttttcgctgggtttttggtttttggccaagacagtcagtcaggcaggcgtgtgctaatgcccagaaaactctggtcccaagattgcagcacatgttttggccaagtttcgacgaccggctttggcttggtttgcttt

SEQ ID NO: 6929 - DNA, 2628 bp, DROSOPHILA
ctgcccgtcaaatcccgggtggtcatctgtggcggcggcatcaccggcgcctcggtggcctatcacctcggactgaggggatggggtggcgaaacgctgctcgtggagcaggatcgcgtcggtggcgagctgccctggactgcctgcggattggcgggtcgcttcgaacctagctacacggaactcaagctggctgagtactccatagatttgatcaagcgactggcggagaacggtttgcccacgggatggcggccagtcggtagcctgaatctggctcgaagttgggaccgcatgaccgccttcaatcgcatgaaatcgcaggccttggcgtggggcatgcattgcgaaatcctttcgccagagcagtgcgcccagcactgtgaactgctctccttggacggcatcgaaggtggcctttggatacctgaagacggggtctgtgatccgcaactcgtttgccaggcctacatgatcgaggcccagcgattgggagtccgcatagtcgaacactgtgccatcaagaagattcacagcgagcatggcaaggtgaggagtgtggagacgaccgccggcgatgtggagtgcgagtactttgtgaactgcacgggcttttgggcacgcgaggtgggcactttgtccaaaccggtggttaaagtgccgctcaaggcggtggagcaccactatttgcacacgaaacccatcgaggggctcagtccggacacgcctttcgtcagggatttcgatggacgcatcttctttcgggagtgtgaaggtcacattctcgcaggcgggttcgagcgcgaggcaaagatggtgtacgaagatggagtgattcccctatcgcaaacagctcgccaacatccgccggattgggatcactttcacgagctgctcgatgccctgttgctgagggttccctcctttagagatgccacgttggataggctaacaaattcgctgcaggtattctctcccgactgcaagtggatcctaggggaagcacctgaaatccaaaattactatgtagcagctggcaacaagacaatgggtgtatcggcatccggaggcattggacgcgtcctcaccgatctaataaccaagggctctacttacctcgacctgcacatcctggacatcagccggtttctggggctgcacaacaaccgaaagttcctgcgagatcgctgcaaagaggcaccgggaaagcacttcgaaatcaactaccccttcgaggagttccagaccggtaggaacctgcgcatgtcgcccatctacccgcaactcaaggaggcgggcgccgtttttgggcagtcgatgggctacgagcgacccaactacttcgatcagcaggacaagcacgatgagttcgggttgccgcgctttcgtattgcccaaacacgcacctttggcaagccgccgtggttcgatcatgtggcctcagaataccgggcttgtagggaacgcattggcatagcagactacagctcctttaccaaatacgacttctggtcgaagggaaacgaggtggtggacctattgcagtacctctgctccaacgacgtggacgtggccgtgggctccatcatccacacaggcatgcagaatcccaatgggggctatgagaacgactgctccttggcacgcctctccgagcggcactacatgatgattgcacccaccattcagcaaacgcgctccatgtgctggattcggaaacacatgcccaatcatctaagggccaaggttaatgtggcagatgtgacctccatgtacacggccatctgcatcctaggaccctactcccgcatcctgctttcagagctcaccgacaccgatctcacgcccaaaagctttccctctaatctttgccaggaattggatgtgggattggccgacggcattcgagtgctgaacattacccacacgggtgaattgggctatgtcctatatattcccaacgaatacgccttgcatgtgtactcccgtctgtatcaggcaggccaaaagttcaacatacagcatgcaggttactacgccacccgcgccctgcgcattgaaaagttctatgccttttggggacaggatctggacacctttaccacgccgctggagtgcggacgcagctggcgcgtcaaattcaataaacccatcgactttattggccgcaatgcgctgctgaaacagcgcgaggagggcgttaagcgaatgtatgtgcagctcttgctgaacgaccacgatcacgaggtggacatgtggtgctggggcggcgaacccatctatcgcgacggggtctacgtaggtatgaccaccaccaccggctatgggtacacgttcgagaagcaagtctgtctgggcttcgtgcgaaacttcgacgacgagggacgggagctgccggtgaccaatgagtacgtgctgtccggccactatgaggtggaggtggccggcgtacgtttcgaggccaaggtcaatctacactcgcccaatctgcccaccaagttcccggatcgggaacgcgaggcctaccatgccacgcgcgacaagccggatcaggcggatcttttatcgtatggtggtgtgaccacggtcaaaggcaccggaataccaacggatgggcacggactgtag

SEQ ID NO: 6930 - protein, 777 aa, DROSOPHILA
MTAFNRMKSQALAWGMHCEILSPEQCAQHCELLSLDGIEGGLWIPEDGVCDPQLVCQAYMIEAQRLGVRIVEHCAIKKIHSEHGKVRSVETTAGDVECEYFVNCTGFWAREVGTLSKPVVKVPLKAVEHHYLHTKPIEGLSPDTPFVRDFDGRIFFRECEGHILAGGFEREAKMVYEDGVIPLSQTARQHPPDWDHFHELLDALLLRVPSFRDATLDRLTNSLQVFSPDCKWILGEAPEIQNYYVAAGNKTMGVSASGGIGRVLTDLITKGSTYLDLHILDISRFLGLHNNRKFLRDRCKEAPGKHFEINYPFEEFQTGRNLRMSPIYPQLKEAGAVFGQSMGYERPNYFDQQDKHDEFGLPRFRIAQTRTFGKPPWFDHVASEYRACRERIGIADYSSFTKYDFWSKGNEVVDLLQYLCSNDVDVAVGSIIHTGMQNPNGGYENDCSLARLSERHYMMIAPTIQQTRSMCWIRKHMPNHLRAKVNVADVTSMYTAICILGPYSRILLSELTDTDLTPKSFPSNLCQELDVGLADGIRVLNITHTGELGYVLYIPNEYALHVYSRLYQAGQKFNIQHAGYYATRALRIEKFYAFWGQDLDTFTTPLECGRSWRVKFNKPIDFIGRNALLKQREEGVKRMYVQLLLNDHDHEVDMWCWGGEPIYRDGVYVGMTTTTGYGYTFEKQVCLGFVRNFDDEGRELPVTNEYVLSGHYEVEVAGVRFEAKVNLHSPNLPTKFPDREREAYHATRDKPDQADLLSYGGVTTVKGTGIPTDGHGL

SEQ ID NO: 6931 - DNA, 9814 bp, DROSOPHILA
caatacgcaccatatttttgtacatgaaaacgtacttacgaacattaggctaactgaatcggaggggaagctggggggggggacttatcgaatggcatgctaattattttataaactagaccaaagcttagacatacatatgtgtacctaccacacaccatacatatgaaacttatttttacgaaactacgccacatcaacactcaatggaacagaacgattcaaaatatacaaatcaaaagcaagaacgcatatgtacctatgcctacgagataccgaagaagtcggcggtagccatatatatgtatctaggtataatatacactctagttgattgataatcgattgataatcgggtttggctttactcctgtctttgattctgctacaatacctgaggaatatcgccataacatgctgacaatgtaacactgtactgtacgtactacgtatgagtaatcaaattgtgagtgtaggaatatattttataatataaatgttttatttaagaatcataacattagagctgatcaataaacgtgccaatcgaagcaatcaagcgaaactgtttgattgctcgctaaatcaaatcaaaacgccacaaaaataaagttccatatgcaaagttttgacgaggacctgatttcgaaagccgaccttgaagcatatacacatatatacacagaatcatatatattaaaagaatatacttaaagccagtgtcttacatgaatattgtaattttcgttgagtccatgttaagtaagcaaataaaataaactaaacggattcaatctgtgctttttccgggggtcagtgatcgatcgttgtggctaagtttactttggttccttttttatttaataaataaagttgattttgtgtctttacaaatacaaaaatttacaatcaacaaagacttcaaatgctcatttcctgtgagaagagtggagagtgtagaagaggtggcagtgctccaccagcgttatactaaactaatctaatgtgcgcccatccccaggaggagcaacacggtcgatgccaggacagtgcatcccagaaaactgctcgcagatcccgccgcggatgtggagctctccggggcaatggcgtccagggaatgctcggcgatggtcaccttcgtgttgaccacggatccggagggcagaaccttgcagagatagctgccagccacctggggactcgccttcaggatggtcaggtcgtagttggcgtccagtttgaagttgggctgcaccaggttcttgccattggaaatgacattatcgccgaagtaccacaagaccaccacgtctgagctgtgcactgaaattattagttggcttattagttggtttccttgggaggcatttgatatactcacaattgcttcccacatcgcacttgagaaccacatcctcgccacggattcccgtcacactgagggtcttgttgatcttttcgctggctacaggattgggggacttcgtctgcggactgggcgcactctggtcttcgcctccgtagtcgaagtcatcatcggcctgcatttggtcatcgtccatcgaggattgtgggtaggagatcactgaaatggagatggtattattaattacttctataaaatattctatttatttattttatttttatatgaagatcaaagaaatctctttcgaaagttaaaattcttttttgctgcattccgatgacccataaattgagtgctaaatgtggtagattaagaagatcgtctgtaattatagcccatggcattgtttatagaggttgcccgcgggggtcacatcagccaccgcattagtcggtgggttaattaaaggaaattaaatggaaatcgaaaccaacgcagaccaatgtttttgttgatctatgcagcactgtgcagtaggtcatcataacgggctgcgtttgtgtttatctttatcatattcattttcgcagctcaaattcatcaggggggtgttaaggggacagctgcaccgatgatgggttaaattaaaggctggcaattggcattcacggctttcctttcgtttttcgatcccctacataataaccaacaattaaccagtggcgtagaaaggggtttagaacttctttgggtttctctcgctaaattaataagtaaataattttcaataattttccattgatggtgctatttatgttcgtttcaaacgctcattaaatataaatatcgaagacccccttcacaaaatcctgcgtacgccactgcattttgtgcatgtgtacaaacacatttggtggaaaacatttcggtgaaatggggtcacatgaaaaacgaaaattaaaatgagcgagtggaaagagaaaacaagagtgcctaacccaacactccccctcgtagtcgcagtcgcagtcgcaatcgttccgtccgtcccctcgcttttccgcctttccacgccccctaccccttggcccgatcgccgcacccacatgtgacgtgctgacggaaatccaaaaacaactacggcggccagaagaacggcagctcattgagccactttttgtttttcggtggtgtcgccgatggacacaccgaactcgaactgaaagcatttcacaacaatgtccattttcatagtgccaactgcaacacgcacactctaacaaatgtgcactgagagaaattcggacaaggttgattttgaaacacattactctgatgttcaacaaggtcacttgaaacaaatctttcctatgagtaattcattttttgaaacttaaatcaatgatcaatcaacaattacttatatcaaattaatgagcttcacccaaatagcgagcttcccatttttcgtcgtgtaaaaaaagtaaaactctgcacacaccctcgaaaaaagggacaatttggttgggtgattgtgaaaagtttaaatttacattttgtccatttgctttggtcgctcgtttctatgagtattttggccagtttttcatcgtttgctcagcgtagcgtgttaaaagaaaaacttcaataaaaacaaacagcaattctcggtgggcctcccaactgaaattcgaattcctgccaaaaccgagtgcaatgaaatcgaggcgatcgtttccctgcttttcttgcattcctcatagcctcctggtgcccccttccaattccacaaaaaatgcacattcactcacgcattcgctctttgtcgtaaacttaagccataaaagaaatttattctcgtatttacattgaacgaaaaagacactgaagccatgtgaatttatgttgctcgcttcccgccccacaaaccaaaaaaaaaaaaagaagaaaaaaaacagccattcaatcgggaagataagcgtggaataagaaacaacaattgcaatgaaagtttatttgcagaaatttgttttttgggagcttgggcttccgatacaaatatttcgataaggaagttgggatacttttttggggcacaggaaatatgtgctcaaagaattacccttttcttaagaactttaatccttaaggaaacaaataaaagccctctgtatttatgctatctaaaaaaaataaaatttttgataagcgtaagaaggccaactgataaagttccaaggaagagaagcgaaaggatgaaaggaattgcataccgttcaatgaaccgctgtgtacgaaagtttacgtagtaacgaagcgcacaatattcgatggtttcccaaaaggagagcaatggattaaaacattaaagtggagcatttataataccattaatttccaagccgccctttaacctctaatttcattttacatcctcccgaaattatcttaacccgggatgcatgttttttttttatctccatagataaaagttttcgaacccttgtttcccgcccgttttaattgctactcagaattagaccgacaacaatttatcataaccatgattccaaataataaagggcaaggaaaatgcatttcagctaataacccagagccgcgggccaaagttaagtcagcattagtgccagtcacttccacgacctccgtatataccgtgggttttatacaatatatatatatatatatatgtgtatatttgtatatttgtatatatcccccactggccgggaatcattcaagtgcagcacttttgctgttggttttactacctgtgataaggccccgaggaaattaagagccagtcgcgcagggagcgagctctctgatctttgatctcctttcccagtgttttcaggtttgtccagccgggtctgtccatgtcccacccccctgcactcactgcactgagcgcaatttggtaacagtcttatgattgtgatggttttttcaactagttcgatattgacaaatgtcctgtaaagcccccttttcctgcaccaagttgaatttaatttaatagatttattttccaagtaagaggaatttctctcagtgcactacgtgactggccagtcgcagaaggcgagaaagaaagacctggcccatggacgggctgcgttatatgagccgaaaattgtttggctccgttcctgtacagtgtgtattgggcattgtgcgctagtgtgtggcagatagagacatgagcgaagcggataatgataatggcattcgggttctgtgaaagcgatcaggttacggccacgaaccgaaccgagaggagagaacctcataaagtgactacctacgcaccgggcacttttgaattggccaggagctgcatcattattcgtgagggctgagggacgggtggggtgggagttaagggcacagatgcaggggcagatgtgcatcattgacagatgccgaaaatagcaaattattcgcaagcgtgtgcctagcaatggaaaagggattgaaatccattcgacagatgccgaactactaagcgagtactttaaaactaaaaaatatgcaaatatatgcgcgcatgtttcaatcatttcggcctccattatccaaatcgatttatttcaatttccatttgtttgatcccccagatgggcgagcagctatggcatcaagtggacgccataaatttcgattttccatgatcccaaaacatttggattctggaggcactttccttatgcatatgcctctccaaatagagaacattgatttcacttaaacgattttacattgcgcccccgatcgtcgtatacaaatttatttcgtttcgatacttttcttttcgtctccctcctcgaataagtactgggaaatgtggttgcacgtgtctgtggcaagtgcctcggattttgggttccaaattgtgcgggcgcactgccaacgggggctaaagacgtctatatagtatgccatatagttgaggcgcgactttggctacgcctagcgcatactaaatacaaagcgctctggggcagggctcgtgttttccgagtggcctctaattaatatgcggcactcctttctggctcttccccatattatattcgccctttttcccccgtgtaactatttggactcgcttcgatttgggttatttattgccatttgcttagagaactctatttggactcggagccgcagtcgaagcttcaattgaaattttagcacggagacgtagttatattcaaaaatttgacagaccagaactttaggaatgtagctaggaaattcaaagtacctttcggcggcagagaacaaaagaatttatttatttttgcataaacaattcgttgggctttcaggttaaaaaaaaaaaaaacttaaaggtgaatatctaattacgttcgtcagtgctaagtttttgaaaattccaaagatatgtaagaatgtttttcgcaatgctgtgagctaagaaataaataatgaagttgcttagtgttgttatttatatctacaaccacctgaataagttatatcatatcttttactatttgtttaatatgaatttctatgatttactatcccataccttcttcaatacgaataagcatctcaaaaattctggggaattatccgaaatccaggcattccaaatagccaacatagctatatggatgggatccaacttcctatgtgcggctcgtaaattctgtaaatatttctaccaagcagcagcatctgcggctttttggttggattcgctttgactttgacttctgcctgccgctgaatcagcagttgggttctccattatcgtgtcgatcatcagcgctttatgtgtgcattgacggaggaggggttatgtttgttatgtacagtctgtatcgtacatataatcgtgccccacttgagtggtgctgcaccaagccccaccccgctgcaccccctttggaaaacccgcactccgcggacgacaactcattcagcggcgggcgattcgccagcgacgttaagtaaattgattctttaattgccgagaattggttaccagttggcttaactcgcttttgcccgccgagccaccacccccgtccacaaagcccccatattttgcagtgtatacatacatacatatgaatgcaagcaaagaatcgagcaaagaatgaaaatcatcggcatcgcgagtgaatacatgaatacgaataccaggccatggcgagcagacaagagcaagagtgagtcatctgggtccaaaataaatacccccgggcctccgcctccaatcgccaggaatttctgcacagacaagggcagggccctcacacccggccactcccacttttcagccctcgactccctcgcatttcgagcacaggcaaatctttttttatgcttcgcggttctccgtagcattcgcggtcatttgatgccttctcctcttcttcgttttctcagcccggccatttcaattcgcaccaagcaggctacacacaaaatgccatgaaattcaatccacagagcggcgataaaaaggaaaaaccccacagttctgcacaaggagaaacatgtcccgaaatgaagactgctcgaattcttcagtaaaaagtatctcgaaaaaattgctgagtccagggatttttgaatcaaccaatttcacactttgtggccttgtttattgtatgagaatctcggtatctctattgtaaattaatttcaaaaacgtacaaacaatattgttcaattttaaagaagaaaaaaatgatgctcttcctctcactgcacttgccattttttctcgcagtgatcccaatgatcatcagttaggcttgttgtttacccatgtcaagcccagtcggacaactatggaatattaagtaaatatggtaaatacatacggactgagcaaacataaattcctggcgaaacatgtcagcagatcggtcggaggaagcggcttttctatgcacataccgccaagcgattttgcaatccaatcaatttgatgataatctcattgtcttcggattggggtaagcaaacacggcaggagaagggttccaggtgatcgaaggagggtgatctttgatcacaccacgaccaatgcgccaatgttctcacgctgcttcgccacgcttctttagggaaatggctcctacctagaattgcggtaagtcgaaggggctaattatacaggaccccggatccgatggcctcgaatccgataccgatcctcacccaaccctcctgctgtttgggcttctcccattgatcagcggattgtttttgctcatttcctgggccgcggacaatgggtgaagtctggaataattaacagccgtaaccgattcggaatcacaaatggcaaacagcaagcagcaaatggcaaagagcacacccctcttcagatgcacatagatagatacttcctaccgatccgtcgagtgaattgaatgagcgaggaaaactcgaatgcattcaggctgcggccattcatcgatcgtgataaataactgaattaatgtgacgggctttggataataaattatcaactttactgtttagctcactgtaaaaagtgcaaaaattacgcgagtaataaaaacattagtgaaacaccattcataaaaatccatttgaataatgcggaagtcttgaccatttgcaaaatgtcagcaaatcgaaagatcaccaatgaataaagctatatccattatgcgtcgttgggattccaagtgaatcataaacgaaactcgaacaaataacacatagaaataatatttaaatgggctaatactaaaatttctttccgtgcatgatcactgggacaaatgtaggtcagaatgtgtttgaacacattgggctcacgcccaacaatcacatcgatttatagtaaattcctgcacttcaaatccgaatccaaatccgagtccgaatctgatgcactgcgattagcggagagacgagacctgaatgtctggggtcgccctcccattttgattagattgtggagccgcgtattgcatcaggttaaccccatcgtaacttacccgcggcactgcccacgatcagtaggagtccggcgattagaagatctgttctggacatcataatgctgttttcctgtatgcgaagtgcacttcccgacgatcggtgtctaaataggtatccaataggcagcacttttcgcttttgctcgacccgccgcaatctgtgtcacacgggaccaattgattgctggtgatctttttggattttcgaaaattattgccgcgtaattatgttgacgttttggtgttccaatttccgggtagcactgtcagcacttttgaattcttttatccatcaacttgcacacacaagacgaattgctttgggttctgatatattttggttttctctatatttttcaactttatagcaaacttccgttaaccgtccattcgaggcaacagccaaacgagaaatgggcagcggattttggttttcaggttttatggttggattgtcttgtcggccggcgaagagaaaaggaaagagagcgcgaagagagtgctaagagagcgtggattatgtggcgcgaaataattttatttaaaaacattcttttcgaaaggggttgtatttatagaaagaaagcatttcctggccataaatatgaattaacggatgtggaccgttggtggaccatgtggattgtgaacaaaaaattgaacaaaacattctgtaaaatccacattaacaagccccaattaagttaaaatgaagttgcgaaatacaattttattatgccacatgctcgggctaaattccagcaattgcaagcagcacatgtcgttcctttccctctcccttttgttcccgacgaagcgaagaatccaagacccgcagaacagtcttcaagtccaagattcgcggaaatttatttgcatcccccggagacaatttgcttgatgcaattgcgccattttctcagggctccaatagcgtcggcctgggaagccgtgatttcctcgatttccaaggggtaatatccccgctccaatttttttttttcctgcctctgatgatgacgcctacatcgggtgagatacggatacttggatgcttggcgcaacagatgcagatacgatttatgggtgcgacagcgaccgcattaaatgtagatacatgcaacatttgcactgtacaaacaaacaaacaattaaaattaatctacgagcataaaacaaagtgcattgcattatgtatcttgcacagatagatctctttgaggctgtgtgtgcgctacacagcggaaaaatgtggttgctatctagaaggtaagatttaaataatattataactgattttcgggattatatattatagatattgattttagaattctttgagttggtgcaaggtgcattcacatgaatgttataagttacattaagctattgtaggtcc

SEQ ID NO: 6932 - DNA, 930 bp, DROSOPHILA
ttgcctcgaatggacggttaacggaagtttgctataaagttgaaaaatatagagaaaaccaaaatatatcagaacccaaagcaattcgtcttgtgtgtgcaagttgatggataaaagaattcaaaagtgctgacagtgctacccggaaattggaacaccaaaacgtcaacataattacgcggcaataattttcgaaaatccaaaaagatcaccagcaatcaattggtcccgtgtgacacagattgcggcgggtcgagcaaaagcgaaaagtgctgcctattggatacctatttagacaccgatcgtcgggaagtgcacttcgcatacaggaaaacagcattatgatgtccagaacagatcttctaatcgccggactcctactgatcgtgggcagtgccgctgatctcctacccacaatcctcgatggacgatgaccaaatgcaggccgatgatgacttcgactacggaggcgaagaccagagtgcgcccagtccgcagacgaagtcccccaatcctgtagccagcgaaaagatcaacaagaccctcagtgtgacgggaatccgtggcgaggatgtggttctcaagtgcgatgtgggaagcaatttgcacagctcagacgtggtggtcttgtggtacttcggcgataatgtcatttccaatggcaagaacctggtgcagcccaacttcaaactggacgccaactacgacctgaccatcctgaaggcgagtccccaggtggctggcagctatctctgcaaggttctgccctccggatccgtggtcaacacgaaggtgaccatcgccgagcattccctggacgccattgccccggagagctccacatccgcggcgggatctgcgagcagttttctgggatgcactgtcctggcatcgaccgtgttgctcctcctggggatgggcgcacattag

SEQ ID NO: 6933 - protein, 168 aa, DROSOPHILA
MDDDQMQADDDFDYGGEDQSAPSPQTKSPNPVASEKINKTLSVTGIRGEDVVLKCDVGSNLHSSDVVVLWYFGDNVISNGKNLVQPNFKLDANYDLTILKASPQVAGSYLCKVLPSGSVVNTKVTIAEHSLDAIAPESSTSAAGSASSFLGCTVLASTVLLLLGMGAH

SEQ ID NO: 6934 - DNA, 5344 bp, DROSOPHILA
gccagtgacctccgctccttcgattcccttgtggtggccggtccacttgttgctggtgatttagtgaccttccttggcacttccgttttgacctgcaattcgaaaagatttttgaaatcataacgtcttgtcggggtgctcagcactatttcttagcattttacaacactgacccaatcttaacatattgtttttttttttgtgtggcgatcggttcgtttattagttttaattgaatgctattccatatgtgctgcgctattaaaatgctaatgtgtgtgctattgggcaataaggctttaattgccattaactcgaaaactaagctgctaatctaactgtgcgacaggtgtaaatgttaaaaagttcgttggtttggtttttgtgagcgagtgaaatgcaaatttgctgtgcaaataagtgaaatcgctgttggctgccaatcaatggaaaggtgtactatatatttgtgcttttgatatatatgtatatattcttcgtttcaagtgcctttctttgggcttacgtttttgctgctggttcgccccgcattttttgacattttagaaggaataaatgctgtttaaagtgcttaattaagctgcgaattaatagaagtaaatgccgtatgccacgtaaatttaatcaatcgtaatgcagctcagttgtgacattttttcctgtttccctggcaaccaaatccttgtacatagcaacaacaaagaggccagcaataacacaatcagctgatccgacagtgctgaaaagggctggcatgtttaaatgcaactggtaggtattattaaaaaatgtttcattaaatttagttatttgtttgcaacgtttgcagtgttatgctttaattaggagcatagagctctgagcttattaaatgcattttaaacttcaacaacttttaattagctaatgttatcgattgcccatccgatatttttctatcgacactagccgctctttttgaaattcaaaaagtccgtttgggtgataaagctcgttttgaagccattgttgttcttaacttaagtttagcgtaatatcacaataaataagattagtgttgagctcgggtctagccaaacggctgacccactacaaataataagcagacaagcaatatccataagttatgactggatttcatggctccactctcgtcgaaattcctgtagtactgggtattggcataccgatcgtagatgtgctccatcacccgcttggcattgtcgcggtgcagctcctggaggcccagtaggccatcggtgtcgtcacggaacaacacattgttccttttatcgaagatgccgtatagggtaaatggacgcgtctcactcttgtactttctaccaaacaactgatccatatcgcgcaaagagttatatatctcattgcgtcgcgtcagcgaagagttgtgcgtcatcaggtggccacgggtggtccaatgcaggtagcagtactcgaagttggagcgcttctcaatgccaccgtatgggcacaacacccggaaatccttgtgatttccaggagtcaaccaatttgaggtgagattgccgacgacatacttcttgtacacatccgagctgaggaaggccacatcggcgccctcggaaaggcaacgcagagcaccttcgtcgccctggtagtgaagaggacacttgcgtccgctctgtagattccacaaacaggagtcgcggtggaagtaggagtgcagcgattgcaccttgccagtcgcattcacaatagtctcctgaacggacaaatgcgcagctccctcgaaggatggcaagcaggctctggctcctttgagatccctaaagctctcgaacttggcatccttgtgtacgagtgcaatagtcacataccgatcatgcatatccgctgcgaactcgtatagcaatggcactagattgtaatcccgctgagctttcacgcgcatttcctgatccaccaacaccacatctgtctccttgaacttggtattatccaggcactgttgctcatccatggtgcggacgcactgaatgttcggttgcacaccataaacttgagaagcctcctgcagccaggagcacttgatgtgctggatgatggacgtggtgcagaatacaatggaacgcggtggattgcattccgggaagctgtaggcggactggaatgcggtggcctggtccagatagtcatcaatagctatcacattatccagtggcacagtgaaaacgtgatatgtctccagcaggctaagcagcgcattctgccaactatctggctcatcatgattgagtccagtgacgagacgctgcacttgagcggcatggctgcgacgggcagccaccacgggccacggcttggccacccagacacatggttgactggcgttcaatggctgcagatgaccatccgggcagagatagctgaagtccgagggattcgactgggccggaatgccagagaactaaaagaaatagtcaaagaaggttattcacaaatatttgtgcgcaaagattgtatgcctcaaactcacaccaaaatgactgcgcacatcatccagacgagcccaggccacattcccgccaccactggtcaggcaatagagagctccgcggcgtccccaatgcttgtcggtctggtcacagctatccggttcgtagcacatctcgcacagcgagggatatcggttctttaggatgcgatcctgcttgggatcgggcacccaaggaccagccttgcaactgggaccaaagtacttggctgtggatgctatccgatcctccgtgacggtcatttcgggatcacaagtcttcgagaccatggcagcttcaaagtactgtaaagaagtcgtatatacaatcaaaattggagtacttttataagatatccattgaggtgacctacattagccaggacctccgtccagtgattgcccagaccgtagccaggatggcacagccttgcacctcgaagatcatgaacagtatggatattggcgtggttgtccaccaccgccacaatttcgtactcaaagtgcgactcatgggagcgcaactcgctggccaccaggatctcaacgctggcccagcgtgcggccaccagatcctccgaggtgagcactccaaagtgggcggtgcccttgtggatacgcctcacgcaatccaatcgatccacgccgatgacgcactcgatgttgctcttcgcctccagcagcggacagaacttgggggttttccgataaacgccacgcgattccaccacacaaacacgcactgcggaaggaggaggagaagcaagtaaatctttgcataaagtttggacatctgcttagtatacgatcggcgaaaaaccagtcgctagccgccgcattaataatgattttgtttattttgaagtatctttcgcatgcagtttttcggaaaagatattatctttgagctgggtatttcacttgtctgttttaaattaaaaattcccctcaggtaacgcagttgtcggggaaaacctgattaagtgcgctgcattcgcagaattcgcttaatggtgcaaaactgggtacaagtcagttctgcccggacgctttttgggcagtggatcacgagctccaaggtcgggacaggttttggaacggctgtctctagcggattttgattacacccggtggagtggcaaggtcgtctgctctctcgcagtgcatttcgattaaaagatacatgatgattggtggtttttgaaacggtttttatgtgtaggaattgtaataaaaagtttagttttactctcgaccactttttagattgactaacattgttgcttgagaagttatcatatatatttgaaatgtaaacagctgctgtcggcctttacagcatcatatttcatagtttaatggcttaaatgattggtaaacaaacataacttcagcagaatttagttgcatgttcaaaattaacatattaagtgcaactttagacttgcttatgattaagatacatcttaattacaatcacaagctcatgtatcacttatcgccaacagttcgtctactaatttacgcagtttgcatgctttttattaatatatttccagacacaaggcaatacgcccctcatctttgattgacttacattttccatcatcgggcggctgcacagccacgcacatcgatattgataagaacgaggcaaacagccccaccaaaataagtgtaagccactgcattctgagcttcgattgcgtcaactgcttgttaattgtcaattcactcactgaagatcgtctaacagtcgagattaggttagttaatcaatgactagttggcttcaagcccgaaccgctcgcattggaagatcgacggcaactgaaggcagccctctcccagatgccagcgagtaaaacctgatccgagcaatccgtaagctccggctgcagaacgagatcgccagtaaataaataataaatggaatacaaagcagctacgcacagctgatgatgagtcaggcggggttttttggatagctctctgattgattagtatctttttgcgtgagaatctaagcggggatcacctatataaaaaaaaaaacattaatcctatctatacattaagcagctgtccagtccagcgctttatcaattatgtttgtatataccaaacatatgattaacgaacgccttatcggccaacttgacttatcagtttccatgcgaactgcatgcctttcggcattatttgcttgcctcagtctctgaccgcagctcttggcgtccatatactcaacttgatctctgggaaatcgtcacttgtgggtggattttaatcgcgtgaacctaattgctcgacagataatcaatatacttaattaacactatatgcactatacacgtttcgtgcaatttcattgtattcaaagcatttgctcatcacaacttaacgtagtcaagtgaagcatttctatggcttcccggttataacttgagttagcatcattcacgcaccttgggttttttttttcttctcgtaactcccctgttatttctagggatttctaaattgtgtttgattaatgatcaatctacgaaagttatttcggctttggcaaaagagcaatttttttctgtgtcaagttaacaagtgatttggtaccgcaaaccggtttttatctacaaagtataaaaaaaatatcgcaagttatatgaaaattactaattgagttggttggtacaagtggggggggggggggaatcttggacatgcctcaagggcatatttattatggcaggccctaaaatctttatcgcacatacggtcttaattttccaacaaaatctaacgact

SEQ ID NO: 6935 - DNA, 2352 bp, DROSOPHILA
agcggttcgggcttgaagccaactagtcattgattaactaacctaatctcgactgttagacgatcttcagtgagtgaattgacaattaacaagcagttgacgcaatcgaagctcagaatgcagtggcttacacttattttggtggggctgtttgcctcgttcttatcaatatcgatgtgcgtggctgtgcagccgcccgatgatggaaaattgcgtgtttgtgtggtggaatcgcgtggcgtttatcggaaaacccccaagttctgtccgctgctggaggcgaagagcaacatcgagtgcgtcatcggcgtggatcgattggattgcgtgaggcgtatccacaagggcaccgcccactttggagtgctcacctcggaggatctggtggccgcacgctgggccagcgttgagatcctggtggccagcgagttgcgctcccatgagtcgcactttgagtacgaaattgtggcggtggtggacaaccacgccaatatccatactgttcatgatcttcgaggtgcaaggctgtgccatcctggctacggtctgggcaatcactggacggaggtcctggctaattactttgaagctgccatggtctcgaagacttgtgatcccgaaatgaccgtcacggaggatcggatagcatccacagccaagtactttggtcccagttgcaaggctggtccttgggtgcccgatcccaagcaggatcgcatcctaaagaaccgatatccctcgctgtgcgagatgtgctacgaaccggatagctgtgaccagaccgacaagcattggggacgccgcggagctctctattgcctgaccagtggtggcgggaatgtggcctgggctcgtctggatgatgtgcgcagtcattttggtttctctggcattccggcccagtcgaatccctcggacttcagctatctctgcccggatggtcatctgcagccattgaacgccagtcaaccatgtgtctgggtggccaagccgtggcccgtggtggctgcccgtcgcagccatgccgctcaagtgcagcgtctcgtcactggactcaatcatgatgagccagatagttggcagaatgcgctgcttagcctgctggagacatatcacgttttcactgtgccactggataatgtgatagctattgatgactatctggaccaggccaccgcattccagtccgcctacagcttcccggaatgcaatccaccgcgttccattgtattctgcaccacgtccatcatccagcacatcaagtgctcctggctgcaggaggcttctcaagtttatggtgtgcaaccgaacattcagtgcgtccgcaccatggatgagcaacagtgcctggataataccaagttcaaggagacagatgtggtgttggtggatcaggaaatgcgcgtgaaagctcagcgggattacaatctagtgccattgctatacgagttcgcagcggatatgcatgatcggtatgtgactattgcactcgtacacaaggatgccaagttcgagagctttagggatctcaaaggagccagagcctgcttgccatccttcgagggagctgcgcatttgtccgttcaggagactattgtgaatgcgactggcaaggtgcaatcgctgcactcctacttccaccgcgactcctgtttgtggaatctacagagcggacgcaagtgtcctcttcactaccagggcgacgaaggtgctctgcgttgcctttccgagggcgccgatgtggccttcctcagctcggatgtgtacaagaagtatgtcgtcggcaatctcacctcaaattggttgactcctggaaatcacaaggatttccgggtgttgtgcccatacggtggcattgagaagcgctccaacttcgagtactgctacctgcattggaccacccgtggccacctgatgacgcacaactcttcgctgacgcgacgcaatgagatatataactctttgcgcgatatggatcagttgtttggtagaaagtacaagagtgagacgcgtccatttaccctatacggcatcttcgataaaaggaacaatgtgttgttccgtgacgacaccgatggcctactgggcctccaggagctgcaccgcgacaatgccaagcgggtgatggagcacatctacgatcggtatgccaatacccagtactacaggaatttcgacgagagtggagccatgaaatccagtcataacttatggatattgcttgtctgcttattatttgtagtgggtcagccgtttggctagacccgagctcaacactaatcttatttattgtgatattacgctaaacttaagttaagaacaacaatggcttcaaaacgagctttatcaccc

SEQ ID NO: 6936 - protein, 714 aa, DROSOPHILA
MQWLTLILVGLFASFLSISMCVAVQPPDDGKLRVCVVESRGVYRKTPKFCPLLEAKSNIECVIGVDRLDCVRRIHKGTAHFGVLTSEDLVAARWASVEILVASELRSHESHFEYEIVAVVDNHANIHTVHDLRGARLCHPGYGLGNHWTEVLANYFEAAMVSKTCDPEMTVTEDRIASTAKYFGPSCKAGPWVPDPKQDRILKNRYPSLCEMCYEPDSCDQTDKHWGRRGALYCLTSGGGNVAWARLDDVRSHFGFSGIPAQSNPSDFSYLCPDGHLQPLNASQPCVWVAKPWPVVAARRSHAAQVQRLVTGLNHDEPDSWQNALLSLLETYHVFTVPLDNVIAIDDYLDQATAFQSAYSFPECNPPRSIVFCTTSIIQHIKCSWLQEASQVYGVQPNIQCVRTMDEQQCLDNTKFKETDVVLVDQEMRVKAQRDYNLVPLLYEFAADMHDRYVTIALVHKDAKFESFRDLKGARACLPSFEGAAHLSVQETIVNATGKVQSLHSYFHRDSCLWNLQSGRKCPLHYQGDEGALRCLSEGADVAFLSSDVYKKYVVGNLTSNWLTPGNHKDFRVLCPYGGIEKRSNFEYCYLHWTTRGHLMTHNSSLTRRNEIYNSLRDMDQLFGRKYKSETRPFTLYGIFDKRNNVLFRDDTDGLLGLQELHRDNAKRVMEHIYDRYANTQYYRNFDESGAMKSSHNLWILLVCLLFVVGQPFG

SEQ ID NO: 6937 - DNA, 7090 bp, DROSOPHILA
agccaaggcagctgggcacgcgcattgcgatgccactatggcacgctggcactctgagactttggcattcttggatttcgctggtgcgcccatcgaaagctgcgtttgccgcccctcctggtgggtgtgggcttcactgcgatacttgaatggcatccaaaatgccgtccgacgatcagcgcgttacatgagcccgcgatcgaaaggggacccaaccatcagcatatcgttagatgaccagtctatttcgggtctgcacaaaacccactggtcttgccaaggtgcgctgttgcggggagcgggggtgttgcattgcggcgaccgcttccggttttcccaagagcattacgaacggcacgagcgtgcgatgcatcgccggttcggttgtcacttcttctcaccggttcccatacgccgcaacactgcgcgaaaatgtgcgtggcaatcaagctgggatttcatattatctctcgttatgatcttaaagaaagatcattcctggaatgcattatggttgtgcggcataaaagagttaggtatcagtttcactacacttttcctgcagtgcacctccttgcgcgctcttcttgggaatggggctctgcctgctctgcggtcaagtccggaccctctggccagcggagcgcgcagtctggagttgattggagagtgacccccgatccggacgctacacacctcagcgttcggtgagacgaagtatttgctgccggcgggctttgaggtttgggagttctgaacggtctctgaagaacggtctaaaattaaaggaaggcgcgagagcgctttcccagagagcggcaacacaaagcagaaaggctgaaaaagcggaaaatcggaaaatcagaaaagcggctgatcggcgtgtgtgtgtgagtgtgagtgcccgtaggtgtgagtggccgagtgtgtgtgccatcgccgctataaaaagaaaccgcgatcgctttcggcgctcacttttggtcgcagctaccaaacggcgtgtacccgctagagatatatacatatatacatataagataataagatatatagcatcacaagcaagttgaatacaaaatagaacccggaacgcaggcattcacagagtatcgctcggttgatagactttttcttgttttttttccgttgtaaaatcaaaaaagaaacgttttcgaaacgtgtgcattttgcattgtgagtggatcgagtagaataaaatcgaatcgaatcgatttggaaacttggaagcccgccccgtcgaggaattccagccagccgaaaagtcaggaataagaggagccacttccgaaaaccccagaaagtaaagtgagtgtcaaaacagcggcgagcagtaaattaaaccgaactttcgagtcttacaaaagtgatcctgaaacgtctggatatttgaaaacaatatagaaatagagagctcgcttttgagcttagtaccctataatatttcccataagagggaccttgaaccccgccttagatcttgacctgtatgcattagaggcagaattggtggagtactcctcgttcgcaattctctcaagtctgagctttgagccgaaacacaatttgggtaaaagatagttggtaactcaagctcgctggaaaccagaggttaatgcacagcaatttccagttaattccgagtgggaaaacggcaaatgggcacgaatccgaattccggttcatcttttggggtcgcattcgcgttcgtattcgtattcgtcttgggtgcgaggggcgctcgagagttcacgcctaacggcctttggcgctgtgttttggattgcttttgcttctgcttctgtttctgtttctgtttttgtgctcccctccttttctcactcgttctgctttctgttttctgttgcttttgctgttttcacttcccaccgcccatcatcgccatctctgtggccgtaactccgcttggagctggctctaaagcccggagccacacaccgcacaccacacaccacacaccggcatcgaggtctcggtctgggtctgggtcacaatgggtacgctggtgcgctgtttggcaattcgccatagtagacatgatacgatggcagaaagacccatccatccatccacacaatgggcgcacacatttccattgttatgaatgttgtttgttgctaaatttaattggttttctttcccatcgccgggcccgttgtgtccaactcttttctctttccgattgcagaaagagtgttgcggatccagctagcgatcgcaccccccgtccggaccagtcaccgcattcgccaatctgcaagatcccagccagagcccggagcccaatccatccaagccgagtgcagccatgacggacgtatcgcatgaactgggcgccttgcgcttcgtggtggtgagtactctcgatatgcatataaccacatcgttctagccctcgcccagtgcctaacactttcccaaagatccatccagtttatccatcgtattagtccccgtatgtgtccaagcagctaaaactttatttactgccaccactctcccgaatatctcaacgcaagatatcgaatactatcatactataataatagaaaagagccaaaatgttgaaaaaaaaagggatttggattaagatttgagaaatgtttggaatgccgcagttggcactataaaaagattggcgctgcttttccgctcgcacatctcgtgcgacaaatggctgaaaattatttatgcgcaaaaaccacagaaatgcgtgaggagccagaacaaagccgaaaccgaaatatgtagaatgccacaaactggggagcagatagcaataaagcaataaatgtccgtcgagagtcgcgggggaaatgcctggacagccatggcgatcggcgatgatataagcaaacaaaacaattgccaggcaaagaggcaggcggacggggaagactcttcttttttttttgttttttatcgaaattagttactgtatttgttttaatttgtcgccacatgagttgccaaaacacacacaacacacccctactttgggccagaggaatcagaggaaccaacggctctcgcaccgcaaaaagatcaaaacacggaaaaattcttggcaatgaccatcgaaatagcaatgctgaatatgcacagatacccattcccatctccgcccccgtccgccgtgtccgcccgtccgtccgtccgtctgtccgtccgtccgtccgtccgtccgtatagatgtaggggctatatgccacagtcatatacatatgcatgttaagtgtacggccacagctgtggatatagaatgcgcagactttttgagagtgacaacggcgccgacaaatagatccgtacaagcagagcagagcactacgtaaccaattcggacagacccggccagctgcagctgaaattgctgcccagaatgacggcaatatcggtatcagatctacttatgtacataccactttaccaccatgaatattaaggatcaacctgccaaggatcctgccattcagtgcaattgtttttttttttttgggccacgatgaacaatagtctgtagccatcctcaatcaattttttgatttaagctggggagaaatttcagttaaagtctcccacaattgttgaataatttcgcatataagctcggatttaggtcgttggcctttcgcaatgcacttggtggatctctggaccttgggtgccaaaacgaagtctatgttttcgtatcgcccccaagtggagaagcgacttgccagcacttgttttccacggacggctttttagagttttcccagactttctctgctggttgaaaaaaaaactcttagcccagcgactgaacaacagctgaagagccgagaagcgattgcgccaagttctggccgcttttcattcatcgttggacttatttttaaacgattggcggtccgtgtgatatgaatgaatttcgtctgattgacgaatttttggatattgatcaaagagacaaattcagaacgtcattgcggcggttgccaaaacggtgggttatataaacagcagcgaagagtcaataagacatccattcaagtgtccatgggtgtccaactcgatcgacggacgggctccactcctctttcgggccataaataataatcacatagaataaacaacagctagtggtgaaaattggccgcgaaggtcattcctgttttctttttgatatttgtgaatatttctgctgtgggaagtgggcatacgtaccgtacctacatatatacttggctagatgtgtgtttttagttgctgctcgtcaaagagtgccgtgccgccacgccccgcccccacatcacgcccattttccgcagaggcttttatttatgaccacgacatttgcgcattccttcggtgccgctggcgtggctcatcgcgcgggaattttgcacttattagatgaaaaattacagaaaatgtaagaccgctgttatttaattgcgccaattaatttttccgctagaacttgttcgagcaagttgttgaatttgaaagccattaattgcgcgcccagtgggtgggttggcaacgcgatatccactgcttccactcaacataaggaaactaatcatattaatttaaaatcaatttggcacctttttcaataaagcttgtggaagggtagcttcgcacacatgataccgtttagttgtaccatatataatatcataccatattattatctatattgacttcgtgtaacacctgcaagaccatggtggctgagcttagattttaaaatacccgctctaatgaatcgttggcaacgcgatcaacttacagtagttgcagtgagggctcgcagccagtctggcaacgctaccatttgaaagaagaagtttggcttccttccctgaaaaaccagtttaagcgccgatttaagccatttgtgttcttcgttacttgcaggactcaccactgtcctccaaggtggccatgttcaacaaccaggccacgcagcacaagcagtcgcagctgctgaatccattttcccaggacggacgcgccgcctcgccgaaacccactttctcgaaggatcagtatggaaaaccactggccggcagccttacagagatgcgtggccagaaggccaacatccacgtgatgaaggagatgctggagctctgccagatcatcaattcggagggctacgacgtcaaggacgagcccactatgcgtgtgatccccttcggcgaactttttaatgtgagtgtcctgtttacagctggtatatttttcgaaaagccctctaaactggtcacttccactctacagatctataactacatatccgacaaggtggtgggcatcctgctgcgggcccgcaaacacaagttggtagacttcgagggcgagatgttgtaccagcggagggacgatgacgttcccgtctttctgctgaagcccatcaaggaaatacgcagtgagatggaggccaagattgaagacatcaagagggcggctagtccagcgcctccgcagtccacctcggtgctgatggatcgcagtgctcacgaacaaaaactgaagtcgaggactccctcgccggctgtgggcaagtccgccaagtcgaagtcagcgtcgccggcacccaaggctcctgtacctgttcctgcgcctgctgcagaagtcacgcctgtggctgggcccacaacttctgcagaacctgctcctgtggcagagtccactatggcagcagttccagctccgtctacagagcccacaccggcaacagctcctgcttcgagtaccgttgagatcgagccagccaagccagaggtgaccgaacaggcgcccgtggctgtgatagtcacagaagcaccatccacagaagaaaccacaccaaccaccagcgaaccgcaggcggaggaagcacccgctgcagttgcaccggcaggacctgctgatgacttacccacaattgtgattgaagccaccgccgagtttgtacgcaccgtcagcgtggagcagctggcgcccagtcccggaacggccagcgagtcctcgccagaccagtcccaatcccaaccagagtcgacgcccgcttaaggcggaacagggagcttgttagctgggaaggaaggaaggaacatccccttaaatcgtttaaaaggaactctcgcaactactaaagcggcagctttaaattgcagtagtttagtttacggcgtacttagtttaatttacaattagagcaacacaacactgaagacagaatcgagagtaactttttatttattattattacttgtatattattaatggacgaccaaaggagccagtttcctcaatttgttaaccattactctatggaaatgaactacggtttcccactcacaaaagttgggaacgtgcaaggcaataaaatactaataaaataaatacacgtacatagacacaatataaccaagtcctgtttttctagtttcaaaacgattggaagtgctggtttcataactaactaaatgactcattgcctaggcagttttatgtgctctttctcgtagttgttctctgcttttaatctttaattaaaaattcggccgttactatatcaacttttcttcgcgatagttatcgataagtatatcaattgcagggcagcaaagcaaagttaagaggacgaggcgtgggtatcgattaacgatacttcgtaatttcaagcagctgatatcgattggacgacagggctggacctcacaaataaatataaaaccaaaatattcagtggtttctcaatttgaagaataatacaaacggaaaatgtctgccctgcgccgtgatgtgtcgcctttaatccagcgcattcgggccttcctcctgggtgtgagtatccgacatttggacagcgaccgcagagaactcggttctcagttatataagacggaaaatgtgaatctctgattaatctggacgccaattacagcgggagcacaacctggccctgcgcttcgaggacggactggccgatcgcacccagccacagccggaaatccctgacggtccatcgcatctactctcggccaactactactgccagcgggatgga

SEQ ID NO: 6938 - DNA, 1649 bp, DROSOPHILA
gcgtgtacccgctagagatatatacatatatacatataagataataagatatatagcatcacaagcaagttgaatacaaaatagaacccggaacgcaggcattcacagagtatcgctcggttgatagactttttcttgttttttttccgttgtaaaatcaaaaaagaaacgttttcgaaacgtgtgcattttgcattgtgagtggatcgagtagaataaaatcgaatcgaatcgatttggaaacttggaagcccgccccgtcgaggaattccagccagccgaaaagtcaggaataagaggagccacttccgaaaaccccagaaagtaaaaaagagtgttgcggatccagctagcgatcgcaccccccgtccggaccagtcaccgcattcgccaatctgcaagatcccagccagagcccggagcccaatccatccaagccgagtgcagccatgacggacgtatcgcatgaactgggcgccttgcgcttcgtggtgcttcgttacttgcaggactcaccactgtcctccaaggtggccatgttcaacaaccaggccacgcagcacaagcagtcgcagctgctgaatccattttcccaggacggacgcgccgcctcgccgaaacccactttctcgaaggatcagtatggaaaaccactggccggcagccttacagagatgcgtggccagaaggccaacatccacgtgatgaaggagatgctggagctctgccagatcatcaattcggagggctacgacgtcaaggacgagcccactatgcgtgtgatccccttcggcgaactttttaatgtgagtgtcctgtttacagctggtatatttttcgaaaagccctctaaactggtcacttccactctacagatctataactacatatccgacaaggtggtgggcatcctgctgcgggcccgcaaacacaagttggtagacttcgagggcgagatgttgtaccagcggagggacgatgacgttcccgtctttctgctgaagcccatcaaggaaatacgcagtgagatggaggccaagattgaagacatcaagagggcggctagtccagcgcctccgcagtccacctcggtgctgatggatcgcagtgctcacgaacaaaaactgaagtcgaggactccctcgccggctgtgggcaagtccgccaagtcgaagtcagcgtcgccggcacccaaggctcctgtacctgttcctgcgcctgctgcagaagtcacgcctgtggctgggcccacaacttctgcagaacctgctcctgtggcagagtccactatggcagcagttccagctccgtctacagagcccacaccggcaacagctcctgcttcgagtaccgttgagatcgagccagccaagccagaggtgaccgaacaggcgcccgtggctgtgatagtcacagaagcaccatccacagaagaaaccacaccaaccaccagcgaaccgcaggcggaggaagcacccgctgcagttgcaccggcaggacctgctgatgacttacccacaattgtgattgaagccaccgccgagtttgtacgcaccgtcagcgtggagcagctggcgcccagtcccggaacggccagcgagtcctcgccagaccagtcccaatcccaaccagagtcgacgcccgcttaa

SEQ ID NO: 6939 - protein, 399 aa, DROSOPHILA
MTDVSHELGALRFVVLRYLQDSPLSSKVAMFNNQATQHKQSQLLNPFSQDGRAASPKPTFSKDQYGKPLAGSLTEMRGQKANIHVMKEMLELCQIINSEGYDVKDEPTMRVIPFGELFNVSVLFTAGIFFEKPSKLVTSTLQIYNYISDKVVGILLRARKHKLVDFEGEMLYQRRDDDVPVFLLKPIKEIRSEMEAKIEDIKRAASPAPPQSTSVLMDRSAHEQKLKSRTPSPAVGKSAKSKSASPAPKAPVPVPAPAAEVTPVAGPTTSAEPAPVAESTMAAVPAPSTEPTPATAPASSTVEIEPAKPEVTEQAPVAVIVTEAPSTEETTPTTSEPQAEEAPAAVAPAGPADDLPTIVIEATAEFVRTVSVEQLAPSPGTASESSPDQSQSQPESTPA

SEQ ID NO: 6940 - DNA, 4560 bp, DROSOPHILA
tgcctttggatttcccaggccagcaacaaatgtggcggcggatgctgtcggcatttgaattttcgggggcccaaagtgtgcagaaaagtggtggggaggggggcttggggtttggtggataaggaaccccccttacacgttcgtgcgttttgttactggctgtacactcccgacaccattatttctttcatttactcgattttcgtgcttttcatcctttattgttgtttgctcgagtgccgttatcatttgtcggtttattttgcgccatatgtggcctgggataactctcctcgattttccccattgccagcttttccagctttccctgctttcactcctttcggcctcctttttccctttcattcgggctgagaagtgggcgcagtttatgcgctctgctccaatgggaggccgcaggcaaggtaaactcccaggctatcccatcgatggaacaaaataactaagctaacttcacatacctctgcactcttgaaaattgttgaaaagattataatttataagaaactaataaagtcttcgtcttgcccaatcaatttcattaaatcgatgccaacagttaatttccttactgttcagcattatatatttcatttcttaataacaaatatactaaacttgttagtttttcgtgatcgaatatttcttgcagtgtacacgcttgggctcatctgtgcaatttggaattgtgtgggtttttataataactcaaacgtgtgtgagcatttgacctttagcctgcgttccttttgtgggttggcttagttttttgattaacttttagccacctgagaggattagcccaaaaataaggcgaaatcacacgaatatataatgtaaattgaatttggcggttatgcatgacgttgccagatcgtttcacgcaggccaacgagggctgcaacagctgaagtcagctgctttttgtttacatcacgatttcccttttgttgtcattttcctgcgccggtgaaaaacgcacgtttttcccattttcaccgacataaacaaaagctatttatacacgatctgccaaatcggagaggcaacctaagtgcgacaacagaattctttgtcttccgaatccgaatgcgtgcagtgcggtcttcgttcatgtggatgttggccaaaaataagacggcgaccaattaaagcagcagcagaagaggaagaccacgatttattgggcaattgtggccaagaatcccaatggggcaactgcacgcttgtaaacaaacggttaagtcagatagaaagctatttgtgccaggaacacttcacacatatctcgtatcttgcacatcttctagatgattgcttgcaatcggatgccatctgaatgcatagaaggatcaatgggataaccacttaggagaacgacattatcaaaccatcatgatttatgccatcatttagaagttatcaactgatcggcgcggttattatctaaattgaatgaatcacacggaaatactaagatacacgaattgccaagaattcgagtggggtcaacagtacataggtgtgttaacaaccggatctgattaacttgttgcggtgggtgagcaaaatagactagaacccggaacaggactcgttttctctactgctgacaatttaattaatgcttacacgttttcagaggcggccacaattaatttgcacaacaatggactgatgcgaacagttgttagccgatgtctgccaaaaaaaaaaataggtacagcaaaaggaagggcagccgcagcaagaacaacaatcgccagagcagcagcaacaattgcaagaagtgcagcaagtattgcaagtgcaacaccaacaactgcaacaattgccagaggaacagcagcgacagcagcaacaacagcagcagcatgccactgtgccagcccggccatatcaacatttcggctagaattgtgcaaattgccagtgcggctatcgctgcgtatacgtaatattaaaaataggctaacgcccgcccaggctgcaggatgaacaagcgcagcgtcatcatcgcgggaatcgtggccagcctgttgggcttggcgctcggtgccaacttctactttatgtactacctcagcgccgaggagggtcatctggccagcgtccgggcgctggagaacatgatacggcacaagatgcgccacctaaaacccaactacctcaatcgcaatccccgcttcttcatgttccgcaacaagctgcttaagaactacaaggcggcgccgtacgagaacgccagtgtcctctgggacattgcgaactgggtaagtcgatggatcttagtgggtctgccagaattgctatgctcgtgatttatgtttggctgcttatgcaaacaaaataaggaaatgaatttttaataggggaaaacattctatattataatatgcatctaagtatattcactaagcattcggtgactttcagtggccgcacgaaaacgaggtctatcccttatacgactcatcgatgggacagcttttagaaacactgcgccgcgaacctatcacccgggtgagcaacctgggtcggggcacgcaactgaagctcctcgtccgcctttcccaccagcagaaggtgatctttaagccgcaatggtatccgcgggaagaggtcatcgatggcatgatatacagtggcaaggatcgccacacggcggaagtatatgccttctatctgggcgccgtgctcgactttcgatggacgcccatagtggtgggtcgagtggtgaacctgaagaaggagatatatgccaaaggcgatccggaactccagcaaaccataaacatcgaaacggacgaggatggcagggagaagtactgcctgttcgggaagtgtcactactgcaacgaggaggagactgtttgtggcgatgagcggcacaacattgaaggtgtgctcatatatattgttccgggtacgttggctaagcggcgatcaccgtggcaacgcacctacaaggatgacaagcgggcgccctgggaggacgatatgacctattgcaagtgagttccacacttcaacttcactctataaacttctaaatcaaaaatattatttttcagatcgttgaaaaataaaatggagaccatccgcctgctggaccttatagatgcgtctattttcgactacctaatccaaaatggagatcggcatcactacgagacgcgggaagagcgcgtggtgcttatagacaatggaaaagccttcggaaacccgaacaaggatcacttggacatattggcgccactctaccaatgctgcctgtaagtcttcgaccaatttccaaatacctataactatttacgtttataccttacagtctgcgaaagtccacgtgggatcgcctgcaagtcttttccggcggcgtactcacggaaatcatcgatcgactatccaagcaggatgctctctatcccctgattacggataagcataaaaaaggagtggagcgacgacttctggtggtctatgctgttgtggagcactgcatggacatcgagggcgacaaaatgttcaaaactctgtagtttcagctcaagattggggctaatggccagcactagagctttaggaactcactttccacatcctacttaagctaaagttagatagagaaattatcgtattattttagtccatgttttacttctgtatttcttccaaatatttaaatgcccgaaacaggttttttcctattttaaattaagttcttttgtcctttcttgtattggtttgaatgctagaaaagttttcgaaaaattgagatgccatccaattaggaattaaatcatacaaaattcgttgtgacgaaataagtttgaaatttaaacctattaccatgacatttcccacgtcccaattattatttggttttcccatattttttcaatgaccatctcttaaaactgttcttaaatattgaactacaaaccgatccataacaacatatccgatagtctagtttaatgaatagttacggttgttatttaataggtaatattttagaaaattgcaaagctcagaaaaaatagttttgtaacttgaaaagaatttataaacaatcaaaaataaacacttgtttatttcttcatcagtttcatcaatcagttttcgtgttgctcgcattcttactattgaattcacatatataccagttatgtatattttacagacttcgtcacgattgcagttcattttttgccctcttttcttacattactaaatgtaaaaagcttgttgaactgcttgttgttccgattgttgggacggttctaaaaaaaaaaacaagcgttataaatgtttagtgaagagatcgtttcagtaaaagctaagccagcttgttaatacttttcatagcactcaccttgccgcgaatttgctgcttgatttctgtgccccgggctctttgcgctcctcccttgaattgccggaagtccacgttcttgtagtcaaagttgcctgtacccttgtgctgcggaacctgctgactggagctctgcgggtggtttcctcgattcttggccttga

SEQ ID NO: 6941 - DNA, 2107 bp, DROSOPHILA
cacgtttttcccattttcaccgacataaacaaaagctatttatacacgatctgccaaatcggagaggcaacctaagtgcgacaacagaattctttgtcttccgaatccgaatgcgtgcagtgcggtcttcgttcatgtggatgttggccaaaaataagacggcgaccaattaaagcagcagcagaagaggaagaccacgatttattgggcaattgtggccaagaatcccaatggggcaactgcacgcttgtaaacaaacggttaagtcagatagaaagctatttgtgccaggaacacttcacacatatctcgtatcttgcacatcttctagatgattgcttgcaatcggatgccatctgaatgcatagaaggatcaatgggataaccacttaggagaacgacattatcaaaccatcatgatttatgccatcatttagaagttatcaactgatcggcgcggttattatctaaattgaatgaatcacacggaaatactaagatacacgaattgccaagaattcgagtggggtcaacagtacatagaggcggccacaattaatttgcacaacaatggactgatgcgaacagttgttagccgatgtctgccaaaaaaaaaaataggtacagcaaaaggaagggcagccgcagcaagaacaacaatcgccagagcagcagcaacaattgcaagaagtgcagcaagtattgcaagtgcaacaccaacaactgcaacaattgccagaggaacagcagcgacagcagcaacaacagcagcagcatgccactgtgccagcccggccatatcaacatttcggctagaattgtgcaaattgccagctgcaggatgaacaagcgcagcgtcatcatcgcgggaatcgtggccagcctgttgggcttggcgctcggtgccaacttctactttatgtactacctcagcgccgaggagggtcatctggccagcgtccgggcgctggagaacatgatacggcacaagatgcgccacctaaaacccaactacctcaatcgcaatccccgcttcttcatgttccgcaacaagctgcttaagaactacaaggcggcgccgtacgagaacgccagtgtcctctgggacattgcgaactggtggccgcacgaaaacgaggtctatcccttatacgactcatcgatgggacagcttttagaaacactgcgccgcgaacctatcacccgggtgagcaacctgggtcggggcacgcaactgaagctcctcgtccgcctttcccaccagcagaaggtgatctttaagccgcaatggtatccgcgggaagaggtcatcgatggcatgatatacagtggcaaggatcgccacacggcggaagtatatgccttctatctgggcgccgtgctcgactttcgatggacgcccatagtggtgggtcgagtggtgaacctgaagaaggagatatatgccaaaggcgatccggaactccagcaaaccataaacatcgaaacggacgaggatggcagggagaagtactgcctgttcgggaagtgtcactactgcaacgaggaggagactgtttgtggcgatgagcggcacaacattgaaggtgtgctcatatatattgttccgggtacgttggctaagcggcgatcaccgtggcaacgcacctacaaggatgacaagcgggcgccctgggaggacgatatgacctattgcaaatcgttgaaaaataaaatggagaccatccgcctgctggaccttatagatgcgtctattttcgactacctaatccaaaatggagatcggcatcactacgagacgcgggaagagcgcgtggtgcttatagacaatggaaaagccttcggaaacccgaacaaggatcacttggacatattggcgccactctaccaatgctgccttctgcgaaagtccacgtgggatcgcctgcaagtcttttccggcggcgtactcacggaaatcatcgatcgactatccaagcaggatgctctctatcccctgattacggataagcataaaaaaggagtggagcgacgacttctggtggtctatgctgttgtggagcactgcatggacatcgagggcgacaaaatgttcaaaactctgtag

SEQ ID NO: 6942 - protein, 502 aa, DROSOPHILA
MSAKKKNRYSKRKGSRSKNNNRQSSSNNCKKCSKYCKCNTNNCNNCQRNSSDSSNNSSSMPLCQPGHINISARIVQIASCRMNKRSVIIAGIVASLLGLALGANFYFMYYLSAEEGHLASVRALENMIRHKMRHLKPNYLNRNPRFFMFRNKLLKNYKAAPYENASVLWDIANWWPHENEVYPLYDSSMGQLLETLRREPITRVSNLGRGTQLKLLVRLSHQQKVIFKPQWYPREEVIDGMIYSGKDRHTAEVYAFYLGAVLDFRWTPIVVGRVVNLKKEIYAKGDPELQQTINIETDEDGREKYCLFGKCHYCNEEETVCGDERHNIEGVLIYIVPGTLAKRRSPWQRTYKDDKRAPWEDDMTYCKSLKNKMETIRLLDLIDASIFDYLIQNGDRHHYETREERVVLIDNGKAFGNPNKDHLDILAPLYQCCLLRKSTWDRLQVFSGGVLTEIIDRLSKQDALYPLITDKHKKGVERRLLVVYAVVEHCMDIEGDKMFKTL

SEQ ID NO: 6943 - DNA, 3246 bp, DROSOPHILA
gtgcttatgaccagcaagctgataagacacgactttctctggatacccgtgcacacgaatcgaggtcaaagtgcacagtgtcagcagctcacaaagggctgcaactggcaccgtaagtggctttccccagccgtcagggccaatctccaccagcaacaggaaaacccttcgcgctgacctcggggagcgagcgagcgagtccttggcgcggaaagcccaggaaagtgaatgggcacacgtcacttggagtggagcaggggttgcatgcgggcaggggggtaaggggaagcacgggccacaaggacaccaaggagtgcggagcttggtcggggaaaaatcgatggcgagctgctgctgctgaggctgtaattcggaatggattccgaatcggaatcagcaccaaccacccacccatcacgagacttgtggctctcgggccgcaggacgaaggacacggtggcgggcagggcgcgagggatggacaaggacatagcacgattgcgcaaaaataaggacacatcccgcagatgcgatgccaagcaaaactcactgcgattagggagccatggtgcatgagcgcctcgtcgttgaggttcatgggcaggggcaccttctcctggtccgtgggctgtccccgcagttttcccagaattgtcatggctgctcgtatgctgtgttcttgatgcctccgcacgaccaacttgtttgtttttactgaaaatttagtgcgcaattgttgacgagctgaaatctcgatccagacaagccagtgtgaccagttctaattcgcctttcaaaagatgtggacaaaagtgaggcaactctagagtggttgcaaacttggaaaagacgattcgccgcccaaaaattcgaaacttgaatccgaaaaaaaattgtgaggcacaaattgttatcttacaaacgaaaaaacatgatacatttatatttttggagaaaacccaaaacatacaactaaactcccttccaaaacgaattgcttacttgtatcttatggaagtttatttcgctgataacacaatacgttctactggcagttctagggacttttttcaaaaatgcaaatgagtttcttaacatacactttaaacacagaatgattgaaacgttcgcctgcggaagttgggaacctacgacctctggactacacagcggactatgcagaccgctttcgacctttatttctgcactcttacagtctaatcatacagagcagagcgtcctacttatgactatgttggttagagaggaaggcgaggtgacccttgggacacttgttcgcgtagtggcccttgttcccgcacttgtagcaggtgatctcctccaggggcgtgggcaccttgacgaagccgggaccatgcggctgactgtggtgattggattgcatgtcatcggcaccctcgatgtggccggagtgtccagagtagccgcccgagtgtccgccggagtgatccattgcgttgatattgttgcgatgctccaggctgcccacatactgcttgcacgagttggccttgtggcccagctcgccgcaatagtggcacgtgggcagtttcttgtgcagctgatccttacccagttccgccagcgggggcagctcgaagtgcggatgcatgtgcttgcaggacgggccctcggggcagaagccggctaggtagtccatgcacaggacacggcgcagatgctggtgccggcagtggggaccgtggcggcagaagcctctcttgtaccacggacaatccttcaccttgctctgcgggtcgatgtgcaaaaagggacactctttgttgtggcaggcgttgaacctcgagtagaagtagcactcgggcatcttggtcatgtcgtactcgtgcaggaactcgcactggtcgcccttcttgcacagtcctctcagccagtgcttgcacacgatcgtccggtccccgcgaatgtgtcggaagggacaggcgctccctttgtcgcactcctgtccgttcctggtgatgaagttgcagaccgccgcaatggacttgtccatgccgtagaacggcagcgggatggcacccacctgctcgatgaggtcccgctccgccttgaactgcagcccacttacgttggccaaaaggatgtccatctctgacggattcgcggatgctcggatagatgaggaaaaactccgaaatctggtaaacaatgcagtttccttcttctttttttgcgcgtgtttgttgtttcagtgcgaatagtgctgacacgcaaccggcgttatcgatatcgatagttcgcaaggcaagacagtcatggccgtctagctgtttattagccaaatctgtccacttcagggaatagatatttgtatataaatatttttagtctccaaatgtttttaatttataagattagtcatagtaagaaaatacttgtttttatgaccttatttaactaaaccgccattaataacattttagctatttagctacaaaagtaagttgatattggtcagcactgttggcgactaaagtattacatagaaattaagtatccgccccgttagtgttgctgataaaagggcttatctacaatgaacgagccagtttcaaaaatttcacttacacaagagcaacacttgaattgcttcgaaatttaaacattaaacactgagtaaattcgataatgaaccacccccgccgccagaggccgatagtcagctggtatcgatcacttgtttacaacttttcgcaatgtttataacgtaagcaatctgcgtgaaaagccattagttaatttgggagcgaggaactgaaaaatgaggagcgagcgccgctgaagaacccaacccgaccaacaccccacgtagtccacccactccaaaggtcaaatgctgcctacttacgagcgcttcagtgatcccaaaagcgtcctcttccggcttccctttgcgcgactggcactggtggctcttagtttgcccctgggaggcttcttcttctgcgtgatttggtctctgacctttgacttcgttaggagcacctacacccactgcgatgtgaccaactatctgccctccgtctcggcggccattgggaactatgagccccaaaaaaccgtctggagactggccatatttctgcatttaccactccgtttggcagttgccaaaatctacttggagcactatcgggaacacatccgccggagcagaagattgctgggcatcctggcctgcttcttgaacgtcgtggaggatct

SEQ ID NO: 6944 - DNA, 1246 bp, DROSOPHILA
gcactattcgcactgaaacaacaaacacgcgcaaaaaaagaagaaggaaactgcattgtttaccagatttcggagtttttcctcatctatccgagcatccgcgaatccgtcagagatggacatccttttggccaacgtaagtgggctgcagttcaaggcggagcgggacctcatcgagcaggtgggtgccatcccgctgccgttctacggcatggacaagtccattgcggcggtctgcaacttcatcaccaggaacggacaggagtgcgacaaagggagcgcctgtcccttccgacacattcgcggggaccggacgatcgtgtgcaagcactggctgagaggactgtgcaagaagggcgaccagtgcgagttcctgcacgagtacgacatgaccaagatgcccgagtgctacttctactcgaggttcaacgcctgccacaacaaagagtgtccctttttgcacatcgacccgcagagcaaggtgaaggattgtccgtggtacaagagaggcttctgccgccacggtccccactgccggcaccagcatctgcgccgtgtcctgtgcatggactacctagccggcttctgccccgagggcccgtcctgcaagcacatgcatccgcacttcgagctgcccccgctggcggaactgggtaaggatcagctgcacaagaaactgcccacgtgccactattgcggcgagctgggccacaaggccaactcgtgcaagcagtatgtgggcagcctggagcatcgcaacaatatcaacgcaatggatcactccggcggacactcgggcggctactctggacactccggccacatcgagggtgccgatgacatgcaatccaatcaccacagtcagccgcatggtcccggcttcgtcaaggtgcccacgcccctggaggagatcacctgctacaagtgcgggaacaagggccactacgcgaacaagtgtcccaagggtcacctcgccttcctctctaaccaacatagtcataagtaggacgctctgctctgtatgattagactgtaagagtgcagaaataaaggtcgaaagcggtctgcatagtccgctgtgtagtccagaggtcgtaggttcccaacttccgcaggcgaacgtttcaatcattctgtgtttaaagtgtatgttaagaaactcatttgcatttttgaaaaaagtccctagaactgccagtagaacgtattgtgttatcagcgaaataaacttccataagatacaagt

SEQ ID NO: 6945 - protein, 296 aa, DROSOPHILA
MDILLANVSGLQFKAERDLIEQVGAIPLPFYGMDKSIAAVCNFITRNGQECDKGSACPFRHIRGDRTIVCKHWLRGLCKKGDQCEFLHEYDMTKMPECYFYSRFNACHNKECPFLHIDPQSKVKDCPWYKRGFCRHGPHCRHQHLRRVLCMDYLAGFCPEGPSCKHMHPHFELPPLAELGKDQLHKKLPTCHYCGELGHKANSCKQYVGSLEHRNNINAMDHSGGHSGGYSGHSGHIEGADDMQSNHHSQPHGPGFVKVPTPLEEITCYKCGNKGHYANKCPKGHLAFLSNQHSHK

SEQ ID NO: 6946 - DNA, 6330 bp, DROSOPHILA
ccaatgcgctggagagtgtgagtcggatactaattcagaacggggccaagcgaaccgccaaggatctcaaaggacgacagccaagctattacttcatcaacaaagcggacatactacgcctgcaggaggaggaggaggagagccgctgagagatcggattaagcaatatgtatagtatatagtatacaataaagtacaagtatatagaaatccgcttgtacagttgcttgtactttgtatgccaaatttatagctgaaccagtttgtttggcactatgcagattggggtttccgggcatgttggacgtcatatatacaatatacataggcgctatccgttcaagatcaagtttgaagaaaggtttccgataaggtgcttgttcatggcgcccatgctagatgaaacactttcgctatcagtcgaggtgcttcacactttattatctgattccatggggggacggggtctggaacgtctggcccactagtctgaaggatcccacgggcaagcatgatccagataattggcattgccattggccgacgataagatataacttaagcctcggccactgaagaggctcaacagataacgcggcactgagtgacaacagttggctcttggaaatcaatgacgtcttcgaagttctgtgactgcttagaggagccctgcccttctcatgcgtatcgcatccggatttcaatcgctgtaccacccaccacccaccgactgacactatcagtgggccgtagtggaaccgccgctatcgtcattccaattcaaaatcgcgctctcattgttgccctcttccttatcaatatcgtatttgcaaagtgccctgatttggtgtccattaaacgggtatcacttgaaagctgacggcgggttcgattagctcttcaacgaaatgggaggtgttaaccgagctggctgcaggttaggagttgagtttagttttgatctctagcgggtgcggttcaatataagcagtgcgcggatatgacggcggaaacgaatacgggttagtaagggtccttggacgatcctttggatcctagaaaagagaaacttaagtttgtttttttcttttgttattttactttaatcactttccttctttaatttgcttatttattatgaaataaatatttcagagcacttgagttcctaacgattctaaatctcaataaaatattctttagtggaaaacatttagtctatttttaaaatcttttaagtgctttatcagatcatagtctttgatttaagtggtttctgagcaggtggactactttccccagacaaatatatggaggaagtgaaaaacagaacagcagagcgataaggattgttttgggcaatgaagttcagcagtggggagttccagtcccacttaagtgtgttacttatgtgatttatttctgccttaataggtccgatgatcggccaacgtcatttgcagaccttcttgctctttctgtcgattgtggtaaactatatggccaagtttaatgctggagttgcggttgtggcaatgacgaacgccgagaacactaacccaaactttccagtaagtttgaagaggtaccttccaaaatctctaaagtgatttcgttaatttttataggagtacgattggaacgaaatggagcgatcctacatcctgtccagcttcttttggggctacatactgacacagttcatgggcggatggctatgcaggcgctatggagcaaggataacgatgttcgtgtccaccattgggtcagccctgctggttgtgctgatcccatggtgtgtttcctggggcggctggcaagcgtattgtgccattcggatgtccatgggtctgtttcagggtttcctgttcccctgcattcacgcccacctggcgaactggtgtcctgtgaaggagcgcaaccgtctgggagccttggccaacacgggtatcgattgcggtaccttggtggccatgtttgcgagtggattactggcagcctcgagcatcggctggcccggcatcttttacgtttcctgcggtgtgggcgttttatggtgcatcgtctggtggattttcggagccaaccaacccagagaatccaagttcattggcgaagcggaactaaactacattgagacttcgatcaactccagtcgcaaggcggaggaggcagagctaaaggccactggacccattcctgtgccgtggaaggcaatttggacttcagttcccttctgggccttgatggtcactaggtgctgtcagtcctggggatattccacgctccagaccgaaatgccagcctacatgaacggtgtccttttgatggacatgaagagcaatgctctttactctgccctaccatatttaacctcctgggttatggcctttgtctatctaatcatcgcggatatcctgctgaccagaggcatcatgtccatcactggcattcgcaagagtgtgaattcgatagcgttctttgtgcccgctgcagctctgatcggagtaagtttcttggacaatacccagaagaccttggcagttgtgctgatgtgcgccaatgtgggaatcaacgctggttccaccattggtagtaccataaacaccatcgacttgtcacccaatcacgctggcattcttatgggaattgttaatacggcgtctaacattgtgcccattttgacgccccttcttgtgggaatcatcgtcaaggatgatgtgagtataattggagatccccccatagagcaaatgaatcaactgtctgaattttctcgttaacagcacgatcgagagcagtggcaaattgtgttcattatatccgccgttatcttctgtgtgggcaacattgtctacgtagcttttggtaagatggttaatcagccctgggatgcacccgactttatggataagcaacgatcctccaatctccaagaggttggacattccaaggctctggaagcacagggaagtgagaaagtggaggaagcgaagcgcaatgaaagtgagggtatcaaggataactgagcagcaaggacgaaatttgatgtcataggataactaattattctatacctcgaaatcaactaggaattttagtcacggctggtccgaagtagctttaaataagtcaattgtgttcccaatgagtactttaaatatagaaactatacgtgaataatcccatgaccttgtcgatttacctttcggaaacaggcccaccaaggcatcatgtcaactgtttatcaatgaaaacactgattactataagaatttcggagtactgatcgtaaataagcaattgacgtgtgtgttacggaaaaataagatcgatcgcttcttcaattaatttgacatgtgtttcaactaccattgaaatttcaactaatttcgatagttcgataagagggggcaaggcgtctcaagtgttctgttgataagtacgtgggaatattgttgctagtgaaagtatagcacaatatgtttatgacctttgaattggctagcttctcagactttacgctgggctttcccagatgccacagctacagataccaagtaatcaagataacgcattgagctaggtcagtttttcacaagattaaaacgttgattatgagttggtgattagtgggtgttaaattaaacatatcaacgggtggtagtggacttcgtctatctacaaatttgatttacaatactaatcttggactaacaaatgactttcccacttttgccatgatcctaatcgcgtgccacattcgcttaagaatacacatgaacactttgtgttaatacgcacgcgtttgagccttatcacaggataatcagcctgattagctagaagttgataaacaactcgtacgattgaaatcgcagcaaggtgcgtttgactcgagttcaattccattctattctaccatttcgaaggcagaaggtcaattttcgatcaacactacaaggatgacagctgaaataaataaaggtatgggaaaaatatattcttttgtattcgggtaagttcatgcattccttttttcatttaacgttcgctaaatatgaactgttcgaagtgaacgatggactttatccggtagtacatacttgggttaggtccattaataaaccaaacctttaaacccttgccaaacagtgtgatttatttaaattttttgctgactagttcgaagccaaaagctaacgagttttcttaatgactgcaggacccctgctgggaatgcgacacgttcaaaccctattgctttttttcaacatcacgtgtttgtacatcggtcgactgaatgtgggagtagccgtggtggcgatgacaaacgccgagtcaactaatcccgattttccagtaagacttttaataactccttaactctttagtcaataactttcatcactttttttctcaggaatacgattggactctgacccagaagtcgtacatattatccagcttcttttggggatatatcatcacccagttcctgggcggatatctgtgcaagcgttatggagtcaagagtgtcatgctctggggctcctttgcatcgggtatcttcagcgctttgaccccgctcttcatcggatttggtgaatggcaagcctattgcggtattcgagtcctgatgggatttgcccagggcctgatctttccctgcatccatcagcacttggccagatggtcaccgccggcggagaggaatcgcttgggtgccctcagtcacacaggaattgagtgtggcaacgtgtgtgccatgttcttcagtggaatgatagccaaaagtgccattggctggcctggaatatcgtatgtctctgcaggattagccttagcctggtgtgcattttggttcgttttcgctgctgacaatgcagaggaatctcgttacataacccaggaagaactccactatatcgaatcgtctctgaagcacaatgaggactatcacaagaccgtaattcccgttccctggatggcgatttggacctcggcaccgttttttgctctcatggtggcgcgttgctgcgaaacctggggtctgagcaccctccaggcccagatcccaacgtatatgaacggggttctggacatggacatgaaaagcaatgcattcttttcggcgttaccatttctggccatgtggattatgtcgtatgtgtatttgataatcgctgatgttctgctcgccggaaacaggctgagtttaacggctctcagaaagatcttcaactcgttggccttctggattccttgtgccactttgattggaatcggatttctggatcaggaacagaagaacctggccattgctctgatgaccatcagtgtcggtgtcaacagtggagcaacaatcggaagctccttgaacaccatagatctatccccgaatcatgcgagtattcttatgggtattgtgaacacggctgcgaatgtagtgcctatagtaacccctctggctgttggacttattgttcatgaagacgtaagtttgcactgttaatgtttataataaagtagtcatactatttttccttcagaaaaaccgtgaagaatggcagatagtgtttataattgcggcagtaattttctttatcggaaactgtgtgttcctgtattatggaacggctgtttcacagccctgggatgctgaagactacctcacagaaaaggtaccagacctagctatagctccagctatccatgaagctggtaaaggcattgatggaccttctcagaagtcgatgatattaaagttccactagatcgatagcacttaagtctccagtgtacatagaaactatttaaaacaatcaaataaaaaaaaaatcacctgacgtggtattagataaggcaaattcggcttatcagctaattcaacttgaatttaaattcatattaagttcgcgggctcactcactcaccttcccacagttattccgatcggtcgttttaaagaagtgaagaagtgttttgttgaccaattcaaaaatgacggccgagacaaacaaaggtgtgtaaaaggaaatccttcgattcggataagagtttgtgaatgaaatgacaccccacgaacttgacacagttgaaaacccctccatggatcagaccttgcactccatctgaaaatttcgggctttccgcacgcgcactcaactcatcataaattacttcaataatggcgcgataaccgagtctcaagagcaattcagatttattttcccacctgtactatgtaggcagaaagtagcagctttaataccagttcgttttgttattgcaggacccgttctgggaatgaggcatgtccaggcgcta

SEQ ID NO: 6947 - DNA, 2379 bp, DROSOPHILA
atgacggcggaaacgaatacgggtccgatgatcggccaacgtcatttgcagaccttcttgctctttctgtcgattgtggtaaactatatggccaagtttaatgctggagttgcggttgtggcaatgacgaacgccgagaacactaacccaaactttccagagtacgattggaacgaaatggagcgatcctacatcctgtccagcttcttttggggctacatactgacacagttcatgggcggatggctatgcaggcgctatggagcaaggataacgatgttcgtgtccaccattgggtcagccctgctggttgtgctgatcccatggtgtgtttcctggggcggctggcaagcgtattgtgccattcggatgtccatgggtctgtttcagggtttcctgttcccctgcattcacgcccacctggcgaactggtgtcctgtgaaggagcgcaaccgtctgggagccttggccaacacgggtatcgattgcggtaccttggtggccatgtttgcgagtggattactggcagcctcgagcatcggctggcccggcatcttttacgtttcctgcggtgtgggcgttttatggtgcatcgtctggtggattttcggagccaaccaacccagagaatccaagttcattggcgaagcggaactaaactacattgagacttcgatcaactccagtcgcaaggcggaggaggcagagctaaaggccactggacccattcctgtgccgtggaaggcaatttggacttcagttcccttctgggccttgatggtcactaggtgctgtcagtcctggggatattccacgctccagaccgaaatgccagcctacatgaacggtgtccttttgatggacatgaagagcaatgctctttactctgccctaccatatttaacctcctgggttatggcctttgtctatctaatcatcgcggatatcctgctgaccagaggcatcatgtccatcactggcattcgcaagagtgtgaattcgatagcgttctttgtgcccgctgcagctctgatcggagtaagtttcttggacaatacccagaagaccttggcagttgtgctgatgtgcgccaatgtgggaatcaacgctggttccaccattggtagtaccataaacaccatcgacttgtcacccaatcacgctggcattcttatgggaattgttaatacggcgtctaacattgtgcccattttgacgccccttcttgtgggaatcatcgtcaaggatgatcacgatcgagagcagtggcaaattgtgttcattatatccgccgttatcttctgtgtgggcaacattgtctacgtagcttttggtaagatggttaatcagccctgggatgcacccgactttatggataagcaacgatcctccaatctccaagaggttggacattccaaggctctggaagcacagggaagtgagaaagtggaggaagcgaagcgcaatgaaagacccctgctgggaatgcgacacgttcaaaccctattgctttttttcaacatcacgtgtttgtacatcggtcgactgaatgtgggagtagccgtggtggcgatgacaaacgccgagtcaactaatcccgattttccagaatacgattggactctgacccagaagtcgtacatattatccagcttcttttggggatatatcatcacccagttcctgggcggatatctgtgcaagcgttatggagtcaagagtgtcatgctctggggctcctttgcatcgggtatcttcagcgctttgaccccgctcttcatcggatttggtgaatggcaagcctattgcggtattcgagtcctgatgggatttgcccagggcctgatctttccctgcatccatcagcacttggccagatggtcaccgccggcggagaggaatcgcttgggtgccctcagtcacacaggaattgagtgtggcaacgtgtgtgccatgttcttcagtggaatgatagccaaaagtgccattggctggcctggaatatcgtatgtctctgcaggattagccttagcctggtgtgcattttggttcgttttcgctgctgacaatgcagaggaatctcgttacataacccaggaagaactccactatatcgaatcgtctctgaagcacaatgaggactatcacaagaccgtaattcccgttccctggatggcgatttggacctcggcaccgttttttgctctcatggtggcgcgttgctgcgaaacctggggtctgagcaccctccaggcccagatcccaacgtatatgaacggggttctggacatggacatgaaaagcaatgcattcttttcggcgttaccatttctggccatgtggattatgtcgaacagaagaacctggccattgctctga

SEQ ID NO: 6948 - protein, 792 aa, DROSOPHILA
MTAETNTGPMIGQRHLQTFLLFLSIVVNYMAKFNAGVAVVAMTNAENTNPNFPEYDWNEMERSYILSSFFWGYILTQFMGGWLCRRYGARITMFVSTIGSALLVVLIPWCVSWGGWQAYCAIRMSMGLFQGFLFPCIHAHLANWCPVKERNRLGALANTGIDCGTLVAMFASGLLAASSIGWPGIFYVSCGVGVLWCIVWWIFGANQPRESKFIGEAELNYIETSINSSRKAEEAELKATGPIPVPWKAIWTSVPFWALMVTRCCQSWGYSTLQTEMPAYMNGVLLMDMKSNALYSALPYLTSWVMAFVYLIIADILLTRGIMSITGIRKSVNSIAFFVPAAALIGVSFLDNTQKTLAVVLMCANVGINAGSTIGSTINTIDLSPNHAGILMGIVNTASNIVPILTPLLVGIIVKDDHDREQWQIVFIISAVIFCVGNIVYVAFGKMVNQPWDAPDFMDKQRSSNLQEVGHSKALEAQGSEKVEEAKRNERPLLGMRHVQTLLLFFNITCLYIGRLNVGVAVVAMTNAESTNPDFPEYDWTLTQKSYILSSFFWGYIITQFLGGYLCKRYGVKSVMLWGSFASGIFSALTPLFIGFGEWQAYCGIRVLMGFAQGLIFPCIHQHLARWSPPAERNRLGALSHTGIECGNVCAMFFSGMIAKSAIGWPGISYVSAGLALAWCAFWFVFAADNAEESRYITQEELHYIESSLKHNEDYHKTVIPVPWMAIWTSAPFFALMVARCCETWGLSTLQAQIPTYMNGVLDMDMKSNAFFSALPFLAMWIMSNRRTWPLL

SEQ ID NO: 6949 - DNA, 4196 bp, DROSOPHILA
aaaaaaaaaaaatgttatgaatttacttcatacaatgctgtcaatgaaaattaatattattagtacttacttagacataataataatatgaaataataaagagtttacaactatattgaactaagtgaacttcagttcgttcagtttggtgaatagttcaatttagttcgttcgtttacgaacactagtatggtgtgatggctcttgccgtactggaaacaattggtaaagctgagagcgtcggccggacggtcagagccatgtgaaaaaggaatatttgaaatggacgctgttgcatcgatggttttctggttaaggttaaggtttactacgcacgtttcatttacctacagaagcacttacttctttcagtcagttgcgggaaaccgaaaataaagcttgtttttaatatatatatagtaacatatccataagtccctatgacttaagaacatgcctacacactaatacacacacaacatgtacaaccaaatacaccctacactactccggatatacccaacagataccagataagaataagactaccatatgtttctcgagagtggaaaaaccccaactctagataagtcacccactggtagactaaacatccatcccctcaccccatcgttataagaatctaagagcacttgtatccaagagcgaatgcacttctaagagaaacgcaaagccctttctcttcatgatcagaaccctaaagtctaaagtccatatcagaaaagctcgataccgaggcttgaacgtcaatcagatcagagtatgaagttaagtttagtttgagacctaattgtaattggtcggtcttcttcgaaaatctaaatattgtaatcatttagtaaaataaaattatattttttttcacatataaatattgcaaacatttaattatattgtatataattaactgcagggtctgattagcttcagcatgcagttgagaactttataaccaatcacttttttaaatcattgataggctacgtcaatttccaatcacaattacccggtagaagagcatacagtcatcacccatgatgactacatccttactatttaccgcatcccatcatccccaaaccgaagtcatctaaatagagctgggcgaagggctgtagtgtttttgcaacatggcatcctgagtgcttccgacgactggattataaacggaccagaggcgtctctggcctacatgcttgcagacgccggctacgatgtctggctgggcaatgcacgtggcaacacgtactcacggcagcacaagcatatccatccggacacgtccgacttttggcgtttcagctggcacgagataggtgtctatgacctcgcagccatgctagactatgcgctggcgaagagtcagtccagctctttgcattttgttgcacactcgcagggtaccacggcgttctttgtacttatgtcttctctgcctttgtacaacgaaaagttgcgttccgtgcacctattggcgcccatagcttacatgcgtgaccactcttttattctgtccaagctgggtggcatttttctgggaacgccgtcctttcttagctgggtattaggaagtatggagctgctacctattactaatttacagaaactgatatgtgagcacatctgttccagtagctccatgtttaactttctgtgctctggtctgctggacttcatcggagggtggggaacacgacacttgaaccaggttagtggccatatggatcttaaatgatcgtaccttgttaaatagtcttgacaccctgtagactctgttgccggacgtttgtgcaacacacccagcaggggcatcttcgagccaagtaatccactacctccagctttacaggtcaggcgacttccgacagtatgatcatggaccggagctaaacgaaatcatttaccagcagccaacgcctccatcttacaacgttcaatacattaagagctgtgtggatatgtactacagcgaaaatgactatatgtccgctgttggggatgtgaagtatctggcctcactcctaccatgcgcccaactataccgtattccattcagagactggaaccattacgattttttgtggtccaacaatgtaaaggaggttattaataataagataattcagaagattcgtaaatacgatgaagatggtgtaggtttctagtatcttacgaattgtttgatatgtatatgaattacgttttaaaggaaacccattttattttcatatgtataaaagcggtgttttattgttaaggttcatcataggttggatcctcaatttaaaattgattttagaaacatatgtattattcttacaactatggcgtttatcggtgacagcgacgcgagcagcaaaatggagtttcacttggtaaaactgtgggaaaaaacatggccgttaagcagtttgcagtacctaagaatgtgaaagctgttcaatcctttttcggtctaacgggattcttcaggaagtttgtaagagactatgccatcattgcgcgacctttaaccaatctattaaaaaaggatgccaccttcaaattggagtctaaagaatacgcagctattgagaatctgaagagtgaattgtgtgaagaatctattttaaggatttattgtagaggtgcatcaacggagctgcacttagatgcttcaaagaacggatttggggccacattgctgcagaatattgaaaatcaattgcaccccttattttattggagcaaaaaggcgagtccaagtgaatcaggaagacacagttacattttggaagtaaaggctgcttatttagctatgaataaatttcgccattatttacttggagttccgttcaagctagatactgacggttgtcaataacatagcgcttacgcagaccatcaagaagaaagacgttcctcgcgaggtagcagaatggattttgtatatggcagatttagacttcaagacagagcatcgtgcgggtgagagaatgcgtcacgtggactgtctcagccgttatgtcaaagagattttttttttatatcgtctaagatatcttgtcggttgaaggctgcccaacaaaaagatgaatatattcaggccatactcacgatattggaagaacgaccttacaacgactttaatctgaagggaggagttttgttccagtttgtcgaaggaaatgattagcttgttgtacttaaaataatggaacgtgagattataagcgaagctcatacaacagcagttttggattccacacccagagagcacggtcgcaaagcttaaaaacgcgtgtatttcgtgcattattacgaacaaaaagctgggcaaacaggatggacttttatgctgcattgagaaaggtggatggactcgtctctgaaactatataagaacatcttcgcacttgttgatggatttttgaaattagtgtggatttttgctacaaaatcaacttgagctgacgaagttttgaaaaaatggaagaatggtcaaacgtatttggtaatccgagcagaataataaccgacagaggagttgcgtttactttaggagcatttgaagattacctcaagagaaatggaatcgagcacgtcttaacaacaactggagttgccagaggaaatgggcaggtagagagaataaataggtctatcttgtctattatttctaatttataggctgaagattcttcaaagtggtataagttcacatcacaagtgcaaagagctattaattccttaatttaatttatttaagttgctctaaaaagaagtcaccatttgagattatgtttggagtaaaaatgcagaataagtctaacgccagactattgaaacttttggaaaatgaaatgcttgaagaatttgacaaagagaggcagatattacgacaagcggttaagggacaaatactaaaggctgaagatgtttttaaaaaacagtacgacaagaaacttaaagaagaagttgtatacaaagaaggtgatcttgtagcagtaaaacgtactcagtttgttgctgggaaaaagttgacaagcgcttttctaggaccttttgaagtaataagatatgtagttcgtaaagctgtcaaaggagaaggccccaccaacaagacgcatacgagtgctgataaaatgaagctatggaagtatgctcagaataatgaggatgacttatcgtctggg

SEQ ID NO: 6950 - DNA, 1242 bp, DROSOPHILA
gctacgtcaatttccaatcacaattacccggtagaagagcatacagtcatcacccatgatgactacatccttactatttaccgcatcccatcatccccaaaccgaagtcatctaaatagagctgggcgaagggctgtagtgtttttgcaacatggcatcctgagtgcttccgacgactggattataaacggaccagaggcgtctctggcctacatgcttgcagacgccggctacgatgtctggctgggcaatgcacgtggcaacacgtactcacggcagcacaagcatatccatccggacacgtccgacttttggcgtttcagctggcacgagataggtgtctatgacctcgcagccatgctagactatgcgctggcgaagagtcagtccagctctttgcattttgttgcacactcgcagggtaccacggcgttctttgtacttatgtcttctctgcctttgtacaacgaaaagttgcgttccgtgcacctattggcgcccatagcttacatgcgtgaccactcttttattctgtccaagctgggtggcatttttctgggaacgccgtcctttcttagctgggtattaggaagtatggagctgctacctattactaatttacagaaactgatatgtgagcacatctgttccagtagctccatgtttaactttctgtgctctggtctgctggacttcatcggagggtggggaacacgacacttgaaccagctgttgccggacgtttgtgcaacacacccagcaggggcatcttcgagccaagtaatccactacctccagctttacaggtcaggcgacttccgacagtatgatcatggaccggagctaaacgaaatcatttaccagcagccaacgcctccatcttacaacgttcaatacattaagagctgtgtggatatgtactacagcgaaaatgactatatgtccgctgttggggatgtgaagtatctggcctcactcctaccatgcgcccaactataccgtattccattcagagactggaaccattacgattttttgtggtccaacaatgtaaaggaggttattaataataagataattcagaagattcgtaaatacgatgaaatatcttgtcggttgaaggctgcccaacaaaaagatgaatatattcaggccatactcacgatattggaagaacgaccttacaacgactttaatctgaagggaggagttttgttccagtttgtcgaaggaaatgattag

SEQ ID NO: 6951 - protein, 342 aa, DROSOPHILA
MLADAGYDVWLGNARGNTYSRQHKHIHPDTSDFWRFSWHEIGVYDLAAMLDYALAKSQSSSLHFVAHSQGTTAFFVLMSSLPLYNEKLRSVHLLAPIAYMRDHSFILSKLGGIFLGTPSFLSWVLGSMELLPITNLQKLICEHICSSSSMFNFLCSGLLDFIGGWGTRHLNQLLPDVCATHPAGASSSQVIHYLQLYRSGDFRQYDHGPELNEIIYQQPTPPSYNVQYIKSCVDMYYSENDYMSAVGDVKYLASLLPCAQLYRIPFRDWNHYDFLWSNNVKEVINNKIIQKIRKYDEISCRLKAAQQKDEYIQAILTILEERPYNDFNLKGGVLFQFVEGND

SEQ ID NO: 6952 - DNA, 3211 bp, DROSOPHILA
atcactttgtaatttatataaatgaatatatatatctccttatgcttactatcatacgtatccttctcgcagtcgctttaactctattgcttttccaactctgcgtttaagtttatcccattttttgttgtaatgcgttttgtattatgtttacgtttagaagaggaggcttcttatttttatttgttacgtcgccaggacagaaaaagcaactgcaaacgatcatgaataatatatataacaagtatatacaagcggtatgatttataacacatagtgcatatgcaacaccacacgatcatacgcgcgtacgcatattcaaaacatcagcatattcacctaaagccgtaaagtttaaaccaaatgaacattagaaacgcaaacgagaatctaaaacacagatcggagcaggagaccgatttcgcctacgataatgcaaatgcaacggacatagcaaaccacatacgatcagagaaaatatgcaaacacatacatacatacataattgttattgttgttaaaagcaactaaaattgtaatagaaattatgcaaatatacatacgaatatgacgacaaatgttaattgcagcctagttattattttgttcattcacacccacatcggaacggaacctaagatatagtcttaaataaagagagagtgcagccagcagatccgcacggactaggcctagatctagaccttgttgacgatgcttctacagccacaagacacacgaaacttgaacacagccctatttgtattgattttgaacattgaacacactgcatgtaaaccccatacacatatatgtaaacgtacgaaagtactgtgcatcattatgtattgctgattatcgttaaataaatttccaatttgaatttcccagactcattattacaaattgagtcgtgagcgtacagcaagcaaaccgcatcgttgtggtaaataacaaatcatttaactttattggctaacaaatacaggacactcgctctctacaaggccttcacgagctgcatcagcgagtaggggttcttgttgctcatgaacttgagctgctcctcgaatccctgcggcgtcttgttgatccagtgtcggtcgagatagtagctgatgtagctgtggaattccttgtccgtgtagttttccacatggatgggcacaaacggatctagatgctcgaagccctccttgccgagcagatagcgcggcatataggagtccatgtggccctcagtcattgcgatcttgtccacggacaggatgcatactccgtttgtccagtcgtagttggtgatgtcgaggaagggctgtgtgagcgtgacccgatccggagtcacgagctgcttgttgtcggagaaaatgcgagtaaccggatggaagaaggcattgaagccatcaatggccaccattactttgcactgtccagcggtggagagttgtttcagttccgcaattagcgccgccgtggtctccgaggcgtacttgatgcgtgctatcccatgttccacaagctcaattaacgaggaacccgccggcgtgctctcgcgcttgctccacacgtactccttgctggttttcagctgcaaccgctggagcagcggtccattctgagtcttgaagtgcaccagccaggcagcagcgtcaaatggcaggtcaatcatgccctcctggccggcggcattggacgcctccttgggccgcttcatccagttgggagcccagggcacgtggaccagcaggaagtcgttgagggcaccgtagtgcaacacatgagccatggtcagcgtcttgcctgtgccgttctctccgtagagcacataacgaaccaccggcttggtcaggtcaccgtctttgatgtactgcaacagttccagggccgggttccggaccatcagacaggcttcggtgaacgttttgatctgctgctcatactgtttaggcagcccgccgccggtgaagatttgctttttctgctccgcgggaatagtgtagaacttggccacctgcatcgccgaatgctcgccgggattggataccgccgtacggaactcactaatcgtcgctccctccgccggcgaggctgcggcgttcgtggacatttgctggacatggcgctgcagctgggcggagacacgcgacaggctgccaaagcgattccggatcattttcatagagaattcgctgaaagcttgttaaataagacctggaacctgcgacctggtgggtatcggcacttggtgactatcgataacgaaccggagatggcagctaatcgcccctcatccacaaataatcggcaggtataacgaatttataaagattttttattataaagaaatcattattgtttaaatataagcaaataatgaagattaaatataacaatttataaagatttcatattataaacatattattttacattaatatggtgacatattccaatgattattattttacatattcacattgcaatggctgatacatcagacacaataactcgcaccattttcatttactgtatattcaacgaaataataattcattcaaaagcgcttgtaaattgtcttgactctacaaacactaacatgaaaatgacgcgaaatgtttcttaaatcaacacagatattcctggatcaatatcttaaagagttttacttgatgccgacatattgtgcattataatttatttattaatttatatgaatatatcaatctcaaaattaagcttagctttatttagttgagtatattttaatatatatttaatatgtagagattctctagatttctctactagagtataataacggatcgtagaatcatgaataccccaactataagcatagtaaaaatccgcgacttaacaatcgatagatttcgatagattggttgaagttttactgcatccctctagcccggcaaattgcgcctttgatgaaattgtattaaataggaagaggctgcgagatgtcgtcaattgaatcgctgtccatccagggaatacggagtttcggcacctatgccgacgatcttcagagtataaagttttcctcgccggttaccctgattctgggcgagaacggatgcggaaagacgaccgtggtagagtgtctcaagtacgccttgaccggcgagtgtccgccgggcagtgatcggggcaagagtttcgtccatgaccctaagatctttgggctaaacga

SEQ ID NO: 6953 - DNA, 1211 bp, DROSOPHILA
gtcttatttaacaagctttcagcgaattctctatgaaaatgatccggaatcgctttggcagcctgtcgcgtgtctccgcccagctgcagcgccatgtccagcaaatgtccacgaacgccgcagcctcgccggcggagggagcgacgattagtgagttccgtacggcggtatccaatcccggcgagcattcggcgatgcaggtggccaagttctacactattcccgcggagcagaaaaagcaaatcttcaccggcggcgggctgcctaaacagtatgagcagcagatcaaaacgttcaccgaagcctgtctgatggtccggaacccggccctggaactgttgcagtacatcaaagacggtgacctgaccaagccggtggttcgttatgtgctctacggagagaacggcacaggcaagacgctgaccatggctcatgtgttgcactacggtgccctcaacgacttcctgctggtccacgtgccctgggctcccaactggatgaagcggcccaaggaggcgtccaatgccgccggccaggagggcatgattgacctgccatttgacgctgctgcctggctggtgcacttcaagactcagaatggaccgctgctccagcggttgcagctgaaaaccagcaaggagtacgtgtggagcaagcgcgagagcacgccggcgggttcctcgttaattgagcttgtggaacatgggatagcacgcatcaagtacgcctcggagaccacggcggcgctaattgcggaactgaaacaactctccaccgctggacagtgcaaagtaatggtggccattgatggcttcaatgccttcttccatccggttactcgcattttctccgacaacaagcagctcgtgactccggatcgggtcacgctcacacagcccttcctcgacatcaccaactacgactggacaaacggagtatgcatcctgtccgtggacaagatcgcaatgactgagggccacatggactcctatatgccgcgctatctgctcggcaaggagggcttcgagcatctagatccgtttgtgcccatccatgtggaaaactacacggacaaggaattccacagctacatcagctactatctcgaccgacactggatcaacaagacgccgcagggattcgaggagcagctcaagttcatgagcaacaagaacccctactcgctgatgcagctcgtgaaggccttgtag

SEQ ID NO: 6954 - protein, 392 aa, DROSOPHILA
MKMIRNRFGSLSRVSAQLQRHVQQMSTNAAASPAEGATISEFRTAVSNPGEHSAMQVAKFYTIPAEQKKQIFTGGGLPKQYEQQIKTFTEACLMVRNPALELLQYIKDGDLTKPVVRYVLYGENGTGKTLTMAHVLHYGALNDFLLVHVPWAPNWMKRPKEASNAAGQEGMIDLPFDAAAWLVHFKTQNGPLLQRLQLKTSKEYVWSKRESTPAGSSLIELVEHGIARIKYASETTAALIAELKQLSTAGQCKVMVAIDGFNAFFHPVTRIFSDNKQLVTPDRVTLTQPFLDITNYDWTNGVCILSVDKIAMTEGHMDSYMPRYLLGKEGFEHLDPFVPIHVENYTDKEFHSYISYYLDRHWINKTPQGFEEQLKFMSNKNPYSLMQLVKAL

SEQ ID NO: 6955 - DNA, 2966 bp, DROSOPHILA
ctgggccactggcacacggacgcaggacgcaggcgcccggagagaccgcatcctttgcctttggcttctgctttggcacacagacggcgtgaaaatggcccacaattaatatgcacaggcgtcgccgatgacgagctagtcattgatagattgtcgtagtgaaatgcaaattacttgtcaataattgccccacaactggccatagaaatgcgaattatgaggcataaagggatggatttacaacaaagtttctaccgatatgaccaaactagttattactttaatttccttctgcttaaactctgaatataatccagaatggctcctgtacaatatttattctttaatcatgagctgcaactagtagtggtggtatgagcaatccaaatttttcggatcccctattaactaattcatgagctaaaaagaacgccgcccattttgggcaccataattgcccgtcagatatcgaaattaataatgcgcaccatactggtgggtggtgtccagacgggaaaggcaatacaaaaaatatttatttatgcgaattccagtttcgcgagggtcgtaaatctatcgccaccctcgcaactgaagctgttggtccgagtatttatgacgcgactattacatactgtattattattattaatgccgcgcacaatggagtgctgccagttggtcgggcatataaattctagtcacccccggccaaggactcatcgcaagtggcatatcgacaggcttaattcaattcaattgggcttaaatacgagtagggggacaaattaattaattttttaaagcctacttaaaaaccatttgtagttgtgaagatgaactgtttattgctttgactagccatatatcatctatacacattcgtatgtattatagatttgttttcgcatttttgggattattaagccgtgaaaatggtaattttctggcctcgtactgattgacttcagagtagatgggctcccttctacagtcaacaatgttttcgatcagagtgtggttcatctgcctggtgatagttaccctcaactcctttcccgcctactcctgggattattgccaagagcactggtgtccgcgttccaccgaccacgtagcgtgcaacaacaacggggtaagtggtatatacgtatacgtacgaattcctatacggatcctcataaaataacaaatgccttatacgatccagacgtttggcctcgattgcggaagggaggccaggctaatcccgctcagcaatcagttgcaggcgttcattgtgcaccaggtaaacttctatcgcaaccaggtggcttcgggcggactctccgccttcggacccgcccgccgaatggctagtgtccgctgggatcccgagctggcacagctggctgagctggcggcaaagaggtgcagtttgtccggcgatggatgccgcaacaccaggcgattcaagcacgtgggccagctgacgggccacgtaatcttcagtgcgggaaagcacagcgacttggagctgctgcgccacaagatctcgaattggtttggccagtacatgagagccagcaaggatctgcaagccgccgatccatcaagcaacatcagcagcttccggcagttgatacaggaaagctccacccacatgggatgcggcgtgctccgccagaggagccacatgctgtggcaccagcagttcatcgtctgtaactttgcccgtaggaatatgccccgcgagcaggtctaccaggtgggcgtggctgccacaggatgcaggtcgggaaggaatcctcgctatcccaatctctgcgctctgcaggaagaatacgatgtgaacgccgtcgaccgttttcactcaaagcggccacttaggataaggttcaagtacagcgcatcccatccatcgaaagttttgggtgctgatcgtgatgtagccttccatcccaatatcaagttgggacgtctttaatatatctggagctgagtgggtactttcttaaatatatttcaaatgtaacttccactagattaaaatgctttacattttctgtttggcgattttacaagattgactacaagaacttagacggtactaggtactgggcgacacctagtggggattctcctggcgattgggctcgatggtgacgcgggcgtagggactgccggcaccgaccttgcgccgcatggtgactccccgatggggtctcagtcccatgacgatcaggtagatccccgcggcgctgagggcgatcagtgagagcaccaccaggccgtaggcccatctcggccaggtgtcgcagctgaaggcgtcgccgcgggctgaggtgaccagcatgccacggatgcgggccggcttgtagcagcgcccgttggtttggaccggcagctgcttcagccagacgagctcgcagtcacactgcagcggcagaccgttgagatccagttcggcaagctgagtaaaaatcggcgccagcgtggaattaaaggtgcgcagcatagtgccgcgaaagctcagcgaccgcagagctctttttttggtgggggtggtcatgatgggtccaaaggcctccgcgtccaagtggctaagctgacggctgttctggaagctcaatgtctcgaggacatctacgtgggtcagggaattggccaccaccctctggagcaccggcatgtcctcgataaaaagttggcgcacctgggtgagattagccgtgtcctccggcagcagctcctccagcagattgtcgctaatgtctaggcggagtaaagtctccggcagctgtgtgggaatccgcttcaactggtttcgacggagggaaagctctttcagaggtgcatttacgggcaggtgaagatcatttaggctacaagcgtccagtcttaaggtggagagtttccagttcaccccgagtccggtgtatagatccccgccagactcgttgaagcgtcgattccaagagatgtcc

SEQ ID NO: 6956 - DNA, 891 bp, DROSOPHILA
atgttttcgatcagagtgtggttcatctgcctggtgatagttaccctcaactcctttcccgcctactcctgggattattgccaagagcactggtgtccgcgttccaccgaccacgtagcgtgcaacaacaacgggacgtttggcctcgattgcggaagggaggccaggctaatcccgctcagcaatcagttgcaggcgttcattgtgcaccaggtaaacttctatcgcaaccaggtggcttcgggcggactctccgccttcggacccgcccgccgaatggctagtgtccgctgggatcccgagctggcacagctggctgagctggcggcaaagaggtgcagtttgtccggcgatggatgccgcaacaccaggcgattcaagcacgtgggccagctgacgggccacgtaatcttcagtgcgggaaagcacagcgacttggagctgctgcgccacaagatctcgaattggtttggccagtacatgagagccagcaaggatctgcaagccgccgatccatcaagcaacatcagcagcttccggcagttgatacaggaaagctccacccacatgggatgcggcgtgctccgccagaggagccacatgctgtggcaccagcagttcatcgtctgtaactttgcccgtaggaatatgccccgcgagcaggtctaccaggtgggcgtggctgccacaggatgcaggtcgggaaggaatcctcgctatcccaatctctgcgctctgcaggaagaatacgatgtgaacgccgtcgaccgttttcactcaaagcggccacttaggataaggttcaagtacagcgcatcccatccatcgaaagttttgggtgctgatcgtgatgtagccttccatcccaatatcaagttgggacgtctttaa

SEQ ID NO: 6957 - protein, 296 aa, DROSOPHILA
MFSIRVWFICLVIVTLNSFPAYSWDYCQEHWCPRSTDHVACNNNGTFGLDCGREARLIPLSNQLQAFIVHQVNFYRNQVASGGLSAFGPARRMASVRWDPELAQLAELAAKRCSLSGDGCRNTRRFKHVGQLTGHVIFSAGKHSDLELLRHKISNWFGQYMRASKDLQAADPSSNISSFRQLIQESSTHMGCGVLRQRSHMLWHQQFIVCNFARRNMPREQVYQVGVAATGCRSGRNPRYPNLCALQEEYDVNAVDRFHSKRPLRIRFKYSASHPSKVLGADRDVAFHPNIKLGRL

SEQ ID NO: 6958 - DNA, 3789 bp, DROSOPHILA
ccaacagctggcagcgaaacggcagccacgcccctttttttggggcctgcactttatttcggttcacttattatgcaatttactttcgggggccggaaagtttcccgcccatttaaactttaattacttacagacattgccttgaaatggctccgcgcattgtcagcgaaaaaacctgagcaacagggaaagtctgaaaagtcctggcaagcaggcagaagattactatatagatgacaatcggccttcgccattgataaaattgcacgccatttccggtcagtaaactttcaatgtgaaaactttttctttttcactgcgtttgtctacgattctgcaaagtaaaattcgaatcgagccaagttgtgcaacttattgtgcaagcgatagcagagataccttgtttttggatgtgctgagaagcaggtgcgtttcgtcaccaatagactgccggataatatggacacgaactagtgattatacatatggttacttttggtaacatttgttaccagccttgataagggtaaaattttaatagttgttaccttaaatgttgtattttaacttaatgggaattcatagcctttcgacctcatgctttcaattaaaccattttaaacttacgtgtgtccccttatgcagtgcaacgcagtccgataatttcgataaaccggtggaaagaagggtttgaacttttcagttttgagttgcatgcacaacttgaataactcaattagtgtgcgcattgttgtatgttgtggcagtagttggtgttcggcttttctcgtaattgttgcttttgttgatgtgcattgacttagagcgcaattttcacgcttctatgcctgggccaagccccaaaaacgaaagcgaaacgagaaggtattaaagaaaacccggtgtagtcgttgaagaaatttaattggagcaaactcgagcaagcactagacattagacgttgcaattgcagttgcagatgcaacaaaagtgaaattacaaaattaatgcaaaaaacgagtcttcaagagtaatcgggacgaaatcagatggttcgagcaaaaggcatgcattaatcctattctatcaagatctaaaaaatgacattctatcctaattatacaaaatatagagtaggctttcagcgacccttagctccgcgtttctgttttcatcctgtgtgagctcaatgcaaatttgtttggctttgcccaactgtgcgtggcttttcccagtcgctcgctcggccgctccctttcgccgctaatgtggcgctaattagctagttgtgaaaatgcgtaggtgccttgggaaatccagccctctgctgtccggtaaagaatgagccacaatattagactgcattgcgggtatttgtcaacccgttagcgggatgactaatgtcatttgggcttggggaaaggtgccgataatcactgtcgcatggaatattttcaacttttgccaataggcgtatcaatccaatctttttttttagatttcatttgaatttgccatggtgaacgatgaagacgccgcgcaccaaagacctagcaagcccaccggatacaacttctaccgctcctccttgggatccccgcgttatgtagtggctcccatggtggatcaaagcgagctggcctggcgaatgctgtgccgacgctatggcgccgaactctgctactcgccaatgtaccatgcgaacctcttcgccacagaccccaagtatcgcaaggatgccttgcagacgtgtcccgaggacaggccattgatcatccagttctgtggcaacgatgctcaacaaatcctggatgcagcactcctggcgcaggaccactgcgacgcggtggacataaatttgggttgtccccaggccattgccaagagaggtcactacggatccttcctgcaggatgagtgggagctgctgacagagattggtgagtagcacaggctactttgattgtttatggaactagtgattgcaactgctatattatcctagtgagcacactgcacgcaaaactagccgttcctgtaacttgcaagattcgcatcttcgaggaccttgagaagaccattaggtatgccaagatgctggaggcggccggctgccagcttctgactgtccacggtaggaccagagagcagaagggtccgctgaccggggtggctaattggaactacattaagaatgtgcgccagcacatcaagattccaatgcttgccaacggaaacatcctggccctggacgacgttcatcgttgtctgactgaaacaggagtcgatggtgtaatgagcgccgagggtaatctgcacaatccggccatctttaaaggagtctcaccgcccgtctggcaaatggcccatgagtacttggagctcgttcagctccatccgtgcccgagttcctttatacgaggacatctcttcaagctcttccatcacatgtaagtctctacactaccgaacctaaaccgatttttcaaaatcaattctctatttcgtagcatgaatatccggcagaactctgagttacggcaatacctagccactgcaaatcagctcgtgcaattccaagccgtcgtgcaacaagtacgggcaaaatacgagccgttccacaagggcgaggtgccatacgagcccgaacaaatggctgctggatcagaggaagatgtaagttgctcgaacggatctttgtaatagagtggatctgaaataacacgaatattttatattccccaataaagctgccactttctccctggctgtgtcaaccatatatacgcgcctcacccgaatcccatcgccagaagattgccgaaaaggtgcgcgaggctgaggatcccaaccgaaccaagcggcagtacttcgacaaggacggcaaggagatctcccgcaaacggatgaagaaacttcgaagacgccagcgaagacccaacaaaacggaggcccagatccagcatcggcacgagaggcgcctggaatactgctcggaatgcgccaatccccagggatccaagtgcgagttccagctgtgccgcgtgtgctgcaaggacaggtgctacaacaacgatcgcgattgtcctggtcacgggatcttcatcaaatcccgccgagccagggccaagctttttgaggagcacatcgccccgcaggaccaccagaaggtgacgagaacttcagacgatgacctgacgatagccccaacggatgcgcaggagccgctttgaccttaaacctgtactttaggaaacacccttcttgtttttgtttctatgactgcgaataaaaaaaagcttgttttaaaaaccgcattgattgttttcattcaaacttttgattccatggcgggtttctttcataagcaaaccccaaaccggttgaattggccaatttatgcgaacccattctatttgtgcatttatacttttaaagtttcctatgtaaaaaaaaaaaactgttagtgtgaccgtgttatttgtgccctaaaatgtgtttcaattatctggcgaaagctggccactctaaacaccggttgcacgctgtgggcaacgaaaatcaaaacaaagcctaaaatggagcaaacaaggccattttacgatttcagcataccatacaacaaggacgactccgtgttgcgggccctgcttaacgagctggtggaaagtgagtgagaacaaatgaccatacagaagattcccacgacatccgacatactcgttgcagcgggctacaaaacagtggccatcgaccagagtttcgaccacagcaaaaaggatccgggca

SEQ ID NO: 6959 - DNA, 1112 bp, DROSOPHILA
aaaattaatgcaaaaaacgaatttcatttgaatttgccatggtgaacgatgaagacgccgcgcaccaaagacctagcaagcccaccggatacaacttctaccgctcctccttgggatccccgcgttatgtagtggctcccatggtggatcaaagcgagctggcctggcgaatgctgtgccgacgctatggcgccgaactctgctactcgccaatgtaccatgcgaacctcttcgccacagaccccaagtatcgcaaggatgccttgcagacgtgtcccgaggacaggccattgatcatccagttctgtggcaacgatgctcaacaaatcctggatgcagcactcctggcgcaggaccactgcgacgcggtggacataaatttgggttgtccccaggccattgccaagagaggtcactacggatccttcctgcaggatgagtgggagctgctgacagagattgtgagcacactgcacgcaaaactagccgttcctgtaacttgcaagattcgcatcttcgaggaccttgagaagaccattaggtatgccaagatgctggaggcggccggctgccagcttctgactgtccacggtaggaccagagagcagaagggtccgctgaccggggtggctaattggaactacattaagaatgtgcgccagcacatcaagattccaatgcttgccaacggaaacatcctggccctggacgacgttcatcgttgtctgactgaaacaggagtcgatggtgtaatgagcgccgagggtaatctgcacaatccggccatctttaaaggagtctcaccgcccgtctggcaaatggcccatgagtacttggagctcgttcagctccatccgtgcccgagttcctttatacgaggacatctcttcaagctcttccatcacatcatgaatatccggcagaactctgagttacggcaatacctagccactgcaaatcagctcgtgcaattccaagccgtcgtgcaacaagtacgggcaaaatacgagccgttccacaagggcgaggtgccatacgagcccgaacaaatggctgctggatcagaggaagatctgccactttctccctggctgtgtcaaccatatatacgc

SEQ ID NO: 6960 - protein, 358 aa, DROSOPHILA
MVNDEDAAHQRPSKPTGYNFYRSSLGSPRYVVAPMVDQSELAWRMLCRRYGAELCYSPMYHANLFATDPKYRKDALQTCPEDRPLIIQFCGNDAQQILDAALLAQDHCDAVDINLGCPQAIAKRGHYGSFLQDEWELLTEIVSTLHAKLAVPVTCKIRIFEDLEKTIRYAKMLEAAGCQLLTVHGRTREQKGPLTGVANWNYIKNVRQHIKIPMLANGNILALDDVHRCLTETGVDGVMSAEGNLHNPAIFKGVSPPVWQMAHEYLELVQLHPCPSSFIRGHLFKLFHHIMNIRQNSELRQYLATANQLVQFQAVVQQVRAKYEPFHKGEVPYEPEQMAAGSEEDLPLSPWLCQPYIR

SEQ ID NO: 6961 - DNA, 6556 bp, DROSOPHILA
accatcgcctccactcgggaatcaagcccttcagctgccccctgtgccccaaagccttcaccaaaaagcatcacctaaagacgcatctgaattaccatacaggctgcaagccgtatgtctgcccacatcccaactgcaatcaggcattcacccagtcgagcaatatgcgaacccacgctaagaagtgtcagtaccgtccgttggatggactcacggtcacatcatccgcacttccagtaccgggaaaacaacaaacaggtccaccgcccactttggccatggccatggctcaaacatttcaaatgccgccacctcctggagttctaacacctggatctggtccatcccaaccgccgagtcagcaaacccttctcagcaatctcaggacattctaaatgggtggaatcgttgtgcccggccagtttcaaccaaatttgtggcaattacaaagtgcagtacttccactgttgttattcaatttacatttattttcaagcaataattttgctagaaattaaattaggaatagacattaattattattaaaataggcatatatattggccagtcaataaagtataatatcaaatacaaaaggattccaggattctagaaataatattttggattggagatatgattgggagtccaactaggtaatttcgcttataatcagataacgcagccttatttaattcaaatcttctagtgacaaaaattaaaagatgtatgtttttttagtaaacaaatgaacgaaccgttgcagtacatttaacatatttaaaagtgcgctctcactcagccagatggcgccacctgatagtttattaccactgtaggtgtgttgagtaactaaacgaaatcttgctgttaaattgtattcacagctgtcctaaaaccgagttggcagcccttttcccctcaaaaatcgaaagtctgttaatatatcgataagtcaaggcaattgtcagtggtaccgtttcgtctggtatgaccgtgttgtgaaattttgttagaaatttacaatataagcgagcataaaaaacgcaggaaaagcgcaaaaaaatcagtaaaacgtgcctgcggacccaggctgcggtgcgtccagttggccgtagaaagcctttaccaaattcgatcgaactgagaattcgattcggttaacttctgcattgggctcaatttcaccattgcacacgtgtctggagcttttcctgggttcggtcacctcctcctcggattgcggacgatcccgtggtagcgctgggaaatgcccagcagaggacggcgggcagttcgagattgttccggcaaagaagcaggcgcaactgcaacagacgctggtcaccaacgacagcaccggactctcaatggctgagtactggcagcagttgaccaacggcgccggagaagcgggacccggcaatgagtcatccgccatggcagactgcaacggaggtcacgaatcggcggcagtgggtggttcctgcaacaggcacagcaacaacaattacgtgaacttcaatcagttcattatgcagcacaatctgggtggaggagcgccctcgaatgccaccagcactatgcaacatccggtgggcagcagctacactaacttctccctgggcggcggtggaggagcctttggactgaacccaccagtggcatccgcgagtaccagccactttgcaaatgtgagtcatcaatctccgaatgtatgtttcgatatattagaacttaggtttagtcctaatgaatcaactaataaatcacaaaacagttttactcgcaggccatgatcccaacctatcaaaatggcgatggcatcgctagagtcaccgtcaccagcagctatgggtcggtcaatccgagcaacagcaatttttcgagtttttacacaccttttggcaataatccgtttgacttcagcgcttccaagctgcaggcctcggctccggaattcgtgcccaatttcgccaagctgagtctagaagagacaccggcagccgccactacgaacggaaacagcactgccagcctagagactgccataaatgagacgagacctaggactctgcgagcccaagaaccagctgaacgaggagctaacaaccaatgctcgaaccataattacgaacgggagcgtgagcgggaacgtgaccgggaccgggacagggaaagagaccgggacagagacagggacagagaccgggacagagaccgggacagggacagggactctagacccggaaatacgcgacaacaacgccgctccgactatcgggacgatcgggaggaccggtacgaaagaagcgatcgtaggaggccgcagaagcagcaacgctacgacaatcatcgcagcaacaaacgcagggatgactggaatcgcaacagggaccgcatcaacggctttcccagggccgttgacgatttggacacgagcaatgagagcgcacacccatcgcccgaaaagcagtcgcaactgcagcaaatctccccaaggcgaggtccaccgctaccaccggcggataacgaaaaactatcgcagcgagagaaactggttcgcgacatcgaacagcgccgattggagtgccttgtatgcgtggaggcgatcaagtcgcaccagccaacctggtcgtgcaggaactgctatcacatgctgcaccttaagtgcaccatcacctgggcgagtagctccaagtccgaggtgggctggcgttgtccagcttgccagaatgtgctgcaggatttgccacgcgactatctctgcttttgcggcaaactgaaaaacccgccggtatcacggaccgaattggcccacagctgtggcgaggtctgctgccgaattgagggttgtagccatgcctgcactctgctctgtcacccaggcccttgtccgccgtgccaggccaacgtggtgcgcagctgtggatgtggacgcagcacaaaaacgatgcagtgcgccatgaaggaagaggtgctctgcggcgagatctgcgacaagctgcttaactgtggcgagcatcgctgccaggcggagtgccactcgggcaagtgcgcggcgtgttccgagcaagtggtgcagcagtgccactgcggcaagcaggagcgcaaggtgccatgcacgcgagaatcgcaggacaaacgcacctattcgtgcaaggacagctgcggtcaaccgcttccctgcggccaccacaagtgcaaggactcctgccacgcgggaagttgtaggtaagaataactgattcaactcatttatagtattggtttcatttaaaccaataaccccaaaaaacggctcaaactcgaaaattgtgttaggtttctaaaatatgtgcattaacattaacacaaaacatcagaattgaatttggtatgaaccaattttatgctaaattattcagcgtttgcaatcgtgtctttgtgcagagtactaagaaactcatacaattaaactgataatatgattcttttcagaccctgcaagctgagtcccgagcagataacaagttgtccttgtggcaaaatgcctgtaccggctggccagcgttcaagctgcctggacccgattcccacatgcgagggcatctgctctaggacattacgttgtggaaagccagcgcatccgcatcaatgcggaagcaaatgtcacttgggccagtgccctccatgtcccaagcagaccggtgtaaagtgtcgttgcggccacatggaccaaatgataaagtgtcggcagctatgtaacagagcggacgacgcccgctgcaagcgacgttgcaccaagaagcgcagctgtggaaagcacaagtgcaacgttgagtgctgcatcgatatagaccacgactgtccactgccatgtaatcgaaccctcagttgtggcaaacacaagtgcgatcagccgtgtcaccgcggcaattgtccgccatgctaccgcagcagtttcgaagagctctattgcgagtgtggtgccgaagtgatctatccaccagtgccgtgtggcaccaagaagccaatctgcaagcttccttgctcgcgcattcatccatgcgatcatccgccgcagcacaactgccattcgggccccacctgtccgccctgcatgattttcacgacgaaattgtgtcacggcaaccacgagctgcgcaagaccattccctgctcgcagcccaactttagctgtggcatggcctgtggcaagccgttgccgtgtggcgggcacaagtgtataaagccgtgtcacgagggcccctgtcagtctgccggcgagatatgccggcagagctgcaccaagccacgaccgacctgtggtcataagtgtgcagctgcctgtcacgagggagcctgtccggaaacgccttgcaaggagctggtggaggtgcagtgcgagtgcggcaaccgaaagcagaaccgcagctgccaggaactagccagggagcacagtcgtatagccaccatccagctggcctcgtccatggcagagatgtcacgcggcaactacatggagctcagcgaaatcttggctccagccaagaaatctaataaaacgtgagtggtggtgtctattcagccgaatttaagttttcactagtattaatatacgtaacattttgtctttagtttggattgcaacgacgaatgtcgtctactggagaggaatcgtcgtcttgccgcggccctgtcttctggaaattccgatacaaagcaaaagtgtctaaccaagtactcggagtttgttcgtggcttcgcaaagaagaacccagcgctgaccaagagcgtttacgagacgttgaccgacctggtaaagttggccaaggaaagcaagcaacggtcgaggagccactctttccccaccatgaaccgcgaaaagaggcagctggtgcacgagttgtgcgaggtatttgggattgaatcggtttcctatgacaaggagccaaatcgcaatgttgttgccacggcccataaggatagggtgagttcaactttgtaaaacaccaactgaatcgcgtacttatttggcttaactatttgcagtgctggttccccgccacgagcatcatggaagtgctggctcgtgagtccggacaacgccgtgtcccggtgcccagtaacaatgcttggggattgaagaagtagatcaaatccgtgtggtatacagagatattaaatatattaaatcgttggcgctggaaaataatagttaaaaatggatagataatgcaaatggaagcctggatgtggaagacttattgattgaacctaaatgaggaaaattttgtggatgcgctgcgaggacaatacagaaggataattgccgttaccacgtatattttgtaaattataacaaatgttagttgaaccctagaatgctaaatgttgaatacttgaatatggagtgaactggataagcaggcacaaatgtgaagaatcatgttaaccaatctgttgtacgatgaatttatccaaaagcgaaaccttctggccacgttgcatctaaatacaaaggaaagcgatagatgagaaggataaataaatgagtaaatagagcagagggcaattattgtgttttttgttttaattaatttatttcatgggagaaattatggataaaaggtcttataaacttaatttcaaatttatgtcgcgatggaacacaatgtcttgtatgttgcagcaattagctttcaacagtggtcagtattcagtgctgtaagtcgttgttatttaacggtcgcttgtttcaaactgaagtaattttggaatttacttcgcttagaacagaaataatttcaaatttaaaatataaatatataggacgtcatgcttcaccattagataattaaagtggcgcggaaatgaaaacaacccaagtggaggtgctcaagggatattccacctgctgatccatcctggtagtcgaggaaactagcaaacatcccccggactgcccacaagccgaactcgttgccatctcgtttcgggctatgggcacaggcctctaatttgttgccattgccgttgccattttcacgaaaaacaataagcggcgcctggggaataatgccaaaataaagatgaaatgttacgacaagtcagagcggcgagggatgagagccccggatgaggccaactcacgcactccgccggaacgcaatggatgcggggcttgggccggatccagaggcagaacgcaagtcgtatatgaatatagacctgacataatgagcagcctataagcgaaatggctgccagcaacccaccaaatgccatccacccaccagccaccacccccaatcatctcaagatgtgtgcgtaatttgaatttagtctgccagggagtttattaacaaatacaaggcaatcccccacgtcaaggagggccgagaatgaacgaaacagaaagaaagaacgctttcaaggagaaactgcctctttagatgggctggggaaaataattccagggagattaaattgtggttggcatctgtgggcagggggattattgctccaaaaaccggcgagattgcaggggaaagagttcattttgggtcaattg

SEQ ID NO: 6962 - DNA, 4111 bp, DROSOPHILA
tgtgaaattttgttagaaatttacaatataagcgagcataaaaaacgcaggaaaagcgcaaaaaaatcagtaaaacgtgcctgcggacccaggctgcggtgcgtccagttggccgtagaaagcctttaccaaattcgatcgaactgagaattcgattcggttaacttctgcattgggctcaatttcaccattgcacacgtgtctggagcttttcctgggttcggtcacctcctcctcggattgcggacgatcccgtggtagcgctgggaaatgcccagcagaggacggcgggcagttcgagattgttccggcaaagaagcaggcgcaactgcaacagacgctggtcaccaacgacagcaccggactctcaatggctgagtactggcagcagttgaccaacggcgccggagaagcgggacccggcaatgagtcatccgccatggcagactgcaacggaggtcacgaatcggcggcagtgggtggttcctgcaacaggcacagcaacaacaattacgtgaacttcaatcagttcattatgcagcacaatctgggtggaggagcgccctcgaatgccaccagcactatgcaacatccggtgggcagcagctacactaacttctccctgggcggcggtggaggagcctttggactgaacccaccagtggcatccgcgagtaccagccactttgcaaatgtgagtcatcaatctccgaatttttactcgcaggccatgatcccaacctatcaaaatggcgatggcatcgctagagtcaccgtcaccagcagctatgggtcggtcaatccgagcaacagcaatttttcgagtttttacacaccttttggcaataatccgtttgacttcagcgcttccaagctgcaggcctcggctccggaattcgtgcccaatttcgccaagctgagtctagaagagacaccggcagccgccactacgaacggaaacagcactgccagcctagagactgccataaatgagacgagacctaggactctgcgagcccaagaaccagctgaacgaggagctaacaaccaatgctcgaaccataattacgaacgggagcgtgagcgggaacgtgaccgggaccgggacagggaaagagaccgggacagagacagggacagagaccgggacagagaccgggacagggacagggactctagacccggaaatacgcgacaacaacgccgctccgactatcgggacgatcgggaggaccggtacgaaagaagcgatcgtaggaggccgcagaagcagcaacgctacgacaatcatcgcagcaacaaacgcagggatgactggaatcgcaacagggaccgcatcaacggctttcccagggccgttgacgatttggacacgagcaatgagagcgcacacccatcgcccgaaaagcagtcgcaactgcagcaaatctccccaaggcgaggtccaccgctaccaccggcggataacgaaaaactatcgcagcgagagaaactggttcgcgacatcgaacagcgccgattggagtgccttgtatgcgtggaggcgatcaagtcgcaccagccaacctggtcgtgcaggaactgctatcacatgctgcaccttaagtgcaccatcacctgggcgagtagctccaagtccgaggtgggctggcgttgtccagcttgccagaatgtgctgcaggatttgccacgcgactatctctgcttttgcggcaaactgaaaaacccgccggtatcacggaccgaattggcccacagctgtggcgaggtctgctgccgaattgagggttgtagccatgcctgcactctgctctgtcacccaggcccttgtccgccgtgccaggccaacgtggtgcgcagctgtggatgtggacgcagcacaaaaacgatgcagtgcgccatgaaggaagaggtgctctgcggcgagatctgcgacaagctgcttaactgtggcgagcatcgctgccaggcggagtgccactcgggcaagtgcgcggcgtgttccgagcaagtggtgcagcagtgccactgcggcaagcaggagcgcaaggtgccatgcacgcgagaatcgcaggacaaacgcacctattcgtgcaaggacagctgcggtcaaccgcttccctgcggccaccacaagtgcaaggactcctgccacgcgggaagttgtagaccctgcaagctgagtcccgagcagataacaagttgtccttgtggcaaaatgcctgtaccggctggccagcgttcaagctgcctggacccgattcccacatgcgagggcatctgctctaggacattacgttgtggaaagccagcgcatccgcatcaatgcggaagcaaatgtcacttgggccagtgccctccatgtcccaagcagaccggtgtaaagtgtcgttgcggccacatggaccaaatgataaagtgtcggcagctatgtaacagagcggacgacgcccgctgcaagcgacgttgcaccaagaagcgcagctgtggaaagcacaagtgcaacgttgagtgctgcatcgatatagaccacgactgtccactgccatgtaatcgaaccctcagttgtggcaaacacaagtgcgatcagccgtgtcaccgcggcaattgtccgccatgctaccgcagcagtttcgaagagctctattgcgagtgtggtgccgaagtgatctatccaccagtgccgtgtggcaccaagaagccaatctgcaagcttccttgctcgcgcattcatccatgcgatcatccgccgcagcacaactgccattcgggccccacctgtccgccctgcatgattttcacgacgaaattgtgtcacggcaaccacgagctgcgcaagaccattccctgctcgcagcccaactttagctgtggcatggcctgtggcaagccgttgccgtgtggcgggcacaagtgtataaagccgtgtcacgagggcccctgtcagtctgccggcgagatatgccggcagagctgcaccaagccacgaccgacctgtggtcataagtgtgcagctgcctgtcacgagggagcctgtccggaaacgccttgcaaggagctggtggaggtgcagtgcgagtgcggcaaccgaaagcagaaccgcagctgccaggaactagccagggagcacagtcgtatagccaccatccagctggcctcgtccatggcagagatgtcacgcggcaactacatggagctcagcgaaatcttggctccagccaagaaatctaataaaactttggattgcaacgacgaatgtcgtctactggagaggaatcgtcgtcttgccgcggccctgtcttctggaaattccgatacaaagcaaaagtgtctaaccaagtactcggagtttgttcgtggcttcgcaaagaagaacccagcgctgaccaagagcgtttacgagacgttgaccgacctggtaaagttggccaaggaaagcaagcaacggtcgaggagccactctttccccaccatgaaccgcgaaaagaggcagctggtgcacgagttgtgcgaggtatttgggattgaatcggtttcctatgacaaggagccaaatcgcaatgttgttgccacggcccataaggataggtgctggttccccgccacgagcatcatggaagtgctggctcgtgagtccggacaacgccgtgtcccggtgcccagtaacaatgcttggggattgaagaagtagatcaaatccgtgtggtatacagagatattaaatatattaaatcgttggcgctggaaaataatagttaaaaatggatagataatgcaaatggaagcctggatgtggaagacttattgattgaacctaaatgaggaaaattttgtggatgcgctgcgaggacaatacagaaggataattgccgttaccacgtatattttgtaaattataacaaatgttagttgaaccctagaatgctaaatgttgaatacttgaatatggagtgaactggataagcaggcacaaatgtgaagaatcatgttaaccaatctgttgtacgatgaatttatccaaaagcgaaaccttctggccacgttgcatctaaatacaaaggaaagcgatagatgagaaggataaataaatgagtaaatagagcagagggca

SEQ ID NO: 6963 - protein, 1083 aa, DROSOPHILA
MADCNGGHESAAVGGSCNRHSNNNYVNFNQFIMQHNLGGGAPSNATSTMQHPVGSSYTNFSLGGGGGAFGLNPPVASASTSHFANVSHQSPNFYSQAMIPTYQNGDGIARVTVTSSYGSVNPSNSNFSSFYTPFGNNPFDFSASKLQASAPEFVPNFAKLSLEETPAAATTNGNSTASLETAINETRPRTLRAQEPAERGANNQCSNHNYERERERERDRDRDRERDRDRDRDRDRDRDRDRDRDSRPGNTRQQRRSDYRDDREDRYERSDRRRPQKQQRYDNHRSNKRRDDWNRNRDRINGFPRAVDDLDTSNESAHPSPEKQSQLQQISPRRGPPLPPADNEKLSQREKLVRDIEQRRLECLVCVEAIKSHQPTWSCRNCYHMLHLKCTITWASSSKSEVGWRCPACQNVLQDLPRDYLCFCGKLKNPPVSRTELAHSCGEVCCRIEGCSHACTLLCHPGPCPPCQANVVRSCGCGRSTKTMQCAMKEEVLCGEICDKLLNCGEHRCQAECHSGKCAACSEQVVQQCHCGKQERKVPCTRESQDKRTYSCKDSCGQPLPCGHHKCKDSCHAGSCRPCKLSPEQITSCPCGKMPVPAGQRSSCLDPIPTCEGICSRTLRCGKPAHPHQCGSKCHLGQCPPCPKQTGVKCRCGHMDQMIKCRQLCNRADDARCKRRCTKKRSCGKHKCNVECCIDIDHDCPLPCNRTLSCGKHKCDQPCHRGNCPPCYRSSFEELYCECGAEVIYPPVPCGTKKPICKLPCSRIHPCDHPPQHNCHSGPTCPPCMIFTTKLCHGNHELRKTIPCSQPNFSCGMACGKPLPCGGHKCIKPCHEGPCQSAGEICRQSCTKPRPTCGHKCAAACHEGACPETPCKELVEVQCECGNRKQNRSCQELAREHSRIATIQLASSMAEMSRGNYMELSEILAPAKKSNKTLDCNDECRLLERNRRLAAALSSGNSDTKQKCLTKYSEFVRGFAKKNPALTKSVYETLTDLVKLAKESKQRSRSHSFPTMNREKRQLVHELCEVFGIESVSYDKEPNRNVVATAHKDRCWFPATSIMEVLARESGQRRVPVPSNNAWGLKK

SEQ ID NO: 6964 - DNA, 3865 bp, DROSOPHILA
tttccaattttcacacacacacgcaccgaaatcaaatcaagaccaatttccaaagcaaaggccgaaaaacaaacaatttgttgcactttactgtcgtaaaaatcgccaaacggaattcacaaaaatcaacaactcacctcaggcgaaacatttggctgctctctttgtttttgttgttatccgtttgctgcgtggatgcatgtggttgcgtgtgtgagtgagtgtggtcaaataaaaaaatctctgttgctgctgcagcgcatatgtatgcgactgcgtgcgtgtgcatatatataggtgtgtgtgtgcgtggaatgcaataaaacaaacgatgtttgcgtttgcttttgcttattggcgcaatttgatttgcacgaactgtgtgctcgatattttagcgattactcggggctcaagccaccatcactcttatcattttccgcctggccgctaactgcagcgtgttttttgcgtcgcaccacgggcttagtgcttttgccaccacttttactttacagcatcatcccagaagcagtagcagcagcaacaacaacacccacaaacacacacacaactaacaccaacacaaacaacaatacgattatactggccgttccgttcttcttcttgctgcgaatatttctttgatttcgcgattctccgctaaatcggcgccaatcgagagcgcgtagttgtgcaatttgcagggtaaacgaacgcgatcgcgaatttcaatttttgcaatggcgaaatgcgcgaaaaagtttaatttctctgtttttctacacgagagaagagaaacactattttagagctgggctaacgattcatgaaactatcgatatgccgtagacgatagcgtaggactcactatcgaaacgtgtggcgcaaaattaagcgaacagcattcgcgctatcgacattagtcctcccctaagccagtgtgaccatgaccttactgttcggccttcactcaaagcaaagactttgccgccaatcgttcacatttttgaatatattttaattgacaagcgtaaagatataatgcgatgttgtggttcagtagactcgctcccgcaccttgaacatcaagggttccttggtacgcagaataagttcggcgatcagcacgggtggttccgaggagtcgcccacaaagtcaacctcgtagtgccggagcacattggccacgatggccttgatctccagcatggcgaacttctggccaatgcagttgcgaggtccggccgagaacggaatgtacgcgtacggattcagcttctcggcggtggtgaccacatcgaaccgttccggcttgaagatattgggctcgctaaagagctcctcccgtctgcccaagtagagaggggagatgccgatattcgtgcccgccgggatgagctttccatctgcattggggaaaggcaagttaaaattgagtactttactcctctacgcactgtactcactgatctcgcagtcctcgagaaccttacgacccagcagcggtacagacggatacattcgaagggtctccttcacgcacaggtcgacgtagtgcagctggttcagcagctcatagctcaccggcgtgctcttgtcattgcccaccacggaccggatctcctcaaagcacttcttctgcgcctccgggtgggtggctatgttgtagaagaagaacatcagggccgaagaggtggtgtcgtggccctcgaacatgaaggtgtccacttcctcgcgaatgtccaagttgctcaggggccgttcgtcgacggtcgactgcagaaggatgtccaggaaggccatctttcgcttggcgcccacgtccgcgtcatcattgctgctctcctggctgcttccttcgcggatgagctcctccctgcgctgcacgatgatcttctctgtgaactggtgaagcacgttcagggccttcttctccgccctcgccagtggggtcagcatgtaggtaaggtcgaagcggtacagaatgttgaacatccgcttgtgcagcaccattgatatggtcttcaccgcctggacgtactcggagtctgcattcgactgcgcattgatggaaacacccatggcagtttctggaatagaaaaaggaatgctatcaaagcttttacaaatagatactatggccttactcaggccataccaagagcccattcttcaaagcaccaccatttgctagatgataaaaattaaagacctagatccctaccgcagatcgtgtccatggtgcagagattgatccagtcgtagaggctaaagccggagtcgccgtgcttcaggcgatcctgctccatattccggagcaaatctcgcgaccccttctcgaagacctcaacgaactggtcgaggatcttgaagtggaaggcgggcgtgataattttgcgtcgcttgtgccacttccgaccgcgactgaccagcagaccctcctttagccacggctccagggccttgtattcacccgccttgtcgttgaagcgcaacgtgcccaggacgacctcgacgtccttggggttgcccatgagcacgttcagctcgggtcccagccacaccttgagcacctggtccttggagtaggtctccatgaactcgaaaatcttcttgaccatctcgtgcggcggcttgccgatgaagtggtggccatggccgaccagcggcagcacgggaggacccggcatgtagctgatgaggtcaatcagccgcttgaattttagatggtagagcagcaggcccacgaagagggcgctggccaggattgcgccgatgaccagaaacatgttactactggcctccgtatttctcgtatgctcctcaatcgctattcaccctttgatagtgcaataacaactaatccggccagaagcgggccgtagacatgagaacggccacggatacggccaaacgaactgattatcccacccaccgacgcactgcgaaaaagtgctcccctactatgaattcaactgtttggattccgcagggaggtctcaaactgtgagtgcatactttgactcaacttcacgcaaagatcgcacatgacagtgtgtccgtagaacattttgttcgagtgtagctgtagcttgatgtaaatcgccctgggaatatctaatcgcaatgccgaacgccaggttaccaccgaaatagttcgacaaaccaaatcttatcgaaatcggtagcggtttttatggaggtggatgggattcggaccttggcccaatgctttgaagacgtctccccccagatttctggattaaaataaccccctatttaaagctatgagttattggtcgcttagcgtttgccgcctttaagagatcgacccataagtggaaaaatgttcagcttgaagtgaaaactgggaaacttggggccaatcaatctgctgaatctatccacctctatgtactcaccgcaaatggcgtccagcgcgcagaggtgaatggcctcgcccaggttgattctctcctggcccctgcttatccgcagcgccagttcctcgacgagccgcagtgactgcctgtcgaagatctccacgtatggctccaggatgcgaaagtggaaggccggcgtgatgatcttgcgccggcggtgccacttgcgtccgttgctcaccagcagtccctcgttgagccagcggcccaggaaggagtactcctgcgacttggtcagcagctggctgctgcccagcacccgctctacgtcgcgcggattgaagagcatcacgctgtatgacgggcccaggaacagtccgaaggtgtcgccgtgccgctccgccagctcgcctatcttgaggcacgcctcagccggagtgagccccagaaagatgtgggcgttgccgagcaggggcaga

SEQ ID NO: 6965 - DNA, 1671 bp, DROSOPHILA
tagttgttattgcactatcaaagggtgaatagcgattgaggagcatacgagaaatacggaggccagtagtaacatgtttctggtcatcggcgcaatcctggccagcgccctcttcgtgggcctgctgctctaccatctaaaattcaagcggctgattgacctcatcagctacatgccgggtcctcccgtgctgccgctggtcggccatggccaccacttcatcggcaagccgccgcacgagatggtcaagaagattttcgagttcatggagacctactccaaggaccaggtgctcaaggtgtggctgggacccgagctgaacgtgctcatgggcaaccccaaggacgtcgaggtcgtcctgggcacgttgcgcttcaacgacaaggcgggtgaatacaaggccctggagccgtggctaaaggagggtctgctggtcagtcgcggtcggaagtggcacaagcgacgcaaaattatcacgcccgccttccacttcaagatcctcgaccagttcgttgaggtcttcgagaaggggtcgcgagatttgctccggaatatggagcaggatcgcctgaagcacggcgactccggctttagcctctacgactggatcaatctctgcaccatggacacgatctgcgaaactgccatgggtgtttccatcaatgcgcagtcgaatgcagactccgagtacgtccaggcggtgaagaccatatcaatggtgctgcacaagcggatgttcaacattctgtaccgcttcgaccttacctacatgctgaccccactggcgagggcggagaagaaggccctgaacgtgcttcaccagttcacagagaagatcatcgtgcagcgcagggaggagctcatccgcgaaggaagcagccaggagagcagcaatgatgacgcggacgtgggcgccaagcgaaagatggccttcctggacatccttctgcagtcgaccgtcgacgaacggcccctgagcaacttggacattcgcgaggaagtggacaccttcatgttcgagggccacgacaccacctcttcggccctgatgttcttcttctacaacatagccacccacccggaggcgcagaagaagtgctttgaggagatccggtccgtggtgggcaatgacaagagcacgccggtgagctatgagctgctgaaccagctgcactacgtcgacctgtgcgtgaaggagacccttcgaatgtatccgtctgtaccgctgctgggtcgtaaggttctcgaggactgcgagatcaatggaaagctcatcccggcgggcacgaatatcggcatctcccctctctacttgggcagacgggaggagctctttagcgagcccaatatcttcaagccggaacggttcgatgtggtcaccaccgccgagaagctgaatccgtacgcgtacattccgttctcggccggacctcgcaactgcattggccagaagttcgccatgctggagatcaaggccatcgtggccaatgtgctccggcactacgaggttgactttgtgggcgactcctcggaaccacccgtgctgatcgccgaacttattctgcgtaccaaggaacccttgatgttcaaggtgcgggagcgagtctactgaaccacaacatcgcattatatctttacgcttgtcaattaaaatatattcaaaaatgtgaa

SEQ ID NO: 6966 - protein, 512 aa, DROSOPHILA
MFLVIGAILASALFVGLLLYHLKFKRLIDLISYMPGPPVLPLVGHGHHFIGKPPHEMVKKIFEFMETYSKDQVLKVWLGPELNVLMGNPKDVEVVLGTLRFNDKAGEYKALEPWLKEGLLVSRGRKWHKRRKIITPAFHFKILDQFVEVFEKGSRDLLRNMEQDRLKHGDSGFSLYDWINLCTMDTICETAMGVSINAQSNADSEYVQAVKTISMVLHKRMFNILYRFDLTYMLTPLARAEKKALNVLHQFTEKIIVQRREELIREGSSQESSNDDADVGAKRKMAFLDILLQSTVDERPLSNLDIREEVDTFMFEGHDTTSSALMFFFYNIATHPEAQKKCFEEIRSVVGNDKSTPVSYELLNQLHYVDLCVKETLRMYPSVPLLGRKVLEDCEINGKLIPAGTNIGISPLYLGRREELFSEPNIFKPERFDVVTTAEKLNPYAYIPFSAGPRNCIGQKFAMLEIKAIVANVLRHYEVDFVGDSSEPPVLIAELILRTKEPLMFKVRERVY

SEQ ID NO: 6967 - DNA, 2786 bp, DROSOPHILA
ccggtcataatatttaactcaccgctccctcccgagggttgcttttgcttttcattaggtcttgcttcgtcctccgccatgttgccagtttccagtggcaggagcaaggagcagggcgtagggagcagggagctggagcgaggacatccaccatcttgccttggctcatttggttcgttattgctcatttcttccacggcctccagattaatgggtgcgataaggtcggcgtccgccagtaggtgtagcccaggcaaggctaaggtccaagacccaaacccatagtcattcctatacccttacccatacccatacccatacccaggaggcttcggatccagccttcctccaacccaatatggtggccagcgcacatcgatcccgcatgccaagttgggtcacccttccgcgcctcggaatgagctgctttagccaaaacgaacccaaaggcactgccattccgccctgccaatttcttctcttcttgttttcccactgactttgactctgggcacgaagttcttatccaccgacagagatctccagccaatcccgtcccgatttatgactcacaacaaggctgaactttggctatttacctgctgatggaggctggaaagctcagatcacacttcttattaaaaaattattaatcccttaattccttagtatcttcattatcagtaaacaataataaataagaaatactgccgtcgaaagattctttctaaaatctataaaataaagtacacgttccccttatttatacctatatacctatttattgcctgctcaaaactgaactacataaactcaactctcaatgtgtgtttttgtgatccccacaaggtctaccctgaagatctctgcgatgttgacccagtcccagtctagatattctgcgtcatgtgaagtgaccgtgaaagtcaatccgcacaccttgtttgcacagctgaaactcctagccagctgatagtagttccttcgctgataaaagcacacatctcaatcactggcccactcagttgtcaccatcatgtggcgccctctgtttctcctccagcttacccagctcctccttggcctggccagcggccaaatccagcccagaatcgtgggcggcaccaccaccacgctctccgccgtgggtggcttcgtggtgaacctgcggtacgacggaaccttttactgcggcggctccctcgtgaccagcagtcacgtggtcacggcggcccactgcctcaaaggctaccaggcgagccgcataaccgtccagggcggagtgagcaagctcagccagtcgggcgtcgtgagacgcgtggccaggtactttattccaaacggcttcagcagctccagcctcaactgggacgtgggcgtcatccggctgcagagtgccttgactggcagtggcatcaccaccattcccctctgccaggtccagtggaaccccggcaactacatgcgcgtctccggctggggcaccactcgctacggcaactccagtccctccaaccagctgcgcacggtgcgcatccagctgatccgcaaaaaggtgtgccagagggcctaccagggaagggacacgctcaccgcctccaccttctgcgcccgcactggcggcaaagatagctgctccggcgactcaggcggcggggtgatctttaagaaccagctctgcggcattgtctcctggggactgggctgcgccaacgcccagtatcccggcgtctacaccagcgtccatcgggtccggagcttcatcctccgctccattaagaagtgaggagtgggcagttgggggagcgccggaagccacagctattaatagttagttaaaatattaattaaaaatcgttagtgcaaagtgcttcttcgcctgtcgtcaggaagtcctcggaccggatgggcgactaaagactggcgatgggccaatgaagatatcatccatctgctttgtggccttgccgcatgtaaattggtaggcaatgcacagtgatcgaagaccatgcgaaaatgttaaaacgtgtgctcagatacttttgttttcaatatagaatattcgaggataatttaagcattatataatataagtataagataaaatgcgttcaatgcttataggttgatagttcactaccaaaaaactgaaaatagtactgtacaagcaacaataaagtgaaataaaaataagtggtagaatgagccttttaggaattccaagtataccagcaagaatgtgaaaatttgaacctctatccaaggtgccaaggtgccctggaagagagccaagggcctcatcccgatcgatgagtagccacttccgagtgttgactttgttgtcgtgcgctaatttccagcgattgctgccttgatttgcattgattgagccctggccagaaggatggaaggttcctgcactgcagcggaaggaagcactgagtgggcaagttctgaccaccatcggagcacgggtcagtgccagccagctagctttcatatcccgtccgcggctgattgcgtccaatttcatctaaattaagtgcagttaaagcgccacttaacacgtgctgtgctgtggagctgcgacgcctgccagagatctggtgacaagcggcagatcgagcggatcgagctcatttgtgtaattgcgaggtgacggtgacccgctcgccgcaatgagtgcgtttagataaaaccataattaatcgctctaatgtggccggcaactgcgatttccataacggtagtgcaccgcaagcgggctaatcaatgggtgattgccg

SEQ ID NO: 6968 - DNA, 786 bp, DROSOPHILA
acatctcaatcactggcccactcagttgtcaccatcatgtggcgccctctgtttctcctccagcttacccagctcctccttggcctggccagcggccaaatccagcccagaatcgtgggcggcaccaccaccacgctctccgccgtgggtggcttcgtggtgaacctgcggtacgacggaaccttttactgcggcggctccctcgtgaccagcagtcacgtggtcacggcggcccactgcctcaaaggctaccaggcgagccgcataaccgtccagggcggagtgagcaagctcagccagtcgggcgtcgtgagacgcgtggccaggtactttattccaaacggcttcagcagctccagcctcaactgggacgtgggcgtcatccggctgcagagtgccttgactggcagtggcatcaccaccattcccctctgccaggtccagtggaaccccggcaactacatgcgcgtctccggctggggcaccactcgctacggcaactccagtccctccaaccagctgcgcacggtgcgcatccagctgatccgcaaaaaggtgtgccagagggcctaccagggaagggacacgctcaccgcctccaccttctgcgcccgcactggcggcaaagatagctgctccggcgactcaggcggcggggtgatctttaagaaccagctctgcggcattgtctcctggggactgggctgcgccaacgcccagtatcccggcgtctacaccagcgtccatcgggtccggagcttcatcctccgctccattaagaagtga

SEQ ID NO: 6969 - protein, 249 aa, DROSOPHILA
MWRPLFLLQLTQLLLGLASGQIQPRIVGGTTTTLSAVGGFVVNLRYDGTFYCGGSLVTSSHVVTAAHCLKGYQASRITVQGGVSKLSQSGVVRRVARYFIPNGFSSSSLNWDVGVIRLQSALTGSGITTIPLCQVQWNPGNYMRVSGWGTTRYGNSSPSNQLRTVRIQLIRKKVCQRAYQGRDTLTASTFCARTGGKDSCSGDSGGGVIFKNQLCGIVSWGLGCANAQYPGVYTSVHRVRSFILRSIKK

SEQ ID NO: 6970 - DNA, 4378 bp, DROSOPHILA
ttgatgtcgcccttgatgtccttggagtgcagcacgttcccgatgagcgccaccacccgttgggtcaggtcttccataacacgtgcgtagcctggatagcttaggtaaagggcgcgggctgttccttgtgggaaagcattagcggcttttgtggcggcgattgcattcttgaaccctttctggaatgtcagagcagaacacgtagggattggattgaaatatacttatgtacgctggctgaattgctacccacgtttgtgaatgcctcaacatcttctgaagcggatttctttggcggctggtctgcttgggccgattcctctttggcctcctggtgaactcttttcggggttcgcggcatgtctgtatagtgtttccttgtcgaatgtcttgtgttattttcgtacaaattttttgtcgttttacagattgtggaaaatgtgcgtgttttctcttcttcttttttgagaataacaacagcttgaatttggagtttgtcaacactaccggcggcgaaatttgatcactatatagcactaaaacggtgctgaccgcaatcgaattaaatcgatatgaaggtgtattttacaaatgttagccaaatttggaatggtgatatttcgttatgttaaaccgtaaacagaacctgctttgatgaacaatactttacaaattctttttaaaagcaaaatgttattattatattgaactaaatatatattcctttcaatataaattaaactgaataaatattttctttgttaaatatttggtcttttcttttattttttcaagagggcgctaaattgttcaagtgaaaccctgaacaaaattttcagccagctgattgccagtgtgtacacccctccggcgccggcgaaaagcgaggagcttgaccgagaagcatcaactccatccagaagaagtggagttacgtgctaaaaaaaaagtaattataaagcctaagtttagtccaattaggaggtaaaacacgcacaagatgctggacctatacagacgcacggtggcgcggtttcctctgggcagtgtcagctatatgttcgcctacggatccggcgtcaaacagcaggaaggctatggaaaagtcggcaatggaaacaacctgcgtcctccgccgggaaccgttgtggatctggtcttttgcgttcgtgatgctaggggcttccatgcggagaacctgcaccgtcatccggaccactattccgcccttaggcacctgggaccgaactttgtggccaagtatcaggagcgtttgggtgcgggtgtctattgcaacacgttggtgcctctgccagatgtgggcattaccataaagtacggcgtggtgtcgcaggaggagctgctggaggatctgcttgactggcggcatctttacttggcaggaaggctgcacaaaccagtgacgaatctggtcaatccttctgataatcctcccctcaaggctgcgctggagaggaatcttgtatccgcgctgcaagtggctctgctacttttaccagagaagttcactgcctacggacttttccacaccatcgccggactgagttacaagggcgatttccgtatgattttcggggaaaacaaacagaaagtgcacaacatagttagtccgcaaatcaatgacttcttcgccctataccaaccctccctgggacaactttccgactatgtggcggtaaacatgaagggccaggaaccagggagccggaaaccagccataatcttcgagcaggacaaatcctcatcggctacatgccaacacctgcgacagttgccccgagagcttcagaagcgattgcagcgaaatgccgcctgtcgtggcgactacacccaggtggtgaatcacctatccatggcctcccagcttccggaggtgctgcaggcatccgtcaacgacattgtgtggcgcagcagtgtcacgcaatcgatcaaaaatattcccagtgctggcattctcaagtcattggcgtatagctatcgcaaggctcaaaagacattcgctgtttaggtttatttttcgggttaatcccctggctgccaatcattctaccgactaagttgtcccatccagctgcattttgttaaatacttttaagctttaaagttgttaactgcaatataatgtttagcccaatccaaagacctgagttttcttggggattctctcttttcacatccaatggacctctttataacctcaggaatatcttggtttacttattatttcattaattgtatttgcagatcatgtccagcgacgacaatagtagtgatagcaattcgtccagcgatgaaaggcaaaggaaacggaagcttaagaagcacagcaaagatgtggacaagtccaaaaagaagaagtcgaaaaagcacaagaaagaaaagcgtcgccacaaggagaagaaacgcagcaagcatgaggaggagccacctgtgccttacacgcaacctccacatttaattaatgcatctccgccagatgtggctacaaacaacgaagattcctttggtcccgctttaccgccgcatttaaggaagacccagcagccggaactccctgagcaaagccaaccagccccacaaccgcaggccatgataggacccgtcctgcccagcaatttgacccgggaaaagtctcctactaaggaagcggaagctgaggacgatgatgacctagctggcacctttggtcctctgccaaatgccagtcaagtggctctggaggaacgtgctttggcacttaaactggcagctctggagggcgggggattgggtacatctacagaccaagatgtccgcgaagagtggatgcttgagctgccagatgtgggactgaagagcggccttgccgccctgagcaatatgaagcgcactttctatcagggaaaagagcgacccgactttagcgatcgatcatcctggacgaagaccccgcagagtgaagcggatgctgctgcatcgggcccaaagtcgctcagttcgaaggaactcgagcaaatggcacaggtcaagtacgaacagcagcgggatgacgagcaggagagcatggccaagaggcacaaaaagaagcacaagcgagaggagtccctagtggagctacatcaaaaaaagcttaggaaagagcagagagaaaaggtacgaggaaaaatatttcttaaaaacataatatggatataatattgttataaatttaaggaaaaagaactggctgcatcgggttccaagccagaacgaagaccttttagtagggatgtggacttgaaacttaacaagatcgacaagaatcagaccaagcagattgtagacaaggccaagatattgaacaccaagttctccaggggtcaagctaagtatctgtaggttaaatgaaccataaaaaatccagacgatccgtaccgcatgttaatcttaagcaattatgtaatttaatttagaaataattattataaaggcaaaataatttgtaaatgacatttttgattgcttagtcacctagcttaaactttcgtttaattggcataaatacattggtaatatgagtacaaacacacaattgggcaataccagctaatgatgaatgattatgaagctcttctaacgctgaggcggtggtttcggtttcggaatcttggacagcagcatctgaatctcgtccttttccttccagtccttccacaactcgtacagatttacaatggcgcgcacgatctcctggaccttgtctaaatcaacattcaattctgcgaaccactgcttcgtggcgtccttttgcaggatgacgcaggcgatttgaaggcaggctatagcgatctagaaaaaaataggttcttcaaatgtgaggaagctgtagaaattatcaggatcacaaacctggtaaggaggatagagcaggcagacatcggtgcgcagggaatcgtttacgatacgccagctcagggtgagcaactggtcctcctggcccatgtcctgaaccagctgcagcagcggtctgtacggctggtagacaatcaagcagcaatccaggttctccagcaggtaaaactcgcactccaggatgtgattggtgcggtagggaaactcctgagcgtacgcatagctgaactttgtcttaatggccgactggcagatcgagatcagtcgtgaattggaaatgacaccgaactcctccaccttcgaggccagcaagatgcaagtgggcgccagcagcagaggatcgatgttcttcagggagttcctcgcatagaatctcttgaagtaaaccgtcgccgtggcgatgacctgttgcctcagctttagctgctcgccgagcacctggatcacatttgcgaagaaaataaacaccttttggtattcatcctcg

SEQ ID NO: 6971 - DNA, 1944 bp, DROSOPHILA
atgctggacctatacagacgcacggtggcgcggtttcctctgggcagtgtcagctatatgttcgcctacggatccggcgtcaaacagcaggaaggctatggaaaagtcggcaatggaaacaacctgcgtcctccgccgggaaccgttgtggatctggtcttttgcgttcgtgatgctaggggcttccatgcggagaacctgcaccgtcatccggaccactattccgcccttaggcacctgggaccgaactttgtggccaagtatcaggagcgtttgggtgcgggtgtctattgcaacacgttggtgcctctgccagatgtgggcattaccataaagtacggcgtggtgtcgcaggaggagctgctggaggatctgcttgactggcggcatctttacttggcaggaaggctgcacaaaccagtgacgaatctggtcaatccttctgataatcctcccctcaaggctgcgctggagaggaatcttgtatccgcgctgcaagtggctctgctacttttaccagagaagttcactgcctacggacttttccacaccatcgccggactgagttacaagggcgatttccgtatgattttcggggaaaacaaacagaaagtgcacaacatagttagtccgcaaatcaatgacttcttcgccctataccaaccctccctgggacaactttccgactatgtggcggtaaacatgaagggccaggaaccagggagccggaaaccagccataatcttcgagcaggacaaatcctcatcggctacatgccaacacctgcgacagttgccccgagagcttcagaagcgattgcagcgaaatgccgcctgtcgtggcgactacacccaggtggtgaatcacctatccatggcctcccagcttccggaggtgctgcaggcatccgtcaacgacattatcatgtccagcgacgacaatagtagtgatagcaattcgtccagcgatgaaaggcaaaggaaacggaagcttaagaagcacagcaaagatgtggacaagtccaaaaagaagaagtcgaaaaagcacaagaaagaaaagcgtcgccacaaggagaagaaacgcagcaagcatgaggaggagccacctgtgccttacacgcaacctccacatttaattaatgcatctccgccagatgtggctacaaacaacgaagattcctttggtcccgctttaccgccgcatttaaggaagacccagcagccggaactccctgagcaaagccaaccagccccacaaccgcaggccatgataggacccgtcctgcccagcaatttgacccgggaaaagtctcctactaaggaagcggaagctgaggacgatgatgacctagctggcacctttggtcctctgccaaatgccagtcaagtggctctggaggaacgtgctttggcacttaaactggcagctctggagggcgggggattgggtacatctacagaccaagatgtccgcgaagagtggatgcttgagctgccagatgtgggactgaagagcggccttgccgccctgagcaatatgaagcgcactttctatcagggaaaagagcgacccgactttagcgatcgatcatcctggacgaagaccccgcagagtgaagcggatgctgctgcatcgggcccaaagtcgctcagttcgaaggaactcgagcaaatggcacaggtcaagtacgaacagcagcgggatgacgagcaggagagcatggccaagaggcacaaaaagaagcacaagcgagaggagtccctagtggagctacatcaaaaaaagcttaggaaagagcagagagaaaagccagaacgaagaccttttagtagggatgtggacttgaaacttaacaagatcgacaagaatcagaccaagcagattgtagacaaggccaagatattgaacaccaagttctccaggggtcaagctaagtatctgtag

SEQ ID NO: 6972 - protein, 647 aa, DROSOPHILA
MLDLYRRTVARFPLGSVSYMFAYGSGVKQQEGYGKVGNGNNLRPPPGTVVDLVFCVRDARGFHAENLHRHPDHYSALRHLGPNFVAKYQERLGAGVYCNTLVPLPDVGITIKYGVVSQEELLEDLLDWRHLYLAGRLHKPVTNLVNPSDNPPLKAALERNLVSALQVALLLLPEKFTAYGLFHTIAGLSYKGDFRMIFGENKQKVHNIVSPQINDFFALYQPSLGQLSDYVAVNMKGQEPGSRKPAIIFEQDKSSSATCQHLRQLPRELQKRLQRNAACRGDYTQVVNHLSMASQLPEVLQASVNDIIMSSDDNSSDSNSSSDERQRKRKLKKHSKDVDKSKKKKSKKHKKEKRRHKEKKRSKHEEEPPVPYTQPPHLINASPPDVATNNEDSFGPALPPHLRKTQQPELPEQSQPAPQPQAMIGPVLPSNLTREKSPTKEAEAEDDDDLAGTFGPLPNASQVALEERALALKLAALEGGGLGTSTDQDVREEWMLELPDVGLKSGLAALSNMKRTFYQGKERPDFSDRSSWTKTPQSEADAAASGPKSLSSKELEQMAQVKYEQQRDDEQESMAKRHKKKHKREESLVELHQKKLRKEQREKPERRPFSRDVDLKLNKIDKNQTKQIVDKAKILNTKFSRGQAKYL

SEQ ID NO: 6973 - DNA, 2983 bp, DROSOPHILA
caaaacaatgaaatcttgtcgacaagtgttatttgccacaatagctacaggtaattgcagataacatcgaaatgtggagataacatcttagacagctatataaatataaatgttctgataactcgacaacaaatcgaaaatgtgtacgataaaaatggatcaatttggatatgtcctttagatgcagagcactcagctagtttgatcagaacatttatgaccaacacgttttaataataaatgccataagaaaagccacctgccctgtggcataaaagaaaatcaaaggaaacctactaacattggcagcccaactcttgccatttatttattttgccaattgtggtaatggatggtaaacatttaatgggcgcaaataaaagtcaatgttgtagtaaaaatcgagacaaatcaattgataaagatgtcgatcatatagtatagtgtcgaacggagagaccatcggacttggctagtctgggttgtggcgataagacagccggcaaaatagttggcccaagcgcagccagtccaatgtacaacgcagcgaacccactaatcatgctcacggttagcggacatgactcccggaatagaacaaagccagaataacccataaaaaaaaacctttgaaaattagcgattcaaccaatcttgagctggctatctggccattttctggctttttaaggcagaaattccacatcttaattaactaaggaattgatgtaaatgtaattctaaaaagcttaaattcctagttcaatagggtaaaatatatatatcctactctctgtgatatttactttagttttaggttcattatcactggtagtattgcactgcgaatattggcagcactgaaaagagcgaaccattcgatgttcatagaccagaccccaaagataagattaagtagttcccggtaaatggtggttaccacttcggttggccactataaaagcctcgatgcctgaagttgtgccagtcattagcgattctcaggctccatacgaaatgtcgaatacctggtggtggctttcagtagtgttactaatcttagggctaatgcctggcatgagtcagcagttggcagcctctcaatttcagcagggctgggcgtgggccaatcgggtgaaccttctggcctccggaggaagtcttccgcagggtggaataagtggcagtggaatttacgcgggtcaacagggcgctctggcgagactcatgatcacggatgagctggtgggtcagagaaagttgctcctggctaaagttcccctcgatcccgaggagccgatagccacggatgagatcttggaacccgaaatcatgactcctgtgaaactaaaacttctgcagcaaccggaactaaagaactttaccacctgggagttgcccatggtccggggcagttcggtggacaagagaatatgccaggaggacttgtgctgcgagttccgggtcacttggaccctggaggacactcaaccggaatataactaccgattgggagtttgggtgggacaaaggcgctacgaggaggagcagtacagtgccatccggctgtgtggcctgttcgcctgcaaaggtgccagtgtagagagctgcggcctggttagcgaggaggaggtacacctgcaggatcaccgagttgtgttcaccgacctgcagatccttggcgagtttgtacggaggccacgacgtctcatattgcccagcacccttagctcctccagtttctatgccctgcaaccatcccaattagcatggtccatggaggaattggctaatgtaacgcggattaagatggagctgcgacaaccgcacagccagctaatgaccttcgccatatatggcaactatttcgatgagtatgcaaatggtggagctggaagattgggaaccctgctgtttctcctaatcacgccgctaattatgatgcatctatttcgggagtagggcgatccacactacatttgtgcaggatatgttagttgatttctattttatgttacatatttttaagttttcaaattaagaaattttgcttatcttctttttttttttaaatatttgaaattattatttaaaatgatttcgaatggtggaaaacgaccaaataaactgattcagaaatgcgtaattttcgttgagcacttgcaaaactattgaaatcaaacaagtctattaattgccagtccgtttttcgcaaattcgctttaatgttcattctcataaatcaaaaacagatgcataaaaatgttgatttattcgcgaggctgtcaaaacgattagtttcgttttgtcgcctagcaactcattaaaatcaatgcgtgcatgcataagtgtgagtgagtgtgttcgtatgtgtgtgtgtgtgtactgcatttgctacgggctgcactttatatttgccattgtttgtgtagttgcccttaagctggcacattgtaattaagtgtcgctcatacaaaaccgcactgtcaaaaaaagctgtattttacgatattaatgtgttaatatacatttttgatacactatgataatagttatagatacaatagtagtagattaacataccaccaactattcttaaattgaaatgtaaagtattttctgcttggaaatacatataaagaaatttcgtaaatattatttttaaattcacttcgttggcgttttaaatacaagctgcttcgaaaggttgcctactttttttcggtgcattgaaccgcatcacgttgtctatttggctgcctacttcatggaaatagaggcatcggcaatgaaatggtgtcaagttcatgtcattaaggtgtaattaacaaaaattagttgctgcttaacgggacgaacagcaatccaccccgaaaatccctcctcaactaaccaaaaaacaaaaaacaataaggaaaaaagaagaaaaacagacgtctcagcgagagcaacagtgtgttggctggaaagagcaacagctaac

SEQ ID NO: 6974 - DNA, 2846 bp, DROSOPHILA
ctcaggctccatacgaaatgtcgaatacctggtggtggctttcagtagtgttactaatcttagggctaatgcctggcatgagtcagcaggcggccctggccgaatcggattactatacggccggagtggtggagttcaaacagtcgatcttaagtctatcggcctggtcggattcccttgctggctatgtggagatcataaactctgagaacgccagtgccaccgacatcattgtgtttcccgagagcacactgaactccgcgggttccacgacctttgtgcccaatcccgaggatcagataaacccgtgtttgagtgaccccaatgccacctactatgaggagtttctggtgaccctgtcgtgcgcggcccgcaatgccagtaaatacattgtgatcaatctgaccgagaagcaaaagtgcgaggatattcccgaggatacgaggccatgtgcatctaacggactgaatgttttcaacaccaatgtagtgttcgatcgtcagggagtcgtggtgtccaggtaccgaaaggttcatctctatggtgaagcaaagaacagcacttttctgcccgagctgatcaccttcgagacagactttggggtcaccttcggtcatttcatctgcttcgacatcctgttctacactcccgcccatcaactcatcgtggagcagggtattacggacttcgtgtatccggccatgtggttctcccaactgcccttcctcacggcaaactggaacatggcaaagaattattgggggtttttccttttctgtttagcccttggattaatgctgaatttgagtcagcaggcttcacttttcaagagagatttctatacagctggtgtggtggagtttgagccatccaatgaattgtccgacaatctagctggctatttggagataatccagtcgcagaatgccacttctacggacatcattgtgttccccgagagcacactgaactccgcgggttccacgacctttgtgcccaatcccgaggatcagataaacccctgtttgagtgatcccaatgccacctactatgaggagtttctggtgaccctgtcgtgtgcggcccgcaatgccagtaaatacattgtgatcaatctgaccgagaagcagaagtgcgaggatattcccgaggatacgaggccatgtgcatctaacggactgaatgttttcaacaccaatgtagtgttcgatcgtcagggagtggtggtgtccaggtaccgaaaggttcatctctatggtgagcccaagaacagcacttttctgccggaactgagcaccttcgagacagactttggggtcaccgagaataaattctatatagctggtgtagtggaatataggccaacgtttatgggcggcacttcggaacagctgttgcaagcgaatctggctggttatctggagatcatggcatctggcaatggcactacggacatcatagtctttccggaggccacactaaatagtgtgattaccctgacagcggtgccgaaatttacggagcaaagtttgtgtgaagaacagggagatgatgatccggaaatagcaccattcctaagatctttggcctgtgccgccagggaatatggcacctatttggtggtcaatgtcaaggagcgtgtttcggagcagtgtacttcggatgagacatgttccagtcgtggctattcgattcacaataccaacgtagtgttcgatagacaaggagcggtgatatcacgctataggaaatggaatctttacttagaaccatccaccaatcgaactgaatcccctgaaatagccacctttacaacggatttcaatgtgaccttcggtcatttcatctgctttgatatgctcttttatacgccggctcaggatttggtggagcaactgggcatccgccatgtgattgtcaccaaaatgttcaactcggagctgcctttcctcttggcagcctctcaatttcagcagggctgggcgtgggccaatcgggtgaaccttctggcctccggaggaagtcttccgcagggtggaataagtggcagtggaatttacgcgggtcaacagggcgctctggcgagactcatgatcacggatgagctggtgggtcagagaaagttgctcctggctaaagttcccctcgatcccgaggagccgatagccacggatgagatcttggaacccgaaatcatgactcctgtgaaactaaaacttctgcagcaaccggaactaaagaactttaccacctgggagttgcccatggtccggggcagttcggtggacaagagaatatgccaggaggacttgtgctgcgagttccgggtcacttggaccctggaggacactcaaccggaatataactaccgattgggagtttgggtgggacaaaggcgctacgaggaggagcagtacagtgccatccggctgtgtggcctgttcgcctgcaaaggtgccagtgtagagagctgcggcctggttagcgaggaggaggtacacctgcaggatcaccgagttgtgttcaccgacctgcagatccttggcgagtttgtacggaggccacgacgtctcatattgcccagcacccttagctcctccagtttctatgccctgcaaccatcccaattagcatggtccatggaggaattggctaatgtaacgcggattaagatggagctgcgacaaccgcacagccagctaatgaccttcgccatatatggcaactatttcgatgagtatgcaaatggtggagctggaagattgggaaccctgctgtttctcctaatcacgccgctaattatgatgcatctatttcgggagtagggcgatccacactacatttgt

SEQ ID NO: 6975 - protein, 918 aa, DROSOPHILA
MPGMSQQAALAESDYYTAGVVEFKQSILSLSAWSDSLAGYVEIINSENASATDIIVFPESTLNSAGSTTFVPNPEDQINPCLSDPNATYYEEFLVTLSCAARNASKYIVINLTEKQKCEDIPEDTRPCASNGLNVFNTNVVFDRQGVVVSRYRKVHLYGEAKNSTFLPELITFETDFGVTFGHFICFDILFYTPAHQLIVEQGITDFVYPAMWFSQLPFLTANWNMAKNYWGFFLFCLALGLMLNLSQQASLFKRDFYTAGVVEFEPSNELSDNLAGYLEIIQSQNATSTDIIVFPESTLNSAGSTTFVPNPEDQINPCLSDPNATYYEEFLVTLSCAARNASKYIVINLTEKQKCEDIPEDTRPCASNGLNVFNTNVVFDRQGVVVSRYRKVHLYGEPKNSTFLPELSTFETDFGVTENKFYIAGVVEYRPTFMGGTSEQLLQANLAGYLEIMASGNGTTDIIVFPEATLNSVITLTAVPKFTEQSLCEEQGDDDPEIAPFLRSLACAAREYGTYLVVNVKERVSEQCTSDETCSSRGYSIHNTNVVFDRQGAVISRYRKWNLYLEPSTNRTESPEIATFTTDFNVTFGHFICFDMLFYTPAQDLVEQLGIRHVIVTKMFNSELPFLLAASQFQQGWAWANRVNLLASGGSLPQGGISGSGIYAGQQGALARLMITDELVGQRKLLLAKVPLDPEEPIATDEILEPEIMTPVKLKLLQQPELKNFTTWELPMVRGSSVDKRICQEDLCCEFRVTWTLEDTQPEYNYRLGVWVGQRRYEEEQYSAIRLCGLFACKGASVESCGLVSEEEVHLQDHRVVFTDLQILGEFVRRPRRLILPSTLSSSSFYALQPSQLAWSMEELANVTRIKMELRQPHSQLMTFAIYGNYFDEYANGGAGRLGTLLFLLITPLIMMHLFRE

SEQ ID NO: 6976 - DNA, 7018 bp, DROSOPHILA
acttctcgagtaatacttagtgataactgcaactttatttaacatgctaagcgccaaagctttatgagtacataatacccatagctcgataaagcaatcatagaagacttaccacagtcaagcttataatctataggaccccatcgttgatgggtaaatgctttttatgtacaatcgtagttcccctaaagacatgccttacaaatgctaagggttgcgtagagccctactaggtacgtgttagtagtgttaagcgtgtgatttagtgttaatatcacaagggtgtgtgggggagtgtggcctgattgagtcaccgggatgattcagttaggcactttctccgagacggtatcaagacctttcaccgtgttagtagctgaatcgcctacaactaaggttacatcactgtgaaaaatcgaaagaagagagcacagcaaaatacgggttgagggtttagttttagttcagagatgataaccaaatgtagattagtaaatagaaagtaagtacagatgagataagattagaatcattaggaagttaggccgatttggttgaaagcagagcgggaaaaaacttaatcacaagcaatgggttagcagagaatgcttttaaggaagaagatgcaaatcgagagagtttgtgcattcgagtgtgttctggatggttatatggttgaatggttggaatcaaaaatcgggaacatacctggcgtacgtcgagttggcgttctttatcgaaaagctgttctggcttggcaacacaaaacgctgcacccactgtaaacagagaataccttgagtaccagttgatgaagtaggcataagccctcaaagcccccaagaaccatatgtggtcagtcacgtaatttgataaagtcagtccgttcagtgcggtatctgtgatgctttaaaatgtgtcaaaaagttcgcctaatttgtgattctctaagcccatttgataagtgacccaactagttgcggccaagtacttacccggctgttcatcaaacgctgattgcccatgcaggcagccatgtgtatcacaaggtagaggttgaacagtatatacaaaatggcaaaaatacctgcaattggcaaaaggaaaaatacattagattcggtttaaattgtggcaattgactactcacagactagtgccagcaagccgcctttaatttccatattctctacttgcaccaccacaaagtacaaattaacgccaatcactacaatggtgagcagtatggatacgattttgttgcccctgtgaatacaaaaatttaaagaatgcacgataatcaattaaaagtgtctgtatcacttacagtccattaacaaactcgcccattatggcggcgcacgaggtgaaggcgatggtgggtatggcagcgaatggcagctggagcgacatcaccgcattcaggatatcgttcatgctagtcaaatcttccatcttgctgaacatggccaggcagaaggtgggaataatggcaatgcagcgcgtgaccagcacgcgacaccagcgcggccactgcagattcaagaagccttccattgagaactgaccggcataggtgcccgtcatggtggaactctggccagcagctagaatgcccacaccccaaatgtacatggcgacagctccaaatgtgcagccaaggaaaagtccgcccttgtatagatctgcatcgatgatcgcggttccatttacattgtccacaaaagacattttggcatcttcgtacatcgacttgtctttacacacttcaacctattggcccacaaagagttagcaatcattttacacataaattcaaaagtctacttaccacatcattattagttttgccatacatgccatgggcaaacacagccaccacaaacaggttaatgatgaaggacacaaacaaggctaccgacgcctcgatgaagaagtaaaaattcgcctcactaactttctttgtctggcgacggtctatatcgcgggactgttaacagaaaattgttatgtattggtatctaattacgaagtcacaaaaagctagttgtgctataccttaaccaaggcggaatgcaggtagagattgtgcggcataataacagcacccacgacacccacggcctgcagcaacacattcgaattgcagttagagcaccagggcacaaacattccctcgagaacttctccttgattaggggctgatacaatgtactgaaagatatgaaaaataaattaattatgacttaaaaccatttaaaaaatgattatggggagaaaacaaattgttcctagcttatattgagatttggttagaaataacaaaatacttgttactcgtagaaaaatcccctcgaggcacccccacttttttccattgtaattatctccaaaaaccaccatcggtaattgtacaattctgcattgtataatctaattgataagactggcattacacatcccatctggaattgttagtcatgtccggcagcatcatgtgcctggcaaacaaaagatgaagtatccagcacccacgctcagaaccccatttagtgtgcgagtgaagcttatctaatcatctccgtctggggcagaaagctcaagtacaattgtttataatctggcccgttaacatgatgcggtcgtaaacttaagagtaagaatatggggctagttaacgggctaacttcatccagaaatcgacaagtcaaatgtaaatttactactagcgatcattaaaataaacctaaacaggcatctcacaaattatttgccattgcggtcgttgcaattgtttaaacaattcgtatttgcactcacgtctggtaatttattctcttgactactttattgtcatttggcaaggggattttttgctgattttggcgattactttttatagttaagttatttttttcaactttgcattttaaacttacctcatagccgaatgagacagccataatggtgatgagggtgccgaataggaactccagcttgcgtagaccgtacttgtccagaaacaggaacgtgaacgtgtcaacaatggtgatcaacactccgccccacaaaggcactctacaaaatggggaaagcaccgcatgcatgagtactgggtactgcgataatccgctcattagatttgcttacactttgttggacagcaggtatatggcaatggccgtgccaatgacctcctgcatgtcggatccaataatggctatctctatcattatccacagtatccaacgtggcagacgcttgtactgtctgtagcacatctcggccagatgcaggcctgtaaccacgcccagtctgccaggaagataataaacgcttatatcatcatcttttttgcaaggtgtggagacccaattaccttgcagccaagcgttgcatgagcagacctaggactgtggcccacagcaagacccacaagatcttgtacttggccgccgcaccagactgcatatcggattcgatgttgccggggtccagatacgcaatggacataagaaaaccgggtcccgtgaaggcccacagcttgcgaaagctgaaacccacctgcagatcaccagatattagataaagtttgagtagcattgctattcaagcgggtcttacgtttgtgctatcatcgtcgggtatgaggaccttctcgtcgctaaagtaggcctgcttggcggcgggtttcaggtaggtcgtctcgttgagtatctgctggtggtgcagctggttgctccgctgacttcctccgccggatgcgccagacgatccgcccggtccatctccaccggcacccggctcgtggtaggcctcattcgaagacatgctgcacagaagaggcgaggttagactggacctaattcgagtttccacatgctgctatattcccgtccactgcccattgtcgactactctaatttgtattttctatttgattgtttcacctggcatcagcttatgattcccaccattttcatttaattgagcatctgtgtgtgattctagctcaattagcattatcatattgcacacaacaaacaaaataattttgcgctataattaagttttttgcaccatatagttttatttggggatttcaccataatcaagagcaaagtcacagtaacacgttttattttttccgaaacgcgcgtggcaaaatatgaaaacaataaatagttcgagaggcattagctcgggggtaactgataacgcgtccataatattactgaaatttgcttatattatgcgggtatataaggaaataaaacgagctcagtgattcatgaagtccagtaattgaaatgcctctgcccaatttacccagagaacttgcagatatttcgcatttgcagtcgtatagatatggatggtcgaaaacaagactacttgaacataaacacgagtccattgacccgtgtatcgatgtgaaattttggactgtttatttggtaaaagcgattacaagtgcatttcgtatacaagatgcctgagcagtcttggctgctcttcaacgcaatacattgaatgtagagccaagtggctcaccttgacaaacgcgactgccccactgatgctacatatctgctataaggctttccacatcgcttcattgatgattgaatcggagcaagcaaagacaaagagctcgagagcatcgtgcaatgtctacttcacattatatgtggcacttggacgggtacatttggcatatactataagtaaccgagttggccatatcaagccgccattaatggagcttaaatcgcgctgcagtggctcgaaggaaatgtgtaacaacgaaatgtcggaggagggtgtttagttcattggaacacttttgtgttatattgtgtggcgcagactgctctgtttacccagttgtatggcaatacccacgcccccaaaagcggaattctagccgataagtgtataatcagccacatatttatgtacgtgttcctttgccactttagtgcccagttggacgctgtaaattatgacaattggtaatcaaaaaaaaaaaaaacgaaccatttccattaagagtccaaattaagtggcaccaaaaaatatcatgagtttatttagagaaaatatatattttaaactgcgtaccattttgcgcagtcagcgggcaaaagcaatttatattgtatattgaagcaggcgaaacaaaacacttgacaacaaaaaattgacaaatgcagataacagtaatttgaaaatagaagagcaatacttatcagcccacattgttaagtcgcttgttaaaaaaaaaaaaactaaaacagtaattatacgatttccgctgcctaaaatagttatttctatgacagttctcgctggcaataaaagtagtgaattgtgtctggaaaactatccattgttaggggattttaaagtgcgaatagcttgtcaacaattgttttctgtttacggttatttacggttaagaattatacattactctctttgccggttagagggagagcggacggagagagggtgcaccacgttgtttttgttattagcgcacacctgcgtgcgcactcacacacacacacgaaatattgatggagatgtaaattattgggcaactcaggttaaacagcacttcctaccagttaatggcttacttgcaactgggggttaactaattggagccctcgcctttattatatcacaatctcggcacttgtggcagcttataaatgcattttcctgcttttctcgcggagcaatttacgaaatttacgaattccgtgacgttgtacggccgaaacaagagtggtgatggtcgcagtaaacgaagcagagaaatgacgaagaagcggacggtttggctgccaattgctgacttagttaacgacaattgacgagcgtgcaggcaatttgtgctcagccgtgagcgcagctctttgtttattaattttcctcacaatatttgagattctgccaccagctgctttcttttgcacgcacactcactcgcctctcacatgcacactgtcttttcgtctgtgcccaatgtggcaacctgcggccactctctcttctttgacttgccgaaatctggcaacactcgacaagagtactaaccttatcggccaaactgaagttttaactctgagcccacgcgatcgagtgactgactatagcattttgcggtagcccctatttattcaaaatatctctctctcgcgtcggcaagtgagaaaaagaaagacagaaagagagagagagagagtgtgtgcgtgggagaaagaccactgcttttttttgaggggagattttttgataaggcctgagatttggatttttgaaggccccagaaataccgcctaagatttgaacatgcatttgaaataccggtttgtacatcgaccgcaggttaccgttagaaatgttatgcgggatacatagttaagttgcataccctttgagttacaatcactagttaataatatctacgttattaccaacacgcacactttatcgtaatacctccttgaagtttaatttatacatcaactttatcagtcaaaactttgatttcgtctgacacttttttcgattacgatccgtcgccaataattgcgataaatcttatcaagtctttttgggattggcgctcaaatttacaatatggccgtacatcctacttatgtatgttttttaactaattaatcaccacaatgcaaagtactctttctttgttgagcccatatgcactcacatttgcaccatgaatcatgtcagtagctcgtttcatgtaacaatttctactttgccagattacgatgcgttcggaacaggcagataagaattcggcccatccaagaaaggccttgacagttctaccccaaaatagagatatcctcgtgatattagaaggaacccaacaatatgctcgttcttatcttcttatagaaatttgtgaattcccgtatccaatgaaatcattttacttagtaaaatgatttgttaggccttaaaaaaaaacaaaaac

SEQ ID NO: 6977 - DNA, 2158 bp, DROSOPHILA
cagtgtgcatgtgagaggcgagtgagtgtgcgtgcaaaagaaagcagctggtggcagaatctcaaatattgtgaggaaaattaataaacaaagagctgcgctcacggctgagcacaaattgcctgcacgctcgtcaattgtcgttaactaagtcagcaattggcagccaaaccgtccgcttcttcgtcatttctctgcttcgtttactgcgaccatcaccactcttgtttcggccgtacaacgtcacggaattcgtaaatttcgtaaattgctccgcgagaaaagcaggaaaatgcatttataagctgccacaagtgccgagattgtgatataataaaggcgagggctccaattagttaacccccagttgcaacatgtcttcgaatgaggcctaccacgagccgggtgccggtggagatggaccgggcggatcgtctggcgcatccggcggaggaagtcagcggagcaaccagctgcaccaccagcagatactcaacgagacgacctacctgaaacccgccgccaagcaggcctactttagcgacgagaaggtcctcatacccgacgatgatagcacaaacgtgggtttcagctttcgcaagctgtgggccttcacgggacccggttttcttatgtccattgcgtatctggaccccggcaacatcgaatccgatatgcagtctggtgcggcggccaagtacaagatcttgtgggtcttgctgtgggccacagtcctaggtctgctcatgcaacgcttggctgcaagactgggcgtggttacaggcctgcatctggccgagatgtgctacagacagtacaagcgtctgccacgttggatactgtggataatgatagagatagccattattggatccgacatgcaggaggtcattggcacggccattgccatatacctgctgtccaacaaagtagtgcctttgtggggcggagtgttgatcaccattgttgacacgttcacgttcctgtttctggacaagtacggtctacgcaagctggagttcctattcggcaccctcatcaccattatggctgtctcattcggctatgagtacattgtatcagcccctaatcaaggagaagttctcgagggaatgtttgtgccctggtgctctaactgcaattcgaatgtgttgctgcaggccgtgggtgtcgtgggtgctgttattatgccgcacaatctctacctgcattccgccttggttaagtcccgcgatatagaccgtcgccagacaaagaaagttagtgaggcgaatttttacttcttcatcgaggcgtcggtagccttgtttgtgtccttcatcattaacctgtttgtggtggctgtgtttgcccatggcatgtatggcaaaactaataatgatgtggttgaagtgtgtaaagacaagtcgatgtacgaagatgccaaaatgtcttttgtggacaatgtaaatggaaccgcgatcatcgatgcagatctatacaagggcggacttttccttggctgcacatttggagctgtcgccatgtacatttggggtgtgggcattctagctgctggccagagttccaccatgacgggcacctatgccggtcagttctcaatggaaggcttcttgaatctgcagtggccgcgctggtgtcgcgtgctggtcacgcgctgcattgccattattcccaccttctgcctggccatgttcagcaagatggaagatttgactagcatgaacgatatcctgaatgcggtgatgtcgctccagctgccattcgctgccatacccaccatcgccttcacctcgtgcgccgccataatgggcgagtttgttaatggactgtaagtgatacagacacttttaattgattatcgtgcattctttaaatttttgtattcacaggggcaacaaaatcgtatccatactgctcaccattgtagtgattggcgttaatttgtactttgtggtggtgcaagtagagaatatggaaattaaaggcggcttgctggcactagtctgtgagtagtcaattgccacaatttaaaccgaatctaatgtatttttccttttgccaattgcaggtatttttgccattttgtatatactgttcaacctctaccttgtgatacacatggctgcctgcatgggcaatcagcgtttgatgaaca

SEQ ID NO: 6978 - protein, 486 aa, DROSOPHILA
MSSNEAYHEPGAGGDGPGGSSGASGGGSQRSNQLHHQQILNETTYLKPAAKQAYFSDEKVLIPDDDSTNVGFSFRKLWAFTGPGFLMSIAYLDPGNIESDMQSGAAAKYKILWVLLWATVLGLLMQRLAARLGVVTGLHLAEMCYRQYKRLPRWILWIMIEIAIIGSDMQEVIGTAIAIYLLSNKVVPLWGGVLITIVDTFTFLFLDKYGLRKLEFLFGTLITIMAVSFGYEYIVSAPNQGEVLEGMFVPWCSNCNSNVLLQAVGVVGAVIMPHNLYLHSALVKSRDIDRRQTKKVSEANFYFFIEASVALFVSFIINLFVVAVFAHGMYGKTNNDVVEVCKDKSMYEDAKMSFVDNVNGTAIIDADLYKGGLFLGCTFGAVAMYIWGVGILAAGQSSTMTGTYAGQFSMEGFLNLQWPRWCRVLVTRCIAIIPTFCLAMFSKMEDLTSMNDILNAVMSLQLPFAAIPTIAFTSCAAIMGEFVNGL

SEQ ID NO: 6979 - DNA, 4268 bp, DROSOPHILA
ctacatgcaactagaatcacgatgaccccacatcacaagaagttcggcacattcttagttctcatccaacaaaaatcaccttactctgggttctgggtgctctaatagactccaaaaaatattttgggaacctttatgctgtgatcccgatgactgcctttaattccaggtataaatattttgtaatgtagggacgcatttaggatatatcgaaaagaatgaatatgcaaaacgagaagacatttactaatttcaaaaggttgtggcacagtggcaacatatgtgaaatggaatacacctattgaccatattgctgcttagccgaaggatacaatcgattattcgttttgctcatttctatcgatactaaacctaactaaaatacgataggaagcctaacttaaatgatcaaaaaattattttaccatatctttgccatttcattcaatatattgaaagggtatctgatatatgtggaaattcttttgtattagctgttaaatacgcctattgtcagaggagtccagaaaagcaataaattgaaagagatcaaaactggtgaatactatttgtcgtaaatttagctcacctggtatatatatcatatataattatttatttatttatttattatgataggtagaatagtttacaatactagactaacttaaatagtaagcataagctacagctatattgatctacaatgctattatatctttatctactttatatctaatttgctaaatatatcatatatatgcctttttatcctcttccgttgcagcgaaaacttattatacaagaataaagaatccgcataatctttttactgaaacaattagctttaaattagttgccttgcattttatcattgaaattgttaacgttcacgcatcaattgggctgtgtgaataggtcgcataattgttttggcattaattattttaagaggctgtcgacggtttttttttaccgttatgccatctggtaacactgcccaggccgcaaatggaatggattttcgagagctagataaattaaactggcgtttgcatctgagtaacaataacaatatcgttaattatagtgcgaaccgacacctcggtcctgatgcggctgaagagcgacgcccggagctcttagtcagccaagtcaattgtgggaccggtgtaaatacaatgggcacaaatcaaaaacgagcagcaacaacatcagcgcaggccgtagcggtggacgagcaggtcgtgggagccgtgggtggtggcggggcaaaggcagaggagtgccctgcagcgaccatggccgcagaggatggtgataaggcaagtgactgccgctttaagcacaaaaaattatgttgattatgttatgttctgtttatcctttaaaaaggtggaaagtccttcttactgcgaactggatctggacgtggcaagctacgggctagcagcagctgccctctcatcctttgaagccgccgcctgtggctataattccagccgaacttccataaacaactcaaccgaaaacctgagctatgccagtgacaatatttacggcgacgatataattttgctggacgacaacgacatgaacgcggaggagatatctatcaactccgacgactgcgtctacgcttaccgtggtgaaggggctgattttgacatgaacatggatatcatcgccacgggaagggttggcgggcaacacttcgaccttggccgaggaccagtgaatgctatgggaggcgatagcctcatttacggcgaagatgagacggagtttcttgaaatggactttgagccagacccctcatcagagttggagcttgttggcggaaccaccgatatgaccatccagcctcaggccaatttgttgttaatgcaacgcgactatagccaaatgaacagcataggcggaactacttctacgcaggaaggaaagctgcacagctcgcccatagatgattttccgcaggaggacctaatgcagcagcaaaagctacgccttagtaagaagttcgcgcgcatcagcttgaatttagataaaatcaaagacgttggtgctggtggaagtggcgtggacatagatttaaatgagctaatagttattggctcggaaaagcaggctgaatcctccggaagctttcggtcagtgaagtcttatcaggctcattccttgcccaacacattgcacacaggctcaaatttttcgcgcagcactagtgtccccagcgaacacccagagcctaagctgactggtgctaagccaaagcgttttttgcacacctcgtctgtgatgactaaaagctcctcatataagtcgcggcgctctcatacatcagctagctttgatgaacgttgctacagctgcactgatttccgggcaacaacatgtcagcagcaacagtcagggtcgaagtcaaagcaagatcaagtgcctcctatactggtggctcctgcgactgttggggctttgaccacgtcttcttcgtgcacgggccaatttgacttgggaataaccgaggagaactgcttagactgcctagaaaaggagttcttggccaataccataggcaaagtcgtagacccgggaacatgtcctaagtgtcgtagatcagctggcagtcggggcagtagtatttcgctttactcacggtcggaccaggttcgctgtcgaagcgggtccccagtatactgctatggaggtccgttcgccggctggcacagcttaatagcaaccggaattgtttctggttccaatttgggtccaccctgcaaccaaaggtttatttcgtgtgataatagtttcaacggtctacaggtatgtaaacgcatgctataataattgtgtataatgaatttacccgctctcgcgaatagctcctcaatcaaggctatctgactgagccactggtggcaagtctgtctacaggaaagacgtgcgacgaggagcacctagtgcaagcgctagataaactgcgcgtaccctatgacagggagctacttcatggctatttcaagcaattggccaagcggcgacggacggaaagtagtgtcaatctcaagcagctattaatacaggcctcaaagcagcagggaaaccatcgcaagctcaaacggttgatcgagatggcgacccaccaacagcttattgtacaatttaagggggtaaaatcaaatacatattgtacacacttttttaaactaatgcaacacatttttcaaacagaaagctgcagacaaaactgaatgggtgcctataaatgtaagggacatacttaatgcctgggcacgttgtcgagatctttccctccttcagcaactagatgaccgctttcattgcgcaaacgtgatgggtaagatgttctatagagttgttttttcatagtttgtatataaaagttttactcggtattgatatattacatatttacatattcagtaagaaaaatgttttctaatcataaaatagaacgctatagtcggcttcgccgattttaagatacccgttactcagctagtagaaatgcgatcgcgaaatttcataatttttctggaatatcgatagatatacaaatatatatatatggattagtaagtattgttacccctgacacagagacactaaacaagttcttttctttaattgtaaactaatgaaattttgccaatatacgcaagagggaagcaatttgaccttaattaggctagtccgtgagactacataattgctaccctaagaactttagggaagtcaattaatgacgagagaatcttatagtcgatttattcaaatttcagatttccgttacttagccagtgggcgtaacaatttttgtaaggttaacgcagaatacaagtcatttcaaattgtattaaattgttatttttttttacaaaataacattctatttttttcaggaaaggttggtcacatcgtgcgtcaggcaacagtagcagcatccacacaagcacaggcatcgtcgtcaacctccttttgtaaacgcaccctgcccgaatatttaatgatcccgcagtattacatgagtggggtactgactctaacccgcaaatgttaggacgtatttgcacaaccactcatttattttcacattaagccggatacacatcatctctctagaagtgcttagcccagttttattgtttaattttttttaataagtcatcttccatattaaatcaggtgatcgcatggccgtgacccaccgcttaagtcgggttcaaaagtctctccgctctaaa

SEQ ID NO: 6980 - DNA, 1960 bp, DROSOPHILA
ccaggccgcaaatggaatggattttcgagagctagataaattaaactggcgtttgcatctgagtaacaataacaatatcgttaattatagtgcgaaccgacacctcggtcctgatgcggctgaagagcgacgcccggagctcttagtcagccaagtcaattgtgggaccggtgtaaatacaatgggcacaaatcaaaaacgagcagcaacaacatcagcgcaggccgtagcggtggacgagcaggtcgtgggagccgtgggtggtggcggggcaaaggcagaggagtgccctgcagcgaccatggccgcagaggatggtgataaggtggaaagtccttcttactgcgaactggatctggacgtggcaagctacgggctagcagcagctgccctctcatcctttgaagccgccgcctgtggctataattccagccgaacttccataaacaactcaaccgaaaacctgagctatgccagtgacaatatttacggcgacgatataattttgctggacgacaacgacatgaacgcggaggagatatctatcaactccgacgactgcgtctacgcttaccgtggtgaaggggctgattttgacatgaacatggatatcatcgccacgggaagggttggcgggcaacacttcgaccttggccgaggaccagtgaatgctatgggaggcgatagcctcatttacggcgaagatgagacggagtttcttgaaatggactttgagccagacccctcatcagagttggagcttgttggcggaaccaccgatatgaccatccagcctcaggccaatttgttgttaatgcaacgcgactatagccaaatgaacagcataggcggaactacttctacgcaggaaggaaagctgcacagctcgcccatagatgattttccgcaggaggacctaatgcagcagcaaaagctacgccttagtaagaagttcgcgcgcatcagcttgaatttagataaaatcaaagacgttggtgctggtggaagtggcgtggacatagatttaaatgagctaatagttattggctcggaaaagcaggctgaatcctccggaagctttcgcactagtgtccccagcgaacacccagagcctaagctgactggtgctaagccaaagcgttttttgcacacctcgtctgtgatgactaaaagctcctcatataagtcgcggcgctctcatacatcagctagctttgatgaacgttgctacagctgcactgatttccgggcaacaacatgtcagcagcaacagtcagggtcgaagtcaaagcaagatcaagtgcctcctatactggtggctcctgcgactgttggggctttgaccacgtcttcttcgtgcacgggccaatttgacttgggaataaccgaggagaactgcttagactgcctagaaaaggagttcttggccaataccataggcaaagtcgtagacccgggaacatgtcctaagtgtcgtagatcagctggcagtcggggcagtagtatttcgctttactcacggtcggaccaggttcgctgtcgaagcgggtccccagtatactgctatggaggtccgttcgccggctggcacagcttaatagcaaccggaattgtttctggttccaatttgggtccaccctgcaaccaaaggtttatttcgtgtgataatagtttcaacggtctacagctcctcaatcaaggctatctgactgagccactggtggcaagtctgtctacaggaaagacgtgcgacgaggagcacctagtgcaagcgctagataaactgcgcgtaccctatgacagggagctacttcatggctatttcaagcaattggccaagcggcgacggacggaaagtagtgtcaatctcaagcagctattaatacaggcctcaaagcagcagggaaaccatcgcaagctcaaacgaaagctgcagacaaaactgaatgggtgcctataa

SEQ ID NO: 6981 - protein, 592 aa, DROSOPHILA
MGTNQKRAATTSAQAVAVDEQVVGAVGGGGAKAEECPAATMAAEDGDKVESPSYCELDLDVASYGLAAAALSSFEAAACGYNSSRTSINNSTENLSYASDNIYGDDIILLDDNDMNAEEISINSDDCVYAYRGEGADFDMNMDIIATGRVGGQHFDLGRGPVNAMGGDSLIYGEDETEFLEMDFEPDPSSELELVGGTTDMTIQPQANLLLMQRDYSQMNSIGGTTSTQEGKLHSSPIDDFPQEDLMQQQKLRLSKKFARISLNLDKIKDVGAGGSGVDIDLNELIVIGSEKQAESSGSFRTSVPSEHPEPKLTGAKPKRFLHTSSVMTKSSSYKSRRSHTSASFDERCYSCTDFRATTCQQQQSGSKSKQDQVPPILVAPATVGALTTSSSCTGQFDLGITEENCLDCLEKEFLANTIGKVVDPGTCPKCRRSAGSRGSSISLYSRSDQVRCRSGSPVYCYGGPFAGWHSLIATGIVSGSNLGPPCNQRFISCDNSFNGLQLLNQGYLTEPLVASLSTGKTCDEEHLVQALDKLRVPYDRELLHGYFKQLAKRRRTESSVNLKQLLIQASKQQGNHRKLKRKLQTKLNGCL

SEQ ID NO: 6982 - DNA, 2886 bp, DROSOPHILA
cggtgaagcgcaaatggcgtcgaaattgaaaatcaagatgacttttcttgaagactaggaaaatatagagcagagatggagaggcgacatgaatacagaaacgcaggcaaatagcaaatacaggtgctattcaggtgcgtacgcatgtgtttgtttcagacatttcgattactttttgagtggttccactaaggtttctcttcctcggcccccaaattgcagcatccgcaagcttcgggtctcatgaaatatgtagaccagtaatatctgggcggggagaggggttgcggagcggtaacaggggggtggcacacaaaaggcggcgcaaattactaaaatatgcatgcgactcgccatggccattatcgtgggcttcctttgcccggagaagtatcgggtccatcgaggctacgtgccgggaatgtccaagagattgcccgccggacactcatttcggtcatgtcaatggcattgggattggactacccctcctccgcttcgcatttgtggtttttgaaactgcacgcatttgattgcgttattgaaattgactgggccggtggcttcattactataatgtcggtgtgccggtgaggaattcaattataaatgccttcggattccaggatgccttggcttatgaatataaatctgctgcctgtgcgaaggcggagtgaggcgtttaagtaattacacatttacttgatgatgtcgccgtgggcaaagttaaattaaatgaagatttcgttttaattaactatgtcggctatgtggtctagtctgtgtaagcatctagcaatatttggacctcagttttccgtagtttatatctgaagtattgcaacttgtaaataaaagtttgaagtttgaatatcagttacagccatgtactaaatcttccattaggtaatcgataagtgctttgcttataattcttatcggtatcgatcaagccaaccgtttcgttttttcgtacccctggtagtaaacagctgatacaatttgcagtttatttaacaagtgaacattgcgtattttctaagccgaatctagtaaatagtgtgaaacaaaatggccctgcgacgctgtcacttgaacccgaagaaaacgcttttcctgttgtgcgacattcaagaaaagttccgaccggccatgccgctctttgataacatgatcaaaaacgtcgacaaactagtgggttgaactttgattttgatattgatccttatcattaacctgtgagattaactcaaaaaaattttagactcgggcgggaaaggctttagatgttcctctgattgtaaccgaacactatccggaaaaactaggaaaaacagtggcccaactggatgtaagccatgcgaagctggtctccggtaaaacccttttcagcatgtttactcccgaagtcaaggctgtgatcaaggatatcttcaatgacaagccagaggatgtcgtgctatatggcctcgaggtgggttaaggagaaaaacactcttattcgaaaacattaaattcaaaatttcaacagtcccacatttgcgtggagcagaccgccatcgatctcctcgagcaaaacatcaacgtatacatagtggcggactgctgctcctccaggctgaaccaggatcgagatctagccctggatcgcctgcgtcaagcgggctgtgtgatcaccactagtgagagcgttatcttcgacttggttcgagataagaacaaccccaagttcgatgtggtccggaaattggtgaaccagccgtcggtggatatggaactcacgcgcaacgggagcggagtgccagcgggcagtgccaagctgtgagatagcccctcctgtctaaatatctgtttgttataaagccaattgcatttataaaaccatcatgcagaattgtgcttttcaaggatacgcggatgggaaatgggccgaatgggccgaatgggagcagcacccatttaagttgtcatttccgtaacatattccaatggccccgcacaatgggcgagtccatatttgaatttgccgtttaacaatagccccaatggcttcccttccggtgagttcccccactttgccccatttccgctgggttccttattatgcggatgacaatgcgtattttatgccgcctgtcggcattgattataaagctgagtgctgttcggtaaccttttatttgtgcagcagtgtgggatgaggaaatcatcatcattccacatgacccattcaggggctctgtaagcgcaatgtctaattggacagacccttggatgaagatgctgaagcgctctatgaactgtagcccaacagctctcaatatgagttctaccaggggaacgttttattggaacaacaagacattacctcaccactcattttatggaaaaaaccgccgttttataagttaagattaacataacatcaaagtcactcggtcactcttcaaccttcggatggaagccggttgcatctgcggtgtaagtcacgcgaatttgcttgccatcttcgccgggaaggaagtattcgccctggatgccgttcacattgccttgagctttcacttggatcccattgctgaccgtgatctcatgctggaactgcccagctccatccaggttctggcggttctccgacttcagaagttgcgcctgcagatcctcctcactgcagctggccaaaacgacgaaaagggcaaagataaggctctgaaattgagaggtggctgattatccaatagtctgtttgaaatccgattaaactcacatatttcagcattttggagcagcttcttgaaatgaaacaatgcccgtcggccttttatactatactccgaagctgcctagcccactaaacgggtttcaatcgcatctgctaatgaaatg

SEQ ID NO: 6983 - DNA, 759 bp, DROSOPHILA
atttgcagtttatttaacaagtgaacattgcgtattttctaagccgaatctagtaaatagtgtgaaacaaaatggccctgcgacgctgtcacttgaacccgaagaaaacgcttttcctgttgtgcgacattcaagaaaagttccgaccggccatgccgctctttgataacatgatcaaaaacgtcgacaaactaactcgggcgggaaaggctttagatgttcctctgattgtaaccgaacactatccggaaaaactaggaaaaacagtggcccaactggatgtaagccatgcgaagctggtctccggtaaaacccttttcagcatgtttactcccgaagtcaaggctgtgatcaaggatatcttcaatgacaagccagaggatgtcgtgctatatggcctcgagtcccacatttgcgtggagcagaccgccatcgatctcctcgagcaaaacatcaacgtatacatagtggcggactgctgctcctccaggctgaaccaggatcgagatctagccctggatcgcctgcgtcaagcgggctgtgtgatcaccactagtgagagcgttatcttcgacttggttcgagataagaacaaccccaagttcgatgtggtccggaaattggtgaaccagccgtcggtggatatggaactcacgcgcaacgggagcggagtgccagcgggcagtgccaagctgtgagatagcccctcctgtctaaatatctgtttgttataaagccaattgcatttataaaaccatc

SEQ ID NO: 6984 - protein, 208 aa, DROSOPHILA
MALRRCHLNPKKTLFLLCDIQEKFRPAMPLFDNMIKNVDKLTRAGKALDVPLIVTEHYPEKLGKTVAQLDVSHAKLVSGKTLFSMFTPEVKAVIKDIFNDKPEDVVLYGLESHICVEQTAIDLLEQNINVYIVADCCSSRLNQDRDLALDRLRQAGCVITTSESVIFDLVRDKNNPKFDVVRKLVNQPSVDMELTRNGSGVPAGSAKL

SEQ ID NO: 6985 - DNA, 3726 bp, DROSOPHILA
agctcgtaatggtggaatccctgtctgagactagcctacttaagttgagtaaggtctcctgtccttatcttatcagctgctaattcgcccataattatagcttaacgatcgcctcgccatttgataaaatagcaatctagtgcccggaactaagtgattgtaattggctctggcgattgatataaagcacctggctaactgccggcgctttatttagcctctgataagagcaaacgattcgcacccgtcattgttattgtttgtatttgtacacaactattgctcccacgagactgtgagttattggatcagcaatttaactggcttggcttcccattcggccgtaaaactgtcaataaaccattatgattgactaccgcttatgagatgagcatcttcagctggaaaattaagttacttcatttgttttcatttctaaaacttcctcttctagttttggaagtatatgtataatttttctaaaaatgtttgtttgttttttgtttttatttaatattaatatttacctatgcaaagttaaaaaatctaggtttacatattttaaatagttaagaatcacatttatttagatgtagactagaggaatagtaagagtattggctctttcgcgccctcaaatatgtggattcactttcgatgcctccatatccaaatcattcttattgaagaatgcaacatatatgcctagaactcggttgcaccactgccagcggcacgaggaaagaattcaagtttcggaggagcctgtttgacgatttggcttgtaaactagtttcgcagcacaattttgttgaagctgcttattagctggcattgccaattttttgaacatgcagttcggtgacttgaggtgaacgcattggtcgttgcgccgctcaatgacgataaaatcgttcaacttggtggtaaagggtgaggagctggtacttcaatgcgcgtgtcaagttcgttgcaagagtcatttgttttcgcaggtcccatgtggggcgttcgccacctgcaggtactgttcctctttctgtgcgccaccttgatcgtggcccagaggttcaacatgagcgtggccattgtggcctttacgaatgccaatagcagcaacccaaattatccggaataccgactgacagagcctcagaagtcgtacaccatcagcagtcccttctggggctcctgctgcacccagatgatgagtggatacctatcgagtcgctttggagccaaggtgctgctgctgaccatcatgttgctcaccgctctgctcagcattgccacgcccttcgccttggcctggggcggctggcagctgctcttctgggtgcgattcgtccagggactcgccatgggcggcatgtggccctgcctgtacacccatctggccaagtggtgtcccaagaaggaggccaatcgcatgggcggcatcatgaccactggcttggattgtgggacaataatgggattcgctttgagtggcgtactctctgcatcgcccctcgggtggcccagcacattctacgtgccaggtgagttctatatagataatcatttactccttagacagccccgggtaacagaaacaactgcggaactcttctaaagacacgttaaactagcagtaaatcctaatgacacttttatagctgtatttatcattttacttacctacgacataactctaaagcaaaaactgattaagtatggtttaggcataggttttagcttatatactatattaaatagaacacatatatttaccaagtgttgatttcaatttcaggatacttaggcatcgtgtggtgccttactttcttgcgatatggcgccaacagcccatccgaatcgaaattcatttctctggcggaacgaaagcacattcaatttgccctcgagcagaatcaggtgattcgcggtgcaactcctccagtaccgtggctccagatcctcacctctcgtccatttatcgtcctggcgttttgcaaaatgagccaggcgtgcagcttctacacgctgatgcaacagattccgcgctacatccacggtatattccactacagcattgcggcaaatgccctgctctcagctctgccctttgtggtcatgctgatgtcatcctacggattcattttcctggctgaatacctaacccgtcgtcgagacatttcattgcctatcctacggaagaccattaattcctttgccacatggacccctgctgtagccctggttatcctatcctacgtcagcgatcagaatgtggtgggcagtatgttttgtctgattgcagccacagctgccatttccggacaggccattggcagttcccttaaccacgtggacttgtcgccaaactttgctggactcctgtttgggatgagcaacacactgatgtctgcggctggtgtgatatcgccaatcgtcattgggctgaccgtaaccaaagaggtaagtaatttggatagttaagtaaattgattaactttattttatttcagtcggatcgatcgcaatggcgaacagttttccttggcatttcggtgattctgttcctcggcaacttgatgtacctaatctttggtcaaatgaccgtccagtcctggaatgattccccatccaaagagaccgaaacagaagcatcaccaaagccccaggcatcggctccctcagttgccgaggaaacgatatccgtcgagagatttaactatttgtaaatgtatatttgtaataacgtaatcagtgctaatgttgttgtataaaaacagtttaaaatcacaatggtatttatgtcacgtatctcctgctgtgtggaaatcggtacgaccgaaatttgtatctctaagataataaacggaggaatcgttgattaaggacatcacgatggacttgaagcccaaaatggatgccagcttgtatttgagaaccacggacttgatcagtcccaccagctgaaccatcgactcttcctgttttgagttcgtggcattactttggatgtgcagcaaataactgaaataatataatcataacaaggaggaagataaagtcaggccagccaaacacataccccttaacaatctgttcgattacatcatcattgatgcgctgatggcacagatattcctgcagataattgactccctgaagcacaacgaattgagacaagatggcttcgctccaactaatatcataaccataggcgcgactcagaatcagagcttgaggtacgctagaatagaaacataatgacaaccaattatttaaatagttagtcctttgatgtaaagcttttgcataccttaaatggacgttgactagctcccgaaactgttccctagaacgcactccaatgacgctgacacacaaatgattcgcgttattgctgtgccttttttcgagtgctttgttgcacagatccagttgcatggccatcagctcggctcgagaaacactttgctgggcgagcagaagcttgttatccaacaaatagttctccgttgcatgtgtgtaattttccaaggcctgttgcaacagtgtttgaacctctacggagcattttagcttattggactgcgcggcaaaggcttgaattttggtaacaatctcttgggcctccgtagtccacatctccgccaactctttgtacatgaggaagtgcagcgccgctaggcgcagaagctctttcccattctttggttggtactctctgaggta

SEQ ID NO: 6986 - DNA, 1422 bp, DROSOPHILA
atgtggggcgttcgccacctgcaggtactgttcctctttctgtgcgccaccttgatcgtggcccagaggttcaacatgagcgtggccattgtggcctttacgaatgccaatagcagcaacccaaattatccggaataccgactgacagagcctcagaagtcgtacaccatcagcagtcccttctggggctcctgctgcacccagatgatgagtggatacctatcgagtcgctttggagccaaggtgctgctgctgaccatcatgttgctcaccgctctgctcagcattgccacgcccttcgccttggcctggggcggctggcagctgctcttctgggtgcgattcgtccagggactcgccatgggcggcatgtggccctgcctgtacacccatctggccaagtggtgtcccaagaaggaggccaatcgcatgggcggcatcatgaccactggcttggattgtgggacaataatgggattcgctttgagtggcgtactctctgcatcgcccctcgggtggcccagcacattctacgtgccaggatacttaggcatcgtgtggtgccttactttcttgcgatatggcgccaacagcccatccgaatcgaaattcatttctctggcggaacgaaagcacattcaatttgccctcgagcagaatcaggtgattcgcggtgcaactcctccagtaccgtggctccagatcctcacctctcgtccatttatcgtcctggcgttttgcaaaatgagccaggcgtgcagcttctacacgctgatgcaacagattccgcgctacatccacggtatattccactacagcattgcggcaaatgccctgctctcagctctgccctttgtggtcatgctgatgtcatcctacggattcattttcctggctgaatacctaacccgtcgtcgagacatttcattgcctatcctacggaagaccattaattcctttgccacatggacccctgctgtagccctggttatcctatcctacgtcagcgatcagaatgtggtgggcagtatgttttgtctgattgcagccacagctgccatttccggacaggccattggcagttcccttaaccacgtggacttgtcgccaaactttgctggactcctgtttgggatgagcaacacactgatgtctgcggctggtgtgatatcgccaatcgtcattgggctgaccgtaaccaaagagtcggatcgatcgcaatggcgaacagttttccttggcatttcggtgattctgttcctcggcaacttgatgtacctaatctttggtcaaatgaccgtccagtcctggaatgattccccatccaaagagaccgaaacagaagcatcaccaaagccccaggcatcggctccctcagttgccgaggaaacgatatccgtcgagagatttaactatttgtaa

SEQ ID NO: 6987 - protein, 473 aa, DROSOPHILA
MWGVRHLQVLFLFLCATLIVAQRFNMSVAIVAFTNANSSNPNYPEYRLTEPQKSYTISSPFWGSCCTQMMSGYLSSRFGAKVLLLTIMLLTALLSIATPFALAWGGWQLLFWVRFVQGLAMGGMWPCLYTHLAKWCPKKEANRMGGIMTTGLDCGTIMGFALSGVLSASPLGWPSTFYVPGYLGIVWCLTFLRYGANSPSESKFISLAERKHIQFALEQNQVIRGATPPVPWLQILTSRPFIVLAFCKMSQACSFYTLMQQIPRYIHGIFHYSIAANALLSALPFVVMLMSSYGFIFLAEYLTRRRDISLPILRKTINSFATWTPAVALVILSYVSDQNVVGSMFCLIAATAAISGQAIGSSLNHVDLSPNFAGLLFGMSNTLMSAAGVISPIVIGLTVTKESDRSQWRTVFLGISVILFLGNLMYLIFGQMTVQSWNDSPSKETETEASPKPQASAPSVAEETISVERFNYL

SEQ ID NO: 6988 - DNA, 10543 bp, DROSOPHILA
aataaaacttccctccagatggtgtagctggagtacgtagcattaattaggcagtgcatcttcgatatatcgcgttaagatttattgttgcacttgttacttaaatattgtattactactatataaatacattgaacatctagtgaaaagttctcatttacgtaatcgcaatcgcctgaccttgatggatgatttcgtctgtatagtttttggttgaatgaacagtacgtcttgggttgtcccgcctcacaacttcagtcagcgatagtaactctggctttcatttagttcgttagttggtagagaaccatcccgggacggtcccttgctattgttagtgacttaaactagcgctctatgtgtgtggatatctgggtctgtgtcgttctatgatgctatggtaattactcgttatcttagcgtataaaaggtagtagaaattgcaacacgttagcatggtttctttgagggtctttgacttaattcgaaagctaactacgtagtacgtacatacactaaggctctctatatacaataacacaaatgggaggagggtggggggttaacattttcggggagggtaaatattgcataacaaaaaatttaaatggaaaacaaaattcattgcaaacttcttatcgacgtaatgtataaactagtcaaaattgaaagcattgccacgttgaaatatgaacagttacatctctctatatccgatcctactctcttatcttacagttagtaatagtgtcagttagtcaactgggagataaacgttgcattaatatgtgtgttttgtgtgtccatggattaactcgtagacatttctatatttcacccaattatcaattatctgctcactagcgatggcgaatcacataggtatacacatttcttaatatgtacatctgcgctgggttcctaatcaaaattcctatccttatctttatctgtgcctgaatctttcgtgcgccgccgattagtaacgacgccgacgatgctactttttctttacggctgccttatggttgatcttctcctgcagttgccgtataagctgttgtatatcatcaacgttatacgcgtagattagcttgcattgctttgcctgaatgttgccgttgttaaggtttttcaacgcatgttgcaggcagtaaatgttgccatcctcggtgcgcaccatcgatatgtacaggttggcgcggcacaggtcacattcgctctcgatggacttgtaaggcggctgttgctgcttcttggccttttgacctttctccgcctgcactttttcggttgatgtcacaccagcagcctgaaagatgcagggatcaagaaataagtatcagattgcacagctggctttatcttaactcaccctaagctgctctcgggcagcggattccttctcgcaaacatcgtttagcattggcaacatttgatgcagggcttcggagttgacccgctggtcataacccaaggcaaagagcagctgttccaaagagaacatggctggctcacagctttcgtgaatgtcctaaaacccaaaaaacataaacttagtttgcataaagtgccagatcagatactaaaacataccctgaaatcatctttggccaaatccaaccaggacattgtggcaaagtaaacgctctcggagaccacataacccgtggccaggcttgaggtatacgcccgtgggaagaccacaataaattcacctggcttctgttcgatgcggcacagtgacaccccccgatccgtgagcatgtgcggtggcaccataaccgtatcacagggcaaccagattgtcttgttctggcagtgcgtcggaatcagcgacgtgagagccgctctgaagttcgcactctgatcatcgggaattccataccaaagctttgaggcaccggtgtgaaggtactcgatccatgacaggccatgtggatccctgtaccagcagcaggcggagaaaagcatgcccacgtgtagcgtgggaactgttacgcccataacaggacccaaggatcgcagcacagaaccagaattattggtcaacactttcagattccacggatgcctggcatagtttgaacctttccccttgggtcctggactagggaagccatagccccaacctgagctgtcaatggagcccgagtgaacgcagacatggctgtcacggacggcgacatgtcgccagaactccgcttccacctcgttgaccgtgggatcagtgcttttgaaccacagcgccatcgtattacgggcaatcctgtaaaactggctgagtggcatacttcttcccttcacgatgcattccatggacacgccgtctatctcctcctcggactcttcgtcctcgtcactgctcagatcgtcctcctcgttggacacgctctccgtgttcacaaaacgatccgcattccgacgagcccgtgcctcccgcttggcccagtcggcctccacctcgtcaaagagcttctgtcgctctgccggtgacaaggtatcgtaaggcaacaggtacttgcagtatatgtcgtccagcttggtcacacgatcttgagctagcttgggtatgcacatctcctccgccacgcgtgcccacttcttcttttcgataacttccttgagacctcccagctcctggaccgtgtgatataatcgtggcaaatccacctccattccaccgatccaaggcgggtgattcataacgatgctttgggtggccaggtactttttgatggcactcagctccttggcactaggtccccagcggtggagcattttgtgcacgtactgattgtaagctgtgaagcgcatctcatccgagatccggcattccggcttaaagctggccggcggaatgatcttacaaatgccaaacctggctgctattggtgttatccgctcgataaactcaatgggatcggcaaattccttttccgttggtcggaagatgggcgcttccaccatttgggtgggatcatcgtgtcgcggaaaggccgtattgttggccatcttaatgggtgtgtcatccttgtacttcttagccacggctgctgcagtggagctcgtctgggcagctgtgcgggatttagcggagccagaaaatagtgatgagttcgagttcacgcgcaccaagctggaggccccaggtgctgctgctgctcccgccgctgccgatgtgctcgccttgggcaagctcttaaggcttgtagtcgttgaggccgcatcattgctggccgcatggagcaacgtctttacgagctcattggtattcaacgactctggcaacggctttgagttggtatccatttgagccttggtcaccagagtggcctgcataaccaccttctgattggggccgtcggggccctctcgccccagcttaactgctacgccttgaatgcctccatcaccgctgccacccacaccagctccttgcaggggaatgtaaaaggtagcaccctctgcatctgaatcgccactagcttctacgggtggtgctggtggcgccggagcctgttgctgttgctttttagctcctctccctgtgggcgccttcgatggtttgccttcgatcttgcagttctccgtaggacttagcgttagttggacagccgtcgctgctgctgcggctgctgctctctttttcgttggagaccgttcgcttagcgcattgggcacaagagctggggcaggaactggactaggatcagtgcgacgtcggttgcccgacttactgccagactcatcatccttgccaaaggcatagaccgattcccgtttggttcccgcaccgcttggaggatttgatgctggttttgtctccgcctgttgctgctgggccttagcgttcttttgattataaactggagtacgtttcggatttgcaggagttggtgctgcgggcggagaagctaatgcagttgctccaccgccagcagtggcatttctctttcccttctccgctttttgcttcacagctggcggtggcgttgggctgctcttagatggtgtgagagatgcgggcgtcggtgtggaagagatgggtgtaggaggagtagcggctgtacttcttggctgagttgcagccttagatgcagcggccttcgctgactctttgcccttccgatcgttgacttttttttccacagccaaagactcattggatgtgatcttctgtgtgagattcacaggtgttgaggatttgtcgtagtccaaagcatcacagtccttgctatccgcctgctcgtgtagttccttgcgattgggaggagtgaccagcacaggagttgccttcagggatggtcccttggcggaccaggcactctcactcttaccaagatcgccacgcgtatttttcgatgatgaactaaagcttgcactgagctccttatcatctcttgtcggcggaggagtagtcgattgctggggccttaagctgtcatcaaaatcgtcatccaaatcgtcctggatttcatccggattggatgagcattcaatgagccatttttgaatctgctcgtgcgtcatgttaaccttggccttgcgtcgctctttgctagacaactggtcgccaaagtaaccctccgtgggcaccactggccccagcacaggcttgtgtatagaaccgcacttgcccaaagtgcatttcgtattgtctggtccagaactctgggccaaactcacgctggcaatgccaaagattttgcccgactcctctttgctgggcatcagagtggcctgcgctagtatactcccaatctcgtcttttagaggatcagaattggcacctgctccccctccggttgctgcactattactgtgtgccggcggtggtgtggacgtggctgttactgtggtagccaccgtcgtctgatgggctgccgctgccgacgtggaagccactggcattggtgctgcattgactgtagctgcgatactcatgctaagatttaagctggatgtctggatcacaacctggctgactggcggagaaggcggcggtggtgccaagggacttttggtggcagacgatggagtgcccacggtggtagctgtggttcccgatgtcggttgaaacttcaccggcgatgggcttggaaagctgctggtcgatgatctgggcagtgggcttcgctcgtacttaggcgttagaaagtttggattgatttttggacactgatacgcctcgatgggcggtggataagttgtcggtggcgtctggtacttcagcggggatgagccctgggagggagttttactcccagacggtgctccgcctccaaactgatgggtgggcgtaggtggtggccgcacataaccggaatgatagtggggcgatgcctgcggcagatacgacgaggttttctgaaaacttacagccccactagcacttcccggcagcgcatacgtggcaggaacgttcagaatcttagacgtaggcaccggcggtttcttctccatggttttcagtggtgaataacttgcttgaatgcttggaaacatcggcatggaacccaatgatgaagtagcttttgccgtcaacgggagcatggtcagctgagtggtaccagttgaagtcggtagtatactgggcaccgccagcgagggagcgaccgaaactgcaggcgtgggcacagagatgggcgatggaaccggtaccaatttgggcggtggactggccatctttgggggcaataattccttctctttcaccgcaaccgctggcactttgatggccaggggttcgtcatccgagtcgctaaagctcttctctagcttccgcttcgtttcgtttagctcctcgttgatgagaaagtcctcctcctcgtcggagtcgactttcgaatgttcggacttggctttgggcttggcctgttgttcagacatcttagccagggagcccttctttaccaacatgccctcgattcgcggtttgtgagctggaccggcatttactttgttctgcttaggtggacgaccacgtcgggctgggggtggtggcttctcctcctcggcttctggaggggagggggactcattgcgagtggcttctaccggagcagtaactggcgaatccttaggtcggggcgacggcttacgggttgatttgcctgccgaaagcaccgtcgaggcctccggcacgtttaactttcccgccgcattacgcttgatctcgttctccatcttttccatttctttcacgttgggtatgtcaggaaagctactcattgacaggtcgtcctcctcgtcatcggccagctgaagcttgtgaccaatgatgcccatgtaaatggctgcagcttccttggttttgcgggaaggccgctgcgatctctgaggctctaactccgcggaatcctctgatgccttacttttcgcagactttcgagatcctcgggcattggtggcgacttttttcgaggacggtggtgccaagtcttcctcatccgctggtgcgtcctctgctttctttttaccagctttacctcttttcccaccactaggtggctcctccactttgctctctgggacaggatgcttttccttttccttctccttttctttatcctttttttccttggccttatctctctcaatctcttcttccttttctctctgcttttccttctcaatttccttttccttatctaattttttagctgccgctttgcgattcctggctgcaggagcaattggggcagctccacctttcttaggactcgcccctttggcaccctttttcagcttgatggacttggccaggggctgctcatcatctgagctaaaatcaaagacattcagactcttctttcccttcgccaccgcaccatgtagactatccccattctccagctgctgctttgcttctttggcgtaaatactggaattcgtcttctccttggcttcctttatttgcttagttggctcctgctccttttccgttttgcttggtggcgtttcaggctgctttttgggctcatcctttggtggatcatgagctccaggttcctccttgtgcggcggaaccttaacgggctcgaaaaaagccctctgtcttgtcattcgaccggaggactcgggtgagggtataaaaatgggtgactcccgttgccttacacgcttaacgggcgccttatctttcagaactgtctggccttccggcgcgggctccacagctttcttggctgccgagggtcgtccccttttggtgggttccgcttttacaggactgtctgccttgacttcctcaccattgcgcgaggtggcatcgtgagcagagaagaactcatcttcatcgtcatctgcctcttgttcgtcgagatcctctgaattgtcatcatcaatgacgggtttactttccttcgtgctggcacgattagagcggcgcttgttgtccttggataatgctgcgggtgtagtcttatcgtgggaaatgcctgctcctctgcctcttgctccacgtcgattaccatcggtgacaacttctgctcgttttcgcactgctcctggcagtacaggagtaggatttcgcgagggaatcttaggcgcttcagctgcaatgagattgtttttatcactagctggtttttcagctgttgagggtttctcagtaggatcgggtataggggctaccacatccaccttcttggtcgcgcctttggccggtcgtccgcgcttctttttgttgccagccaagctcgctcgactgttgttgggctttctagcattgttattattgttggctcccgtcgacgaggcttccgaatccttggacttgccctggttaaggaaatccaagtgggcgggcaacgcgcgagtgccacgaaagcatagaaaggtaagaaagtcctgtggctttggacacttgttgggcaggatctcgataggcggctgattgctatccgctccggaggtgctgggccccgatccggatccagctgccgctgctgctgcgctgtatgcgatgctggaggagctgctgggcgcactctgtccctgggcaaacttgcgctgtgcctgcaccttcgttctgcaaatggaaggagccaaagagcagtgtgagagatatttaattggtggtaacaaggcaatatgatataaattagaaaattcaatattcatttgggatcataataaaggcaacatcacaaacagtggacattcgataaaaagtttaattcggttaataaaactaaatttaccatccaactttattttaggatttctgtgtgtattattctttggctatcaatttatttttagcatataaataaatgaaagaatataggaacaacaatgaggtcattactttgtatttgtaaacaacattgaaactatgtatggaatatagaaaatagattgcatgtaaatcaattgatttaattgacaatctaaaataacaattgtaatgttaaaaattagtaaaataaatttcacttatcaattattaaaaatgtatgcaagaaatcatttttatattcatttgctatgtattcggtgaagtacccacgacgtagtaaatcaatctgagtaggtaaatattgcctaattatcaaagccgaatattcagcttagtgactaaccactgtatatatatatatccacctgctgggaaggagcgctcccccagcagaccccccccccgcgcacgacggatgcgaaacaccccttcgtcgaggaaaacaacaacgccacgacacgctgttgacgctggcttatacaacaaaccgagagctgccctccgtagttactcccccttgtgaccccccccccctgcagtgccccactcccaacccctatccgtttccattccaatcaagcagctaacaaacgctgcgacgtcatctccatatagtgccacacacgtatgtaataatggataagccctctaaacattacccatatcgttgagcatatgtggactggcggactcacctcttgggcatttcgggcgaggactcgatggccgccactgccgacggaggtgccagcgaggagccagcgggcggtacgggcggaggcggtgggggcgtctctgtctccttgcggcgacgcttgttgttgtctttggagacaaccattttgttgcgaacttttcgcgcctctttttctctcgcctcttttctttcgctcgcgcgccttcgtccgttgaattaattattattattcgtattatttattatcgcacatacaattctccgccggacacttctttattatgtatagatttgcatatatatatgtgcacatatgtacgtatatataaatatatatatgtacgtatatatctacaacgaatagcgtttttgttgctgcctctgctgcagcacgcaattttcgtattttcgcttcatcttaacggcgactcagcggtggttttatccctcgaaataaacactaaaatgctgtttattgtcttgttattgtttagtgcactctgtgttcacatttcacacacgacaagtgctgcaaatttcattttctttcgcgagatttgcttgcacatatttttttcgtcttctgcttcttcttacaccgcttttgctttgtgtcatggcggatggtcgggttgccatactatttttccagggcggcacaagcagtaggccactcatttgatttccgtcacatctggcaaggttggttcactctgtgagttgacagaaaattttgtgcagtaaaagcaccatttttgtagcgaaatctatagtagaaagatattcaagtgactactattaacatgggcgacggtgctggaaattggtgtctcattgaatccgatcccggggtattcacagagcttattcgcgaattcggtaagttattggcgggctttgccagcgacgccggcaattgggataagaaaagttaataatactgtgtacgttcgaccaggatgcgatggggcacaggtggaggagatctggagtctcgacagcgagtccttcaagaacctagagcccatccatggtctgatcttcctgttcaagtgggtgcaggaggatgaacccgctggaaaagtggtcctggatcgggagaacatcttctttgccaagcaggtgatcaacaacgcatgcgccacccaggcgatcttgagcctcctgatgaacctggatcatgaggacatcaaattgggcgagaccctcaccaattttaaggagttctgccagtgcttcgatccgtacaacaagggattaactttgagcaacgctagccagattcgcacggtgcacaactcctttgctcgcccaacactcttcgagctggacactaagaaccagaagaaggacgatgacgtgtaccactttgtcggctatatgcccatcggaggaagactgtacgagctggacggcctgagggagggacccattgatcttggtgagatcaagtcggagcagaactggatcgatgtggtgcgtccgattattgagaagcgcatgcagcgctacagcgacggcgagatccacttcaatctgatggctctgatctcggacaggcagcgcatttatgaacagcagattgagaagctgcttaatcc

SEQ ID NO: 6989 - DNA, 7330 bp, DROSOPHILA
cggtgtaagaagaagcagaagacgaaaaaaatatgtgcaagcaaatctcgcgaaagaaaatgaaatttgcagcacttgtcgtgtgtgaaatgtgaacacagagtgcactaaacaataacaagacaataaacagcattttagtgtttatttcgagggataaaaccaccgctgagtcgccgttaagatgaagcgaaaatacgaaaattgcgtgctgcagcagaggcagcaacaaaaacgctattcgttgtagatatatacgtacatatatatatttatatatacgtacatatgtgcacatatatatatgcaaatctatacataataaagaagtgtccggcggagaattgtatgtgcgataataaataatacgaataataataattaattcaacggacgaaggcgcgcgagcgaaagaaaagaggcgagagaaaaagaggcgcgaaaagttcgcaacaaaatggttgtctccaaagacaacaacaagcgtcgccgcaaggagacagagacgcccccaccgcctccgcccgtaccgcccgctggctcctcgctggcacctccgtcggcagtggcggccatcgagtcctcgcccgaaatgcccaagagaacgaaggtgcaggcacagcgcaagtttgcccagggacagagtgcgcccagcagctcctccagcatcgcatacagcgcagcagcagcggcagctggatccggatcggggcccagcacctccggagcggatagcaatcagccgcctatcgagatcctgcccaacaagtgtccaaagccacaggactttcttacctttctatgctttcgtggcactcgcgcgttgcccgcccacttggatttccttaaccagggcaagtccaaggattcggaagcctcgtcgacgggagccaacaataataacaatgctagaaagcccaacaacagtcgagcgagcttggctggcaacaaaaagaagcgcggacgaccggccaaaggcgcgaccaagaaggtggatgtggtagcccctatacccgatcctactgagaaaccctcaacagctgaaaaaccagctagtgataaaaacaatctcattgcagctgaagcgcctaagattccctcgcgaaatcctactcctgtactgccaggagcagtgcgaaaacgagcagaagttgtcaccgatggtaatcgacgtggagcaagaggcagaggagcaggcatttcccacgataagactacacccgcagcattatccaaggacaacaagcgccgctctaatcgtgccagcacgaaggaaagtaaacccgtcattgatgatgacaattcagaggatctcgacgaacaagaggcagatgacgatgaagatgagttcttctctgctcacgatgccacctcgcgcaatggtgaggaagtcaaggcagacagtcctgtaaaagcggaacccaccaaaaggggacgaccctcggcagccaagaaagctgtggagcccgcgccggaaggccagacagttctgaaagataaggcgcccgttaagcgtgtaaggcaacgggagtcacccatttttataccctcacccgagtcctccggtcgaatgacaagacagagggcttttttcgagcccgttaaggttccgccgcacaaggaggaacctggagctcatgatccaccaaaggatgagcccaaaaagcagcctgaaacgccaccaagcaaaacggaaaaggagcaggagccaactaagcaaataaaggaagccaaggagaagacgaattccagtatttacgccaaagaagcaaagcagcagctggagaatggggatagtctacatggtgcggtggcgaagggaaagaagagtctgaatgtctttgattttagctcagatgatgagcagcccctggccaagtccatcaagctgaaaaagggtgccaaaggggcgagtcctaagaaagagagcaaagtggaggagccacctagtggtgggaaaagaggtaaagctggtaaaaagaaagcagaggacgcaccagcggatgaggaagacttggcaccaccgtcctcgaaaaaagtcgccaccaatgcccgaggatctcgaaagtctgcgaaaagtaaggcatcagaggattccgcggagttagagcctcagagatcgcagcggccttcccgcaaaaccaaggaagctgcagccatttacatgggcatcattggtcacaagcttcagctggccgatgacgaggaggacgacctgtcaatgagtagctttcctgacatacccaacgtgaaagaaatggaaaagatggagaacgagatcaagcgtaatgcggcgggaaagttaaacgtgccggaggcctcgacggtgctttcggcaggcaaatcaacccgtaagccgtcgccccgacctaaggattcgccagttactgctccggtagaagccactcgcaatgagtccccctcccctccagaagccgaggaggagaagccaccacccccagcccgacgtggtcgtccacctaagcagaacaaagtaaatgccggtccagctcacaaaccgcgaatcgagggcatgttggtaaagaagggctccctggctaagatgtctgaacaacaggccaagcccaaagccaagtccgaacattcgaaagtcgactccgacgaggaggaggactttctcatcaacgaggagctaaacgaaacgaagcggaagctagagaagagctttagcgactcggatgacgaacccctggccatcaaagtgccagcggttgcggtgaaagagaaggaattattgcccccaaagatggccagtccaccgcccaaattggtaccggttccatcgcccatctctgtgcccacgcctgcagtttcggtcgctccctcgctggcggtgcccagtatactaccgacttcaactggtaccactcagctgaccatgctcccgttgacggcaaaagctacttcatcattgggttccatgccgatgtttccaagcattcaagcaagttattcaccactgaaaaccatggagaagaaaccgccggtgcctacgtctaagattctgaacgttcctgccacgtatgcgctgccgggaagtgctagtggggctgtaagttttcagaaaacctcgtcgtatctgccgcaggcatcgccccactatcattccggttatgtgcggccaccacctacgcccacccatcagtttggaggcggagcaccgtctgggagtaaaactccctcccagggctcatccccgctgaagtaccagacgccaccgacaacttatccaccgcccatcgaggcgtatcagtgtccaaaaatcaatccaaactttctaacgcctaagtacgagcgaagcccactgcccagatcatcgaccagcagctttccaagcccatcgccggtgaagtttcaaccgacatcgggaaccacagctaccaccgtgggcactccatcgtctgccaccaaaagtcccttggcaccaccgccgccttctccgccagtcagccaggttgtgatccagacatccagcttaaatcttagcatgagtatcgcagctacagtcaatgcagcaccaatgccagtggcttccacgtcggcagcggcagcccatcagacgacggtggctaccacagtaacagccacgtccacaccaccgccggcacacagtaatagtgcagcaaccggagggggagcaggtgccaattctgatcctctaaaagacgagattgggagtatactagcgcaggccactctgatgcccagcaaagaggagtcgggcaaaatctttggcattgccagcgtgagtttggcccagagttctggaccagacaatacgaaatgcactttgggcaagtgcggttctatacacaagcctgtgctggggccagtggtgcccacggagggttactttggcgaccagttgtctagcaaagagcgacgcaaggccaaggttaacatgacgcacgagcagattcaaaaatggctcattgaatgctcatccaatccggatgaaatccaggacgatttggatgacgattttgatgacagcttaaggccccagcaatcgactactcctccgccgacaagagatgataaggagctcagtgcaagctttagttcatcatcgaaaaatacgcgtggcgatcttggtaagagtgagagtgcctggtccgccaagggaccatccctgaaggcaactcctgtgctggtcactcctcccaatcgcaaggaactacacgagcaggcggatagcaaggactgtgatgctttggactacgacaaatcctcaacacctgtgaatctcacacagaagatcacatccaatgagtctttggctgtggaaaaaaaagtcaacgatcggaagggcaaagagtcagcgaaggccgctgcatctaaggctgcaactcagccaagaagtacagccgctactcctcctacacccatctcttccacaccgacgcccgcatctctcacaccatctaagagcagcccaacgccaccgccagctgtgaagcaaaaagcggagaagggaaagagaaatgccactgctggcggtggagcaactgcattagcttctccgcccgcagcaccaactcctgcaaatccgaaacgtactccagtttataatcaaaagaacgctaaggcccagcagcaacaggcggagacaaaaccagcatcaaatcctccaagcggtgcgggaaccaaacgggaatcggtctatgcctttggcaaggatgatgagtctggcagtaagtcgggcaaccgacgtcgcactgatcctagtccagttcctgccccagctcttgtgcccaatgcgctaagcgaacggtctccaacgaaaaagagagcagcagccgcagcagcagcgacggctgtccaactaacgctaagtcctacggagaactgcaagatcgaaggcaaaccatcgaaggcgcccacagggagaggagctaaaaagcaacagcaacaggctccggcgccaccagcaccacccgtagaagctagtggcgattcagatgcagagggtgctaccttttacattcccctgcaaggagctggtgtgggtggcagcggtgatggaggcattcaaggcgtagcagttaagctggggcgagagggccccgacggccccaatcagaaggtggttatgcaggccactctggtgaccaaggctcaaatggataccaactcaaagccgttgccagagtcgttgaataccaatgagctcgtaaagacgttgctccatgcggccagcaatgatgcggcctcaacgactacaagccttaagagcttgcccaaggcgagcacatcggcagcggcgggagcagcagcagcacctggggcctccagcttggtgcgcgtgaactcgaactcatcactattttctggctccgctaaatcccgcacagctgcccagacgagctccactgcagcagccgtggctaagaagtacaaggatgacacacccattaagatggccaacaatacggcctttccgcgacacgatgatcccacccaaatggtggaagcgcccatcttccgaccaacggaaaaggaatttgccgatcccattgagtttatcgagcggataacaccaatagcagccaggtttggcatttgtaagatcattccgccggccagctttaagccggaatgccggatctcggatgagatgcgcttcacagcttacaatcagtacgtgcacaaaatgctccaccgctggggacctagtgccaaggagctgagtgccatcaaaaagtacctggccacccaaagcatcgttatgaatcacccgccttggatcggtggaatggaggtggatttgccacgattatatcacacggtccaggagctgggaggtctcaaggaagttatcgaaaagaagaagtgggcacgcgtggcggaggagatgtgcatacccaagctagctcaagatcgtgtgaccaagctggacgacatatactgcaagtacctgttgccttacgataccttgtcaccggcagagcgacagaagctctttgacgaggtggaggccgactgggccaagcgggaggcacgggctcgtcggaatgcggatcgttttgtgaacacggagagcgtgtccaacgaggaggacgatctgagcagtgacgaggacgaagagtccgaggaggagatagacggcgtgtccatggaatgcatcgtgaagggaagaagtatgccactcagccagttttacaggattgcccgtaatacgatggcgctgtggttcaaaagcactgatcccacggtcaacgaggtggaagcggagttctggcgacatgtcgccgtccgtgacagccatgtctgcgttcactcgggctccattgacagctcaggttggggctatggcttccctagtccaggacccaaggggaaaggttcaaactatgccaggcatccgtggaatctgaaagtgttgaccaataattctggttctgtgctgcgatccttgggtcctgttatgggcgtaacagttcccacgctacacgtgggcatgcttttctccgcctgctgctggtacagggatccacatggcctgtcatggatcgagtaccttcacaccggtgcctcaaagctttggtatggaattcccgatgatcagagtgcgaacttcagagcggctctcacgtcgctgattccgacgcactgccagaacaagacaatctggttgccctgtgatacggttatggtgccaccgcacatgctcacggatcggggggtgtcactgtgccgcatcgaacagaagccaggtgaatttattgtggtcttcccacgggcgtatacctcaagcctggccacgggttatgtggtctccgagagcgtttactttgccacaatgtcctggttggatttggccaaagatgatttcagggacattcacgaaagctgtgagccagccatgttctctttggaacagctgctctttgccttgggttatgaccagcgggtcaactccgaagccctgcatcaaatgttgccaatgctaaacgatgtttgcgagaaggaatccgctgcccgagagcagcttagggctgctggtgtgacatcaaccgaaaaagtgcaggcggagaaaggtcaaaaggccaagaagcagcaacagccgccttacaagtccatcgagagcgaatgtgacctgtgccgcgccaacctgtacatatcgatggtgcgcaccgaggatggcaacatttactgcctgcaacatgcgttgaaaaaccttaacaacggcaacattcaggcaaagcaatgcaagctaatctacgcgtataacgttgatgatatacaacagcttatacggcaactgcaggagaagatcaaccataaggcagccgtaaagaaaaagtag

SEQ ID NO: 6990 - protein, 2290 aa, DROSOPHILA
MVVSKDNNKRRRKETETPPPPPPVPPAGSSLAPPSAVAAIESSPEMPKRTKVQAQRKFAQGQSAPSSSSSIAYSAAAAAAGSGSGPSTSGADSNQPPIEILPNKCPKPQDFLTFLCFRGTRALPAHLDFLNQGKSKDSEASSTGANNNNNARKPNNSRASLAGNKKKRGRPAKGATKKVDVVAPIPDPTEKPSTAEKPASDKNNLIAAEAPKIPSRNPTPVLPGAVRKRAEVVTDGNRRGARGRGAGISHDKTTPAALSKDNKRRSNRASTKESKPVIDDDNSEDLDEQEADDDEDEFFSAHDATSRNGEEVKADSPVKAEPTKRGRPSAAKKAVEPAPEGQTVLKDKAPVKRVRQRESPIFIPSPESSGRMTRQRAFFEPVKVPPHKEEPGAHDPPKDEPKKQPETPPSKTEKEQEPTKQIKEAKEKTNSSIYAKEAKQQLENGDSLHGAVAKGKKSLNVFDFSSDDEQPLAKSIKLKKGAKGASPKKESKVEEPPSGGKRGKAGKKKAEDAPADEEDLAPPSSKKVATNARGSRKSAKSKASEDSAELEPQRSQRPSRKTKEAAAIYMGIIGHKLQLADDEEDDLSMSSFPDIPNVKEMEKMENEIKRNAAGKLNVPEASTVLSAGKSTRKPSPRPKDSPVTAPVEATRNESPSPPEAEEEKPPPPARRGRPPKQNKVNAGPAHKPRIEGMLVKKGSLAKMSEQQAKPKAKSEHSKVDSDEEEDFLINEELNETKRKLEKSFSDSDDEPLAIKVPAVAVKEKELLPPKMASPPPKLVPVPSPISVPTPAVSVAPSLAVPSILPTSTGTTQLTMLPLTAKATSSLGSMPMFPSIQASYSPLKTMEKKPPVPTSKILNVPATYALPGSASGAVSFQKTSSYLPQASPHYHSGYVRPPPTPTHQFGGGAPSGSKTPSQGSSPLKYQTPPTTYPPPIEAYQCPKINPNFLTPKYERSPLPRSSTSSFPSPSPVKFQPTSGTTATTVGTPSSATKSPLAPPPPSPPVSQVVIQTSSLNLSMSIAATVNAAPMPVASTSAAAAHQTTVATTVTATSTPPPAHSNSAATGGGAGANSDPLKDEIGSILAQATLMPSKEESGKIFGIASVSLAQSSGPDNTKCTLGKCGSIHKPVLGPVVPTEGYFGDQLSSKERRKAKVNMTHEQIQKWLIECSSNPDEIQDDLDDDFDDSLRPQQSTTPPPTRDDKELSASFSSSSKNTRGDLGKSESAWSAKGPSLKATPVLVTPPNRKELHEQADSKDCDALDYDKSSTPVNLTQKITSNESLAVEKKVNDRKGKESAKAAASKAATQPRSTAATPPTPISSTPTPASLTPSKSSPTPPPAVKQKAEKGKRNATAGGGATALASPPAAPTPANPKRTPVYNQKNAKAQQQQAETKPASNPPSGAGTKRESVYAFGKDDESGSKSGNRRRTDPSPVPAPALVPNALSERSPTKKRAAAAAAATAVQLTLSPTENCKIEGKPSKAPTGRGAKKQQQQAPAPPAPPVEASGDSDAEGATFYIPLQGAGVGGSGDGGIQGVAVKLGREGPDGPNQKVVMQATLVTKAQMDTNSKPLPESLNTNELVKTLLHAASNDAASTTTSLKSLPKASTSAAAGAAAAPGASSLVRVNSNSSLFSGSAKSRTAAQTSSTAAAVAKKYKDDTPIKMANNTAFPRHDDPTQMVEAPIFRPTEKEFADPIEFIERITPIAARFGICKIIPPASFKPECRISDEMRFTAYNQYVHKMLHRWGPSAKELSAIKKYLATQSIVMNHPPWIGGMEVDLPRLYHTVQELGGLKEVIEKKKWARVAEEMCIPKLAQDRVTKLDDIYCKYLLPYDTLSPAERQKLFDEVEADWAKREARARRNADRFVNTESVSNEEDDLSSDEDEESEEEIDGVSMECIVKGRSMPLSQFYRIARNTMALWFKSTDPTVNEVEAEFWRHVAVRDSHVCVHSGSIDSSGWGYGFPSPGPKGKGSNYARHPWNLKVLTNNSGSVLRSLGPVMGVTVPTLHVGMLFSACCWYRDPHGLSWIEYLHTGASKLWYGIPDDQSANFRAALTSLIPTHCQNKTIWLPCDTVMVPPHMLTDRGVSLCRIEQKPGEFIVVFPRAYTSSLATGYVVSESVYFATMSWLDLAKDDFRDIHESCEPAMFSLEQLLFALGYDQRVNSEALHQMLPMLNDVCEKESAAREQLRAAGVTSTEKVQAEKGQKAKKQQQPPYKSIESECDLCRANLYISMVRTEDGNIYCLQHALKNLNNGNIQAKQCKLIYAYNVDDIQQLIRQLQEKINHKAAVKKK

SEQ ID NO: 6991 - DNA, 4287 bp, DROSOPHILA
actttcgtttaattggcataaatacattggtaatatgagtacaaacacacaattgggcaataccagctaatgatgaatgattatgaagctcttctaacgctgaggcggtggtttcggtttcggaatcttggacagcagcatctgaatctcgtccttttccttccagtccttccacaactcgtacagatttacaatggcgcgcacgatctcctggaccttgtctaaatcaacattcaattctgcgaaccactgcttcgtggcgtccttttgcaggatgacgcaggcgatttgaaggcaggctatagcgatctagaaaaaaataggttcttcaaatgtgaggaagctgtagaaattatcaggatcacaaacctggtaaggaggatagagcaggcagacatcggtgcgcagggaatcgtttacgatacgccagctcagggtgagcaactggtcctcctggcccatgtcctgaaccagctgcagcagcggtctgtacggctggtagacaatcaagcagcaatccaggttctccagcaggtaaaactcgcactccaggatgtgattggtgcggtagggaaactcctgagcgtacgcatagctgaactttgtcttaatggccgactggcagatcgagatcagtcgtgaattggaaatgacaccgaactcctccaccttcgaggccagcaagatgcaagtgggcgccagcagcagaggatcgatgttcttcagggagttcctcgcatagaatctcttgaagtaaaccgtcgccgtggcgatgacctgttgcctcagctttagctgctcgccgagcacctggatcacatttgcgaagaaaataaacaccttttggtattcatcctcgttaagggccaacaaatcgtgctgacgctcccggagcagatcgggtttgtccaaaatccactgctgcgagtgcgaactctgccaaaaattgcccgccatttcgtaactagtaggcctagctgattaggtcggccaatattttcgtgttagctatccaaattaggtgtttatttcaatagcaagccggaaaaccaggaaaaacgaaaaaattgtgttgccgtttcagccagtgtgtgcacaccagggctattttccacgaacagctgactggccgcagccaactttgcgcagcgcagtacattggtgtgtgtgtgtgaatttttcatcagcgccgcggccacagacgaaaaagtcttaaatattttttagtaataggctattgaacgaattaataaaacgatggcgttgcgagttcttggcgtgacgcagaatatgcgctccttcatgcggggcgttgacatgatcaaagtaagtccagacagccatccaatgattacgcttccgaggatttaaattacgtaattgtaaatgattgtgtttttggttgcaattgtggtttattcttgtgagaaaagggataaacaacctcttgttggtcagttattcaagagccatccagtttttcaaacaaatatttgggaaaactgtttggaaaacccactacaagcactttgaggttatgttcgtgttttacttaactctgggctatagttttcccaattttcccgaacttacagcgatacaagtcggctgccaccctacagaagactctgctgaacatacccgccacccaggtgaccaagctggacaacggtctccgcgtggctagcgaggattccggtgcctctaccgccaccgtgggactgtggatcgatgctgggtcgcgctccgagaacgagaagaacaacggagtggcccacttcctggagcacatggccttcaaggttggctcactagcttgatgctttaaatgcgtataatatgcgtttctgccactttttagggtaccgccaagcgctcgcaaacggatttggagctggaggttgagaacctgggcgcccacttgaacgcctacacttccagggagcagaccgtcttctacgccaagtgtttgtccaaggatgtgcccaaagccgtcgagatcctggccgacatcatccagaactccaagctgggtgaggctgagatcgcccgcgagcgttcggtgattctgcgcgagatgcaggaggtggagagcaacctgcaggaggtggtcttcgatcaccttcacgccaccgcctatcagggcactcctctgggccagaccatcctgggacccaccaagaacattcagtacgtatattcagctcttataacaaatgctctgtctctaattaaaatcttcatttatttaggtccattggcaaggccgatctgaccgactacatccagacccactacaaggcttcgcgcatcgttctggccgctgctggcggcgtcaagcacgatgatctggtcaagcttgcctgcagcagcttgggtggcctggaggccagtgtgctgcccgcggaggtgactccctgccgcttcaccggctccgaggtgcgtgtgcgcgacgattccctgcccctggcccatgtcgccatcgccgtcgaaggctgcggctggaccgaccaggacaacatccccctgatggtggccaacaccttggtgggtgcttgggatcgttcccaaggcggtggcgccaacaacgcctccaacctggcccgtgccagcgctgaggacagtaagtgtacatcagtaagacgaccaggatatggagattattaactattattgccctacagacctttgccacagcttccaatcgttcaacacatgctacaaggacaccggactctggggcatttacttcgtgtgcgaccctctgcagtgcgaggtaagaagaattaatgattcaacagaaaactctcgagagaaagcaaattttacgtaaacaaacctcttccccaggatatgctcttcaacgtgcagaccgagtggatgcgtctgtgcaccatggttaccgaggctgaggtcgagcgcgccaagaaccttctgaagaccaacatgctgctgcagctcgacggcaccacacccatctgcgaggacattggccgccagatcctgtgctacaaccgccgcatcccgctgcacgagctggagcagcgcatcgatgccgtgagtgtgggcaatgtgcgcgacgtcgcaatgaagtacatctacgatcggtgcccagccgtcgctgccgtgggtcccgttgagaacctgcccgactacaacagaatccgctcctccatgtactggttgagggtttaagaggttccgccccgctgttgttggacattgtagtttaattcaaaagaaaatttcacccccagaggatcagtaaaccgataatactaaaagttatataagtttctcaggcctttattggtgtgaatagttaatgggtataccactgagtccctgctgcaacttggcgggctccgtctgtccaagggcaggatccaatccctgccaggtgcgatcctcgaaggagagcccggtatccgtcgtcatgagagccattttggcttgtgtagccagagcaagcgaggcgggatctccacctgtttccagggaatcgttgaccgctcctcgtagccttccactcaccaagctgacgtcgttctctggtatatctgccgcatcaaaaggcaagaagctgcgtccttccggcagaagttgtttgaaatccgtaacataagcttcggggtatctcatgtgccaggcgggattcaaggccatctctgcctcgaagacagagacaatgggcttatagtactctttggagtcgtacatattattgaacgggcaaccgatcaggacaaaacaatcgatttccaggaagttagcgagtttggctgggttaatcctgcccacggaaataagctgcgtcttaatgcctctgcccttcgccattgtttgcagtcgcgtcaccacatctaagtaaccttcagccgaaagagtggccacaatgagtcccagtgtttgtgcatccttacacttttcgatgtggaagtagcgacggcggatgaactgagccgtgaggggattttttgagctgagactgtcagatgatccatcgtagatgtgccattgcacggcagctggagcggtcagagagagattagcgaatcgctggttatcggcgcctatgaaaatacaaatcctctcaaggttcgtggtctccctagttgtcgttgattctgcctcgatgggcggaaacagttccagcagcagttctttgggctccaggatctcggacagctgcttctttagcttttccccgtacacatgctggtacccaatgtccaggtacacgcatacctgtcgatctatgctctccgcgcgcagaccttgcagctt

SEQ ID NO: 6992 - DNA, 1762 bp, DROSOPHILA
cgtgttagctatccaaattaggtgtttatttcaatagcaagccggaaaaccaggaaaaacgaaaaaattgtgttgccgtttcagccagtgtgtgcacaccagggctattttccacgaacagctgactggccgcagccaactttgcgcagcgcagtacattggtgtgtgtgtgtgaatttttcatcagcgccgcggccacagacgaaaaagtcttaaatattttttagtaataggctattgaacgaattaataaaacgatggcgttgcgagttcttggcgtgacgcagaatatgcgctccttcatgcggggcgttgacatgatcaaacgatacaagtcggctgccaccctacagaagactctgctgaacatacccgccacccaggtgaccaagctggacaacggtctccgcgtggctagcgaggattccggtgcctctaccgccaccgtgggactgtggatcgatgctgggtcgcgctccgagaacgagaagaacaacggagtggcccacttcctggagcacatggccttcaagggtaccgccaagcgctcgcaaacggatttggagctggaggttgagaacctgggcgcccacttgaacgcctacacttccagggagcagaccgtcttctacgccaagtgtttgtccaaggatgtgcccaaagccgtcgagatcctggccgacatcatccagaactccaagctgggtgaggctgagatcgcccgcgagcgttcggtgattctgcgcgagatgcaggaggtggagagcaacctgcaggaggtggtcttcgatcaccttcacgccaccgcctatcagggcactcctctgggccagaccatcctgggacccaccaagaacattcagtccattggcaaggccgatctgaccgactacatccagacccactacaaggcttcgcgcatcgttctggccgctgctggcggcgtcaagcacgatgatctggtcaagcttgcctgcagcagcttgggtggcctggaggccagtgtgctgcccgcggaggtgactccctgccgcttcaccggctccgaggtgcgtgtgcgcgacgattccctgcccctggcccatgtcgccatcgccgtcgaaggctgcggctggaccgaccaggacaacatccccctgatggtggccaacaccttggtgggtgcttgggatcgttcccaaggcggtggcgccaacaacgcctccaacctggcccgtgccagcgctgaggacaacctttgccacagcttccaatcgttcaacacatgctacaaggacaccggactctggggcatttacttcgtgtgcgaccctctgcagtgcgaggatatgctcttcaacgtgcagaccgagtggatgcgtctgtgcaccatggttaccgaggctgaggtcgagcgcgccaagaaccttctgaagaccaacatgctgctgcagctcgacggcaccacacccatctgcgaggacattggccgccagatcctgtgctacaaccgccgcatcccgctgcacgagctggagcagcgcatcgatgccgtgagtgtgggcaatgtgcgcgacgtcgcaatgaagtacatctacgatcggtgcccagccgtcgctgccgtgggtcccgttgagaacctgcccgactacaacagaatccgctcctccatgtactggttgagggtttaagaggttccgccccgctgttgttggacattgtagtttaattcaaaagaaaatttcacccccagaggatcagtaaaccgataatactaaaagtt

SEQ ID NO: 6993 - protein, 382 aa, DROSOPHILA
MAFKGTAKRSQTDLELEVENLGAHLNAYTSREQTVFYAKCLSKDVPKAVEILADIIQNSKLGEAEIARERSVILREMQEVESNLQEVVFDHLHATAYQGTPLGQTILGPTKNIQSIGKADLTDYIQTHYKASRIVLAAAGGVKHDDLVKLACSSLGGLEASVLPAEVTPCRFTGSEVRVRDDSLPLAHVAIAVEGCGWTDQDNIPLMVANTLVGAWDRSQGGGANNASNLARASAEDNLCHSFQSFNTCYKDTGLWGIYFVCDPLQCEDMLFNVQTEWMRLCTMVTEAEVERAKNLLKTNMLLQLDGTTPICEDIGRQILCYNRRIPLHELEQRIDAVSVGNVRDVAMKYIYDRCPAVAAVGPVENLPDYNRIRSSMYWLRV

SEQ ID NO: 6994 - DNA, 5149 bp, DROSOPHILA
aaggcaaacaaaagccgcaaatgccaaggccaaacagccactgacaaggggatgaaaaggaaaactagggggtggtcctatgtcccatatgtcatacatatgtttggcggcctgtttgtttatgggggcccacattcagtcgaggaaatgtacacaaacccaacggaaagtaaaaaaaaaaaaaaaaaattgacgacagaatgtgtgaaaaaacgcgttacaaaatcgctggaaaaatattgtgcaaacggcacaaggcttcaaagtttgcaacgaatttttagtttttagtgagtagattcaagtgaaagaacggggtaagctgttaatagtttgtagtaagaaaatttggcaaatttaaatagtatttttttttttagatgtattcttggatgtcatttgtttgtttgtttctttcggtgcacaaatgcagttacattcacggcttagcggccgttgcagttgcagtccgctgcagttgatgccacaaatccagacaactgacaagcccacatatttcgcttcgtaataccagcgttcccacacactccactctacactggcctttcatttggcttaaacttgacccacaaaacgaatttcattgcattcgtttgccatgcgagaagtaaaaacaaaaaaaaaaaaaaaaaacgaaaaaaaaagtaaaaggtggaaaggtcgaaaagaaaaggggattttaaacagtcggatgtcctttgccagcgactcgcttgtaattatattttttatggcatcagcttccattccgattgcattcattgcgaaactgcaagctgtaattcaattaaggggaaaaccataaatagcgaaaaaaaagagttgaaaaaacaagagaatttttacagaattttacatatgcaactgttccaaaagtcactaaatccaatataattatttcattattaataaatgcaagcctaactttatatttcaatcttccatttctttcagctgagttagcaatttgccgctgaaaatgaagcgaatgcgcagcagtcgcctcctggtgctgccattgatccttgtgctgatcctgacgctgctcctccaaccgattgccgtccacgccaaatcgaagaagaacaagtccagccagagctcgcaccacggtgactcatcctcctcctcctcatcctcatcctcgtcgagtggctcctcatcggcggcagcatcgtcagcgaatgatgaaagcaaaccgaagggcggcgacaatggtggtcagcactttgccatggagccgcaggatcagacggccgtcgttggttcacgcgtaacgttgccatgccgggttatggagaaagttggtgccctgcaatggaccaaagatgacttcggtctgggccaacatcgcaatttgagcggcttcgaacgctactcgatggtcggcagcgatgaggagggtgacttctcattggacatttatccgctaatgctggacgacgatgccaagtatcagtgtcaagtgggtccaggtccacagggcgagcagggtattcgttcgcgattcgccaagctaaccgttctcgttccgcccgaggcgccgaaaatcacgcaaggtgactatctggtgaccaccgaagatcgtgaaatcgaattggagtgcgtgtcgcagggcggcaagcccgcagccgaaatcacttggattgacggactgggcaatgtcctaaccaagggtattgaatatgtaaaggaaccgctggccgattcgcgtcgaattacagccagatcgatactgaaattggcgcccaagaaggagcatcacaacacaacgttcacgtgccaggcgcaaaataccgccgatcgaacctatagatcggccaaactgctgctcgaggtgaaatatgcgcccaaggtcatcgtttcggttgtgggtggtgcattggctggtggcaaaattcccgaaggcgccgaggtaatactaagctgtcaggccgacgccaatccgcatgagctcagctatcgttggttcatcaacgatgagctaatgaccggagactttaccactaagatggtaagtgcatcaaaagtcaatggaaaagcgctaaaaaccagttgttaaagttcatcgatttcctttcagatcattcacaatgtttcgaggcaatatcacgatgccatagtcaagtgcgaggtggttaatgcggtgggcaagagcgaacagagcaagaaactggacattagttgtaagtactcaatggccattagtgatgatagtacatgccatgctaatagatcacgttttcctaaaccaaaccagttggtccagtttttcgccagcgtcccgttagcgtggaagccgatctgggcgccaccgttagcatgcgttgcgatgtggctggcaatccggagcccgaaatcgaatggatcagcgagaactccgatcaggtgcgtcaaactttcgttctgctaacacattcaatttacaattcaatctcgcgcaggttgttggcgttgcagcggaactgaaattgaaagtgagcagcgaaacggcaggtcgctacttttgcaaggctgtggtcaatggatttcccgaaatcggtgccgaggcaacgctgtacgtgaaaagggcaccgattatcacatcgcacaaggtgcaatttggcggagttggtggtcgcgttaagatcgattgtttggcctttagcataccgaaggcggagcatatactctggtcgttcgagggcaagattatcaatatgagcagcgccgatccggatatatatatattcgaggagcatcatttgccggagggcgtgcgagcggccttgattattcgcgatagcaaggccacacattttggcaaatacaattgtacagtgatgaattcgtatggcggtgattcgttggttataacattgctacgcgaaccgggcaacatacccgttctgctggtcgttatgggctccatgttttgcgtggccatcattctgatgatcgtaatgattattatcgtgtaccgcaagcgacgcagtcgcaagaagcccatgccagcggatgtaataccggaggcatcacgcggcggtgataagctaaacgaattgaagagcgagctacgctcgaaggcctatgatgtggaatactcggaggcgggcggcgatggactggccattaatcttacccaatcaccgatgcccgatgttcagatgaagggcgccacacttggtgtgccactagccggacccgttaagttcgatgagcgcttttcgggcgatttcggtggcgatcgttacaatcgacagtgtcacattaagaatctaaagaatcaacaggagaccgcctacaagggtagtccacaggccaatggctatgcccattactttgaatatgccctcgactatagtccgccgggcggtgagggtgctgccgtggtggtgggcagcggcggcgttggcaagttgaagaacggtggcatgaactcggccacgttgccccactcggcggctgccaccgtgaatgggggcggtgctggcaatgggggcggtgccagtttgccgcgcaatcagcggcacgagattcaacagtcgcagcaatcaaacggatttctcggtgagtttacaaatatatatatatatagttatatatatttaggcaatgaaactgatgtgatctctacgactttcgcaggacaaccgctgctgcagaatggcatcgatagccgctttagcgccatctatggtaatccctatttaaggacgaactcctcgctactgccgcccctgccgccgccgagcaccgccaatccggcggccacgcccgccccgcccccctatcatgccgctcgccacggccacgcccatcacgccaacggcggactcaagcattttgtgggcggcgctgtgatcaccacaagtcccgtgggaaatgtgaacattaatggcggcggaggcggtggctcgacgcccagcggtggcggcggcgtgggcgtgggcgtggcagctggtggcagcgtcagcggcagcagttccaacttgaccgccagcagcaatacactggcggccacgcccctagcgggcggcggcgtcggcaacagcggccagtgcgcccagagtccgtccggtcagtttatattgtcgaataatggcaaaggacacacgcagaaaggacctctggccactcatgtttaaactacaaagaaggatatacacacacatctttctatattatatatatatatatagaaggcactagcataactcataaatgtatttaaaagccgaacatctagtgtgtaaactttttttttttgtccatcgatattagcgtaatattctgattcaagcggtgtgctgaactttcgaaaagatcttgggttgtaaatgcaactgacttggatttatctgatatggctgaaattcgagcactaagaatgtgactgctttcgtttgtaaatttgtaacgtacagctcccaaaaacaaaaaaaaagagaaaagagttcaacacacccttgagtaaaaaaaagaaatgtgtataaaaacgaaaaacaaaacacaaaaaaaaaaaacagaagaaaacaaaaaccgtattgtgatttatagcgttaattattttatggctgagctcgatgagtttcgcagcggcaaattatatcaactagtgcaaatcttaagctacttatcgagtaaaaaatcgtatatcaattaaacacgaaacgcgtatcgaacagaaatgtaaaaacaaaaacacaaaacaactacaaaacttgaaaagttcattttaaacagcgtgttgcatacaattttaaaacgaaaccgaaaatcaattcaattatatacattatgacaaaacaaaaagcctgtgtagttagttggaactaaaaaaaaacaaaaataatataaaagcaaacgaaaatgaaacgtaaatgaaaagtaaagcagcagcagcagaaagcaaaaacaattttctaagccaaaatttatcaaattttttagacttaattacgtatacatcaaacgaaaccaactgaatgcagtgagagaaaatatttagattaagtgctgtgctgcatctgtgacccggtcaagaagagccaaaagtaacatatataactattattttgcacacaaacaaacaaaattgaaattgaattgaaaactatatttttacgggatgctacagtattattgc

SEQ ID NO: 6995 - DNA, 2908 bp, DROSOPHILA
atgaagcgaatgcgcagcagtcgcctcctggtgctgccattgatccttgtgctgatcctgacgctgctcctccaaccgattgccgtccacgccaaatcgaagaagaacaagtccagccagagctcgcaccacggtgactcatcctcctcctcctcatcctcatcctcgtcgagtggctcctcatcggcggcagcatcgtcagcgaatgatgaaagcaaaccgaagggcggcgacaatggtggtcagcactttgccatggagccgcaggatcagacggccgtcgttggttcacgcgtaacgttgccatgccgggttatggagaaagttggtgccctgcaatggaccaaagatgacttcggtctgggccaacatcgcaatttgagcggcttcgaacgctactcgatggtcggcagcgatgaggagggtgacttctcattggacatttatccgctaatgctggacgacgatgccaagtatcagtgtcaagtgggtccaggtccacagggcgagcagggtattcgttcgcgattcgccaagctaaccgttctcgttccgcccgaggcgccgaaaatcacgcaaggtgactatctggtgaccaccgaagatcgtgaaatcgaattggagtgcgtgtcgcagggcggcaagcccgcagccgaaatcacttggattgacggactgggcaatgtcctaaccaagggtattgaatatgtaaaggaaccgctggccgattcgcgtcgaattacagccagatcgatactgaaattggcgcccaagaaggagcatcacaacacaacgttcacgtgccaggcgcaaaataccgccgatcgaacctatagatcggccaaactgctgctcgaggtgaaatatgcgcccaaggtcatcgtttcggttgtgggtggtgcattggctggtggcaaaattcccgaaggcgccgaggtaatactaagctgtcaggccgacgccaatccgcatgagctcagctatcgttggttcatcaacgatgagctaatgaccggagactttaccactaagatgatcattcacaatgtttcgaggcaatatcacgatgccatagtcaagtgcgaggtggttaatgcggtgggcaagagcgaacagagcaagaaactggacattagttttggtccagtttttcgccagcgtcccgttagcgtggaagccgatctgggcgccaccgttagcatgcgttgcgatgtggctggcaatccggagcccgaaatcgaatggatcagcgagaactccgatcaggttgttggcgttgcagcggaactgaaattgaaagtgagcagcgaaacggcaggtcgctacttttgcaaggctgtggtcaatggatttcccgaaatcggtgccgaggcaacgctgtacgtgaaaagggcaccgattatcacatcgcacaaggtgcaatttggcggagttggtggtcgcgttaagatcgattgtttggcctttagcataccgaaggcggagcatatactctggtcgttcgagggcaagattatcaatatgagcagcgccgatccggatatatatatattcgaggagcatcatttgccggagggcgtgcgagcggccttgattattcgcgatagcaaggccacacattttggcaaatacaattgtacagtgatgaattcgtatggcggtgattcgttggttataacattgctacgcgaaccgggcaacatacccgttctgctggtcgttatgggctccatgttttgcgtggccatcattctgatgatcgtaatgattattatcgtgtaccgcaagcgacgcagtcgcaagaagcccatgccagcggatgtaataccggaggcatcacgcggcggtgataagctaaacgaattgaagagcgagctacgctcgaaggcctatgatgtggaatactcggaggcgggcggcgatggactggccattaatcttacccaatcaccgatgcccgatgttcagatgaagggcgccacacttggtgtgccactagccggacccgttaagttcgatgagcgcttttcgggcgatttcggtggcgatcgttacaatcgacagtgtcacattaagaatctaaagaatcaacaggagaccgcctacaagggtagtccacaggccaatggctatgcccattactttgaatatgccctcgactatagtccgccgggcggtgagggtgctgccgtggtggtgggcagcggcggcgttggcaagttgaagaacggtggcatgaactcggccacgttgccccactcggcggctgccaccgtgaatgggggcggtgctggcaatgggggcggtgccagtttgccgcgcaatcagcggcacgagattcaacagtcgcagcaatcaaacggatttctcggcaatgaaactgatgtgatctctacgactttcgcaggacaaccgctgctgcagaatggcatcgatagccgctttagcgccatctatggtaatccctatttaaggacgaactcctcgctactgccgcccctgccgccgccgagcaccgccaatccggcggccacgcccgccccgcccccctatcatgccgctcgccacggccacgcccatcacgccaacggcggactcaagcattttgtgggcggcgctgtgatcaccacaagtcccgtgggaaatgtgaacattaatggcggcggaggcggtggctcgacgcccagcggtggcggcggcgtgggcgtgggcgtggcagctggtggcagcgtcagcggcagcagttccaacttgaccgccagcagcaatacactggcggccacgcccctagcgggcggcggcgtcggcaacagcggccagtgcgcccagagtccgtccggtcagtttatattgtcgaataatggcaaaggacacacgcagaaaggacctctggccactcatgtttaaa

SEQ ID NO: 6996 - protein, 968 aa, DROSOPHILA
MKRMRSSRLLVLPLILVLILTLLLQPIAVHAKSKKNKSSQSSHHGDSSSSSSSSSSSSGSSSAAASSANDESKPKGGDNGGQHFAMEPQDQTAVVGSRVTLPCRVMEKVGALQWTKDDFGLGQHRNLSGFERYSMVGSDEEGDFSLDIYPLMLDDDAKYQCQVGPGPQGEQGIRSRFAKLTVLVPPEAPKITQGDYLVTTEDREIELECVSQGGKPAAEITWIDGLGNVLTKGIEYVKEPLADSRRITARSILKLAPKKEHHNTTFTCQAQNTADRTYRSAKLLLEVKYAPKVIVSVVGGALAGGKIPEGAEVILSCQADANPHELSYRWFINDELMTGDFTTKMIIHNVSRQYHDAIVKCEVVNAVGKSEQSKKLDISFGPVFRQRPVSVEADLGATVSMRCDVAGNPEPEIEWISENSDQVVGVAAELKLKVSSETAGRYFCKAVVNGFPEIGAEATLYVKRAPIITSHKVQFGGVGGRVKIDCLAFSIPKAEHILWSFEGKIINMSSADPDIYIFEEHHLPEGVRAALIIRDSKATHFGKYNCTVMNSYGGDSLVITLLREPGNIPVLLVVMGSMFCVAIILMIVMIIIVYRKRRSRKKPMPADVIPEASRGGDKLNELKSELRSKAYDVEYSEAGGDGLAINLTQSPMPDVQMKGATLGVPLAGPVKFDERFSGDFGGDRYNRQCHIKNLKNQQETAYKGSPQANGYAHYFEYALDYSPPGGEGAAVVVGSGGVGKLKNGGMNSATLPHSAAATVNGGGAGNGGGASLPRNQRHEIQQSQQSNGFLGNETDVISTTFAGQPLLQNGIDSRFSAIYGNPYLRTNSSLLPPLPPPSTANPAATPAPPPYHAARHGHAHHANGGLKHFVGGAVITTSPVGNVNINGGGGGGSTPSGGGGVGVGVAAGGSVSGSSSNLTASSNTLAATPLAGGGVGNSGQCAQSPSGQFILSNNGKGHTQKGPLATHV

SEQ ID NO: 6997 - DNA, 4782 bp, DROSOPHILA
agaggaggagcggtacagcaagagtgccctgatccacaggatatcgcaggaagatatatgcggcaaggaggatgaggtggtccaggtggagtgcggccaggaccacagcatgtttcttaccaaaaagggacgcatttacacatgtggctggggtgcggatggtcaaacaggtcagggaaactaccacaccgccgggcagataaccctgattggaggagatgtggaaaaggagaagattgtgcggctcagctgctcctcggactgcgttttggcccttaacgaggcgggcgatgcctttggctggggcaattctgagtacggacagctagatgactcagagctggccgaaacccaaataaatatccctagagctctcaaactaacgaagtccatcgggaaaatcaaggatgtggctgcgggaggctcattttgcatggccctcaacgaccagggtctggtgtacacctggggctttggcatcctcggcttcggacccttcgtggagcaaacatccaagccgcagcatctgttgccgcctttattcggacgaaatgacttcagcaacgaaaccacagtggtttccatcggatgcggagtgtttcacatgggcgccgtcaactcggacggagatctcttcatgtggggcaagaacaggttcgggcatctggggctgggacacaagaaggaccagttctttccctttaaggcggccatcaacggaaaggtcaccaaagtggcctacggagtggatcacaccattgccttgtgcaagccgttcttctagattaagctgtttgttttagattagttaacttaaagtatactctagtcgaaaatactattgccagtggcagcccaaccaataaagatcacactgctaaagatcacaaattcgcgtttaatacatgtaagtagtttaaagaacatttagattaatttacttgtttctcttacgcatgctgatagttgccatgttttccgccctcaggttgtttttgctgtaaatagcttcgttctgaatccgttctatacattaattgttagaatagagtttaagagcatatatataaaatatgtacttggaatgccgcagtgtgtctgtgcgcgtgtaccgatccaatctctccgtatcctttcaatccgccctcgaggctaatacatttcacgtatttgtcacaatttcgtcgatcgcttttgattgcgttctaggtacattttcgttacgcttccttactagggtctataatttgctaaactcgcttggccaatgatgatatatccacccggagtgggtgtgtgtcctgctaaccagtggtaaccagatctagacttgtaggcatggctctgtgtatgtataaatcgattctaagtaataatttgtttaggttgtgttatcatatgggtgttgtagcttaaaagatcctcctcctcctccaaagctcaggcctgttgcctagcctcgttggcctcgtaggcctccacctcggcgatgttggccaggtcgtactcgatgacgcccttgcccatgaactcggcgtacttggctgactccggcagcggatcagccgatctcttcgagactgtaatgggtcgaggaatgggaatggatcagtaagttgctggcacctgtaagacattgctactcaccgcctgagacgaacttctccatcatgtagaccttcatatcgaagcactcgttggcaatccgctccgagatgagcgagacatcggtgatgcggggcatgaccacacgcatctggcgccgcacgcgctccgtatctatgttgtagtagccagtgctcatcttctttatgagatccacaaagctggtcgggggcagggtcgtgtcccgatccaagggcatgatgaagcaccgtccggtggtagtgtcgataatggccgactggttctccttgaagtcgtgcatgaagcgaccacgacgtccatccttgaagtcgggcacgtccacgcgtgcgtagccctcgtcatcgctgtcaccgtccagttcgatgtcctcgcggaagtggctctcgtccagcgatccactgttgggcatcggttgcgcgagctcgggtagcaaggagcgccagttcagggcgaacggttccacggtgcgcggatatacccgcgccatctccatcgagtcctccggataggggatctcgcacagggcgtggtagcgcatgctgctatgcgacggagcgtacactcggtacagggtccatccgcccaggacacccaggagcatcacgactacggcgatcaggaacagcagaaaggatttgatgcaatggtgctgcggccggttgaagaccatggattccgcgtcggcttcattatcgctgtaagcaaccttgggctgtgtgtggaaaatggggggttttaaaaatatgggatactcctctaagtgtcacttgcaattttgtaggaacaacaaattgcaatggaaaagtagcagttttatatacaatctaaagttatctaaaatgaccgacttgttatatctgtttccttatcacccattgttccagtggaaagtcataaaaacgacgataagtcgtagaaaaatacaaatagaaggcagttgactgtaatgttgatagtggaagttccacaagtcgaaaggtttgagcttgctgaatattaatcacacatttatattttccgccagctcagcaagataatttttcactgcaatgccttctcttgttctataaacaatgcaattgcattgctaagtcaaaattgtttcgaaagatacgtcgttagcgagagattagtctaaggaggggtcagaagagatccccttgcaaaaaattaatcaattgaaggcatttgcatgcactagagtggaccttattcgactatgtagtgcataactcatatgtaaatgtatgattgtatataaatctctggaaaattagtgatatctacactaaataaataaactgcagatgggcaaatatgctgggagatgggagatgggagctggcagctgggaatgattgtgcttatgaccagcaagctgataagacacgactttctctggatacccgtgcacacgaatcgaggtcaaagtgcacagtgtcagcagctcacaaagggctgcaactggcaccgtaagtggctttccccagccgtcagggccaatctccaccagcaacaggaaaacccttcgcgctgacctcggggagcgagcgagcgagtccttggcgcggaaagcccaggaaagtgaatgggcacacgtcacttggagtggagcaggggttgcatgcgggcaggggggtaaggggaagcacgggccacaaggacaccaaggagtgcggagcttggtcggggaaaaatcgatggcgagctgctgctgctgaggctgtaattcggaatggattccgaatcggaatcagcaccaaccacccacccatcacgagacttgtggctctcgggccgcaggacgaaggacacggtggcgggcagggcgcgagggatggacaaggacatagcacgattgcgcaaaaataaggacacatcccgcagatgcgatgccaagcaaaactcactgcgattagggagccatggtgcatgagcgcctcgtcgttgaggttcatgggcaggggcaccttctcctggtccgtgggctgtccccgcagttttcccagaattgtcatggctgctcgtatgctgtgttcttgatgcctccgcacgaccaacttgtttgtttttactgaaaatttagtgcgcaattgttgacgagctgaaatctcgatccagacaagccagtgtgaccagttctaattcgcctttcaaaagatgtggacaaaagtgaggcaactctagagtggttgcaaacttggaaaagacgattcgccgcccaaaaattcgaaacttgaatccgaaaaaaaattgtgaggcacaaattgttatcttacaaacgaaaaaacatgatacatttatatttttggagaaaacccaaaacatacaactaaactcccttccaaaacgaattgcttacttgtatcttatggaagtttatttcgctgataacacaatacgttctactggcagttctagggacttttttcaaaaatgcaaatgagtttcttaacatacactttaaacacagaatgattgaaacgttcgcctgcggaagttgggaacctacgacctctggactacacagcggactatgcagaccgctttcgacctttatttctgcactcttacagtctaatcatacagagcagagcgtcctacttatgactatgttggttagagaggaaggcgaggtgacccttgggacacttgttcgcgtagtggcccttgttcccgcacttgtagcaggtgatctcctccaggggcgtgggcaccttgacgaagccgggaccatgcggctgactgtggtgattggattgcatgtcatcggcaccctcgatgtggccggagtgtccagagtagccgcccgagtgtccgccggagtgatccattgcgttgatattgttgcgatgctccaggctgcccacatactgcttgcacgagttggccttgtggcccagctcgccgcaatagtggcacgtgggcagtttcttgtgcagctgatccttacccagttccgccagcgggggcagctcgaagtgcggatgcatgtgcttgcaggacgggccctcggggcagaagccggctaggtagtccatgcacaggacacggcgcagatgctggtgccggcagtggggaccgtggcggcagaagcctctcttgtaccacggacaatccttcaccttgctctgc

SEQ ID NO: 6998 - DNA, 1453 bp, DROSOPHILA
tcacactggcttgtctggatcgagatttcagctcgtcaacaattgcgcactaaattttcagtaaaaacaaacaagttggtcgtgcggaggcatcaagaacacagcatacgagcagccatgacaattctgggaaaactgcggggacagcccacggaccaggagaaggtgcccctgcccatgaacctcaacgacgaggcgctcatgcaccatggctccctaatcgcacccaaggttgcttacagcgataatgaagccgacgcggaatccatggtcttcaaccggccgcagcaccattgcatcaaatcctttctgctgttcctgatcgccgtagtcgtgatgctcctgggtgtcctgggcggatggaccctgtaccgagtgtacgctccgtcgcatagcagcatgcgctaccacgccctgtgcgagatcccctatccggaggactcgatggagatggcgcgggtatatccgcgcaccgtggaaccgttcgccctgaactggcgctccttgctacccgagctcgcgcaaccgatgcccaacagtggatcgctggacgagagccacttccgcgaggacatcgaactggacggtgacagcgatgacgagggctacgcacgcgtggacgtgcccgacttcaaggatggacgtcgtggtcgcttcatgcacgacttcaaggagaaccagtcggccattatcgacactaccaccggacggtgcttcatcatgcccttggatcgggacacgaccctgcccccgaccagctttgtggatctcataaagaagatgagcactggctactacaacatagatacggagcgcgtgcggcgccagatgcgtgtggtcatgccccgcatcaccgatgtctcgctcatctcggagcggattgccaacgagtgcttcgatatgaaggtctacatgatggagaagttcgtctcaggcgtctcgaagagatcggctgatccgctgccggagtcagccaagtacgccgagttcatgggcaagggcgtcatcgagtacgacctggccaacatcgccgaggtggaggcctacgaggccaacgaggctaggcaacaggcctgagctttggaggaggaggaggatcttttaagctacaacacccatatgataacacaacctaaacaaattattacttagaatcgatttatacatacacagagccatgcctacaagtctagatctggttaccactggttagcaggacacacacccactccgggtggatatatcatcattggccaagcgagtttagcaaattatagaccctagtaaggaagcgtaacgaaaatgtacctagaacgcaatcaaaagcgatcgacgaaattgtgacaaatacgtgaaatgtattagcctcgagggcggattgaaaggatacggagagattggatcggtacacgcgcacagacacactgcggcattccaaaacgaagctatttac

SEQ ID NO: 6999 - protein, 319 aa, DROSOPHILA
MTILGKLRGQPTDQEKVPLPMNLNDEALMHHGSLIAPKVAYSDNEADAESMVFNRPQHHCIKSFLLFLIAVVVMLLGVLGGWTLYRVYAPSHSSMRYHALCEIPYPEDSMEMARVYPRTVEPFALNWRSLLPELAQPMPNSGSLDESHFREDIELDGDSDDEGYARVDVPDFKDGRRGRFMHDFKENQSAIIDTTTGRCFIMPLDRDTTLPPTSFVDLIKKMSTGYYNIDTERVRRQMRVVMPRITDVSLISERIANECFDMKVYMMEKFVSGVSKRSADPLPESAKYAEFMGKGVIEYDLANIAEVEAYEANEARQQA

SEQ ID NO: 7000 - DNA, 5872 bp, DROSOPHILA
aatgggtggatgttccatccgctccacttcgccgcgatgcttcgattagtgtttgaattgatatttgaaactataggaatttgatctcagagttagcgagtcggctacaacagtgtaccgataattccataattccagcagataattccgattcgatgatccgagtcgagagttcactttagctacccagttacattgttgactgtgcacaatccacatagttcttaaatagcgttaaccaatatacaataacaacattactcaattaatgttcgttcacaaaaagtttaatcaaaaaaccaaaaaaaaaaaaaaacaacaaaaaaacaaaactttaaaaaccaaacgaatatttacagcgtaaattaaaagtaaagttaatgcaaaatattgatgttcaaaaaaagcaagtccgtgaatggtcctactcatgtcattaaatgtagatctcaaatatgcaaaacaaactaaataattaaaccagtcttaaatgtgaaaaacttcagcaaaattccacccaaccaccaaaaaccacaccaaccgccaccaccaccaacacagcttcgagctagtcacaaataaatgcaatattttaaaaataccatttaaagagttttacttctttttctttaaataaaaagtggcctgcgaaagtgcagttctcctgaagtttatgctcactgctttcataaaaaataatacggaaatgcactctcggcaatctatgtcccttaaaacgtatagtcccggggattcagttttctccagatgattccttccctggctgagttttatgtgcttctctttacggtgcacggagtagcttaggtaagaaagatatggggcaataaatttgatgcggaaaagcgaatcctttcatttgtacacataaaaccagaaacatttttatttaatatagctcatactcattctcatttctacctaaagctcaattaatggtatcattcacttactcgctgtatttgttactattcagtgctcaatacatagtggccagctcgagccaactatcgggaaataggcgaataaagtatctgcgagttgtttcgatgaagaccagcagtatcatgaacggacagttggtcaagaggaagtggccaaagctgaaagagggaagcaagcaagtgtcatggcgtggtactcatgcggtcaggaacacccactgtagctcattggttccttccaggcgcagacacaccgtggagtccattatgcacagctgcacgcacagacagatcagaaggaggaccgccagactgaggagccagttgcggaatccgtgggccagcagattggcacgtccggtcttggtcagcaccaggttggtgcattgcatcacggcgaggctcatcaggcagagggaggacacttggcactccagctgccggcgtgcctcactgctctgcggaagagtcacagttcagcttggcttacttcctgcagatatacagatatacattgttatccctacccactcctgaccgaaagagtcggtgatgtcgtcgagcatgtcgtcgtgccacgcgatgttcagagccaccagtgtcctcggcaggaatcccttgtcagccatgaacacgaagtaggtcataaaaacagctgcagcttcgatggttcccacaaggatgtgggacacaaagaaaagtctacaggatacgttttggaaaaacatcgaataaagaaacgaatttagaaaaatttctcccataagcctttgctatctaaagtacaaacagtttctgcctttaaaactcctggaccaaaaggacctcttcttatgctccttcagaagatatgttttgccaataatttgtgaatgagtactaacttaccgactattaagcagaaagtcgtcgtacactttgggcatctgcagcatcagattctcctctggaggctcataaatcaaagtcagagctgggacctatggaaaaattggactcggtttcagtactctgcgtagcacactttataggttcctcccccacactcaccaagttcaccaggaaggcgagtatgagctcatccatgatatggatgtacaggggaatcccgagcaggaagaagaataagtacaccagtatattgcatatgttggtggccaggcaataggccagagccttctttagattctcaaacagcagacggctatcgccgaccacactgaccaatgtggcaaatgaggtgtccagcaggatgaggtctgcactggcctcgcacatgaccgcacttccgtacttggccacgcccacgtggctgctcctcatggcgggcgtgtcatggagtgttcctccaataacggagacaacggctcccaaccggcgacaggcgtccgcaatccagtggagctgatccgtgctagtagcggcacataccaaatcctgctggttcagaatgagctgctcgatgtggcgacgctggtgttgcggcttctcgtcagcatactgtgacatgtctactacttccgcggtgggtggcatccgcttcaggttcacagcctgaaaagtgtccgacggagctggtagaatgcccacatcaacagccagagccttggccattttgggcttgcgttgagtgaccacgatcaacttgatgcccgccgctctgcagcgatccaccgctttgggaatggtgcttcgcggcggattgtaggtagcaatcatgcccaggaacctcaacgagtaggtatccaccgctaggtaatcgcggtacttatattccccgccctccaatccagtgtttacctgtgagaagcggcgaaactccagttcgtcgctcaactccttgtaggcaaaggcacggacatggcggcctgcctcgagtagcccatccgccagactgagaataatttcctgcagctgttcgtccagaggcagttcctcgtcccgaatagcaaaggtggagcaccggcggatcaccacttcgcagtggcccttcatcagcaggacaagttttaggtgcccatcggcatcgcgagtcctgtgcaccgtcacctggaccttgtcctcactattgtaatgcttgttggccaccttctcgtggtcgtgacggagtagatcaatgctcggcaaaatcatcagaccgaacttgagcagcgctatgtccagaatattgccgtacatgtccttctgcattttgggcactccaatgttaccaggacatatgaccgcatcgttgcagagaactgaggcccggatcagctcgataaatcgaggactttgagcactaacgtccagattatcgacactaagcagtcccatgtccacgaagatctccgatactcgcatgcgtcgcttggtcatcgtcccaaccaaatcggacacaattacagttgagagacccagtgtgcaagtagcccgcaggttccttacatggcactgttttctccccatttcctttctcgtccgcctcaagccccagtagaggataaagggcaggtagacgggtgtcagaccaatcagcagtgagagattgacttcatacacaatatggccgtgctcgaatccggtggtaaggaatagcagaatgaaacaaactatggccaccaagagcatatagtaagaaatctaaaagtataatcggcttagatattaattttctaggatgctatagcactgctcacttgcttctgatgcttctgcgaacgactgcgagatcgctccttaaagcagaggtccgtcatcgatcccacttcagtgttccttccacaggctagggccactgcgaaaccaatgccactgatcgcatgggtgcaggctagtcccatattgctggaactccatttcgataaggttttggaactcatgccgaagctatttaattgatgtgtctaaagtgtcacataggcaacagatgtcttggatgataggaaatggtcaaccatttctgccaacagtacgtatgagtgataatcctcaaagcgatggctcgagaaacaaaattcacttataacagcagtgttttttatgtctttggaaagctaaggaagtttatagaatatacaataagaaatcatacatttgccaattagaaaccaatttaatcctttatgtactcaatccgggagtatctctgtcgtccctcgttcgccaaaggagtaatatgcatgggtttcgagtgtcctgtcagagccacgttgttcagctccaggcccgtggtgctgaagaatcgcatatcggcaggtagccgctgtccatacttgatgggaagggtatccccgggaactaggtcctgagtacggatgacctccttttccccgtctcttatcacagtgcaatacatgggcatcagctcatcgaaagctatgagcatgtcttcgtcatcatctccttgcatttgtaccgtgagccctgcgagaaagaaggttacgagcaggatgatgcccgctaccaagaactcaggatccacttttccattgtctggcgttttagttgcaaataggtaatacatcgcgaaactagctatggaactcagcagtatgatgatgcccaagatgctgaagcagctcttcaggaatatccaaggccgcaactccagtttggtcgggagtggcagaacattcttgccattcctggccagctttctacccgctgcctccgaggttagaccctgtggatggtgccttggatataattgagattagctccattttcccgatctcacctgggacacattcgcctccagtctggcgcatagctcgtgaaacggccagatgtgcagatatgggctaaagtactccagccacaactcgttctccgtctgttgcagtgactcccgttcctctttcttcttcctcctgctgcgacaccacctgcctctccatttcgagatccgtttgaagcagagcaccatgtttacggaaaactctaggcaatttgtggagcagtgtttcaggagcgtagaactggcaaaatggctcataaaagggccatcaatgttttctcgtaaaccagcatcgcaactcccactgtcacttcagccgccccagggtcaggggtcagggctcacagacattaggggtcataacgaagccgagaaacagcggaacaatctcaacggttccgctgggagtcgcaatcgaactcgcaaatcgactcgaattgatacgccgactttctgcaaacaattgcgcccaaaggccgattccgtgatattgacactggcatgttccatgctccaaacgccgtatttacaagcggacggaatgcgctctttatggcctcgtttaataagtcatcaaatttcattgctgtcgtgtaaaaaaaaagagataaaacatgcatttgcatatatttatgcgttgcggggcgggccatcaataaaacgagaaattccagcgtttgcgctcaataagttcgaattggagcaaactatactgccggatgatgtgtgccattattggaggtcaatgggttcctttgtggcagcataaaagcggcattaaaatactggaaaatcgaagaggcgtttaattagattgcaattactatattgacagacaagcttcagctttaaaatcgtacagaatattttgattaggagtgataaattttaccatattaaatatgttatcatgtagatacaaaacaggcgtccatgattaagaaacagagaagctaactttaaagcttacattcaaagaaacgaaaagttttcaatgctaatttccatttttataataatttaatatatgcacacttgggggtagtaatatattttactaaaaatagcactaatagaagtaattaataaataaaaaatatttttagatgcttgctagatggggaaaaggttgagtgttccaaattcggtgtccagcagtgggtgttcccatagaagaacagctgatcac

SEQ ID NO: 7001 - DNA, 3093 bp, DROSOPHILA
atggtgctctgcttcaaacggatctcgaaatggagaggcaggtggtgtcgcagcaggaggaagaagaaagaggaacgggagtcactgcaacagacggagaacgagttgtggctggagtactttagcccatatctgcacatctggccgtttcacgagctatgcgccagactggaggcgaatgtgtcccagggtctaacctcggaggcagcgggtagaaagctggccaggaatggcaagaatgttctgccactcccgaccaaactggagttgcggccttggatattcctgaagagctgcttcagcatcttgggcatcatcatactgctgagttccatagctagtttcgcgatgtattacctatttgcaactaaaacgccagacaatggaaaagtggatcctgagttcttggtagcgggcatcatcctgctcgtaaccttctttctcgcagggctcacggtacaaatgcaaggagatgatgacgaagacatgctcatagctttcgatgagctgatgcccatgtattgcactgtgataagagacggggaaaaggaggtcatccgtactcaggacctagttcccggggatacccttcccatcaagtatggacagcggctacctgccgatatgcgattcttcagcaccacgggcctggagctgaacaacgtggctctgacaggacactcgaaacccatgcatattactcctttggcgaacgagggacgacagagatactcccggattgacaatatgggactagcctgcacccatgcgatcagtggcattggtttcgcagtggccctagcctgtggaaggaacactgaagtgggatcgatgacggacctctgctttaaggagcgatctcgcagtcgttcgcagaagcatcagaagcaaatttcttactatatgctcttggtggccatagtttgtttcattctgctattccttaccaccggattcgagcacggccatattgtgtatgaagtcaatctctcactgctgattggtctgacacccgtctacctgccctttatcctctactggggcttgaggcggacgagaaaggaaatggggagaaaacagtgccatgtaaggaacctgcgggctacttgcacactgggtctctcaactgtaattgtgtccgatttggttgggacgatgaccaagcgacgcatgcgagtatcggagatcttcgtggacatgggactgcttagtgtcgataatctggacgttagtgctcaaagtcctcgatttatcgagctgatccgggcctcagttctctgcaacgatgcggtcatatgtcctggtaacattggagtgcccaaaatgcagaaggacatgtacggcaatattctggacatagcgctgctcaagttcggtctgatgattttgccgagcattgatctactccgtcacgaccacgagaaggtggccaacaagcattacaatagtgaggacaaggtccaggtgacggtgcacaggactcgcgatgccgatgggcacctaaaacttgtcctgctgatgaagggccactgcgaagtggtgatccgccggtgctccacctttgctattcgggacgaggaactgcctctggacgaacagctgcaggaaattattctcagtctggcggatgggctactcgaggcaggccgccatgtccgtgcctttgcctacaaggagttgagcgacgaactggagtttcgccgcttctcacaggtaaacactggattggagggcggggaatataagtaccgcgattacctagcggtggatacctactcgttgaggttcctgggcatgattgctacctacaatccgccgcgaagcaccattcccaaagcggtggatcgctgcagagcggcgggcatcaagttgatcgtggtcactcaacgcaagcccaaaatggccaaggctctggctgttgatgtgggcattctaccagctccgtcggacacttttcaggctgtgaacctgaagcggatgccacccaccgcggaagtagtagacatgtcacagtatgctgacgagaagccgcaacaccagcgtcgccacatcgagcagctcattctgaaccagcaggatttggtatgtgccgctactagcacggatcagctccactggattgcggacgcctgtcgccggttgggagccgttgtctccgttattggaggaacactccatgacacgcccgccatgaggagcagccacgtgggcgtggccaagtacggaagtgcggtcatgtgcgaggccagtgcagacctcatcctgctggacacctcatttgccacattggtcagtgtggtcggcgatagccgtctgctgtttgagaatctaaagaaggctctggcctattgcctggccaccaacatatgcaatatactggtgtacttattcttcttcctgctcgggattcccctgtacatccatatcatggatgagctcatactcgccttcctggtgaacttggtcccagctctgactttgatttatgagcctccagaggagaatctgatgctgcagatgcccaaagtgtacgacgactttctgcttaatagtcgacttttctttgtgtcccacatccttgtgggaaccatcgaagctgcagctgtttttatgacctacttcgtgttcatggctgacaagggattcctgccgaggacactggtggctctgaacatcgcgtggcacgacgacatgctcgacgacatcaccgactctttcggtcaggagtggagcagtgaggcacgccggcagctggagtgccaagtgtcctccctctgcctgatgagcctcgccgtgatgcaatgcaccaacctggtgctgaccaagaccggacgtgccaatctgctggcccacggattccgcaactggctcctcagtctggcggtcctccttctgatctgtctgtgcgtgcagctgtgcataatggactccacggtgtgtctgcgcctggaaggaaccaatgagctacactttggccacttcctcttgaccaactgtccgttcatgatactgctggtcttcatcgaaacaactcgcagatactttattcgcctatttcccgatagttggctcgagctggccactatgtattga

SEQ ID NO: 7002 - protein, 1030 aa, DROSOPHILA
MVLCFKRISKWRGRWCRSRRKKKEERESLQQTENELWLEYFSPYLHIWPFHELCARLEANVSQGLTSEAAGRKLARNGKNVLPLPTKLELRPWIFLKSCFSILGIIILLSSIASFAMYYLFATKTPDNGKVDPEFLVAGIILLVTFFLAGLTVQMQGDDDEDMLIAFDELMPMYCTVIRDGEKEVIRTQDLVPGDTLPIKYGQRLPADMRFFSTTGLELNNVALTGHSKPMHITPLANEGRQRYSRIDNMGLACTHAISGIGFAVALACGRNTEVGSMTDLCFKERSRSRSQKHQKQISYYMLLVAIVCFILLFLTTGFEHGHIVYEVNLSLLIGLTPVYLPFILYWGLRRTRKEMGRKQCHVRNLRATCTLGLSTVIVSDLVGTMTKRRMRVSEIFVDMGLLSVDNLDVSAQSPRFIELIRASVLCNDAVICPGNIGVPKMQKDMYGNILDIALLKFGLMILPSIDLLRHDHEKVANKHYNSEDKVQVTVHRTRDADGHLKLVLLMKGHCEVVIRRCSTFAIRDEELPLDEQLQEIILSLADGLLEAGRHVRAFAYKELSDELEFRRFSQVNTGLEGGEYKYRDYLAVDTYSLRFLGMIATYNPPRSTIPKAVDRCRAAGIKLIVVTQRKPKMAKALAVDVGILPAPSDTFQAVNLKRMPPTAEVVDMSQYADEKPQHQRRHIEQLILNQQDLVCAATSTDQLHWIADACRRLGAVVSVIGGTLHDTPAMRSSHVGVAKYGSAVMCEASADLILLDTSFATLVSVVGDSRLLFENLKKALAYCLATNICNILVYLFFFLLGIPLYIHIMDELILAFLVNLVPALTLIYEPPEENLMLQMPKVYDDFLLNSRLFFVSHILVGTIEAAAVFMTYFVFMADKGFLPRTLVALNIAWHDDMLDDITDSFGQEWSSEARRQLECQVSSLCLMSLAVMQCTNLVLTKTGRANLLAHGFRNWLLSLAVLLLICLCVQLCIMDSTVCLRLEGTNELHFGHFLLTNCPFMILLVFIETTRRYFIRLFPDSWLELATMY

SEQ ID NO: 7003 - DNA, 4356 bp, DROSOPHILA
tttcaatggaaacacacaagaaagtgaaattctactgttagtgacaaaataaatatgaaccacgacaaatggtagcaatatgcaggaaaaacataaggtcaaagtaatgaaaaactcggtatgttcttatgaatgtaacactaacgaattaatttaaagtttaataaaacggaataaatgagaattttactgaataaaaaacacaaaacagaattgaacaaatatatcacagttatttattggtttgggtgtttaatgtttatgccatattattactcttagtcttaatttgttttatttgtgggatttaagatttttaaaacaattaatgtgcctttttagagaagtcaaatatttttaggcttaacttacaggtaacatttttaaatttcaagttcatttgcttttaaaatttcagactcaattatcagacattgtccacaaattcgtttcttaaaatacaaatcgttcttaaaagcaacaaacatttacttcgcatcccactcgtgctgcattttaaatgagagaatcaataacctttattcataaatcagagtttgaattgtttatgcagtttaataattattaaatgaaaatttcttaaaatttttttaaacatgtaaaggctttggcaatattattttattttaaatactcaaaattctttttcattctgttatatatatatcaatgcagtaattgacccattagttacaaactgaaaacgaggttcactgttcgattgattttattcgagcgagcaaaaaagtatttttaaagcattaacaagtaaattccagatcttccttccggttatgttgctaattttaagtcccagcccatcgcaataaccattaacttgcagctgggcacttggtataacagtttataactccacgggatcgaatatctgtgtactgtgagcttaaagctccgcttgtttgggatccaagccagcatattaagcccgattccaaactaagctcttgcagttagcgcgctcaactcgaactgaacggaggtccaaaaaaaaagaaacgagcaatccaaaaaaaatcgaataattgaaaaatccaaaatgaacccactaggaatgttgagcctgggcttaatggtgtgccttatcggcgccttcagccggattgcatcggccaagctggaggagaagttctcgtggaagcaactggccttcgattggcccactccggaggccgaggcggaggccaagtcgaatggccactacatcgtggagaacaacctgccgctgggcgtggagcgttggcaaaacagaatctttgtcactgtgccaaggtaagtaaccaaattcatagacaaaaaaaaaagagacaacaaacttacggtaagctgtagttaggttttctttttttttcttattatttaccttttttgttggcttggtttgtaattaaatgtcaagctagacttgcaaaatcatcgagcgtcaggaggggaaaccggtttcctcgctggctagttaactttatcattttttaccccatttgtgtatgtctattttgcattttaaatcgtggtttctaaatgcaaatcgtaacatgaggttaattataaattaataagagaaaacacatgatcggaaaattctatggaatattatggatcccataaaaggctaactaggtaactagtaaacaaagtctttgtgacgtcacctttttgggatttaccaccgatgcgcttattggccaaaaagccccgaaaaccattctgcttttcgggagatatgagtaatcaaaacaaaattcgatttaaaaacatttcgaaaaataagatacgtaaaaaaagtatattttgttgataatacagcataattatttaagctatagttgccgtcaaagttttaactgatagtgctaagatataaattaaaactatagcttatattagactatatccaatcagtcataataattgcgcaggtgaatggtactttttaatgttattaatttgttacttgccagtgtcaggtttaaatgtaattagtaactaaacaagtctgaaatgtaaattttttagttaatttatttctcctcattattaaatgatctactttccctttagatggaaggctggtgttgctgccacactcaactacatcgacattaattcgacggagaagtcgccaaagctgcatccgtatcccagttgggaggccaacaagctgcccatcgatgtgcagccacaggaccaaaagacaccatccggtggacgtctggacgcggacaaggctcaagatgccggcatccagctgaaggacaactccactgtcatttccaccttccgaattcaagtcgacgtatgcgatcgcctgtgggtgctcgatactggcttggccgacatcctgggcagtcccaagcagattacgcccaattcaatcctggttttcgacttgaaaacagatactttactgcgccgtttcaccattcccgctgatcagaccaaagaggactcgttctttgcgaatattgtgagtatgcataggcgtattatttaaattccaaactgatcgaattaatcaatatttaggttgtggatgcggaccgctcggagtgccaagatgcctttgcttacattccggatttgggtgcctacggtgtgattgtgtactccctgaggaacgacaaatcctaccgcgtcaagcacaacttcttccacttcgatcctctgcatggtgatttcaatgtgggcggcgtgaacttccagtggacggatggcgtttttgggctggccgtgggcccaatgaatccagatcactccaaggacatttatttccatgccctggccagtaccaaggagttcaaggtttcgaaccgcgtgctgcaaaacgaatcacacgtgaccgctggcgattcgtattacgattttaaatacgttggtgaccgtggcatgaatggccagtccaccgccgaggtctttgaccccgagaccggcgtcatcttctatacgcaggtgaacaaagacgccattgcttgttggaacatcaagcgtccatacactccggacacccaggggctaatcgattccgattcgcacactctggtctttccaaatgacatgaaaatcgacaatgaaggcactatttgggtgctgtccgacaagatgccgacatatttgtacaaggaactcgatccctcggccgtcaactatcgtattttgatgggccagaaccgcgatctcatcaagggtacaccatgcgaaatgtgatcacttggatatttaaatctacatgctgtgtttatgacgcggtgcatttttgtatttacattatgacattattgtttgttagtaagtcagcttaataaactatttgaaatgtgattgattgggtataccatggtgagcctaagttaaatgtcggatttcaggaggttgtcggccagttgcaccttctcaccgggcttaaaggcgggcatgcccaaataggggcaagtggagcagcggaaggcgtcgccgagataacactgtgcatataagaaatcagttataatcgaggttaatgctaactcacatcggggttaagagaactcacatttccacagcttgacttggcattctcggtggccttctggctctgtttttcagtctccaattcctcggccagcccgcaggagcagtttttgcacgccttgcgcttgcccgtggtgctacagacacgcagaccagccggatccggcttctgtttgtcttcctcgtccagcagctcctcctcatcgatcagttcctcatcgtcaccgcttatcttccacacattgactgcactggcgttcttctttgcgaatgacaacctggctgaggatcctgtctcgtagccaggcttctcggcggtcaaagcatctggagagtcctcgcgacagtttatgaatccggatagcttgatctcctgcagcaaactagccgccggaccgatgtaggacaccaaatgcagtttgccactcggtttcagcatgtgcagcagttttacgtaactgtcggtcagctgggcgcactcgatcacaatcaggtcgaaactggagttggcataggaagctgtaatgcataaacatcactgattttaatctgctgactcactggctagtcaaaaacagcacacacacaccgcaccgcacgcaacttacaaaacgaaaggcggtgcacattttccaaagccacatcgccgccagtggccgcctttagttgctccacgcgcttgtccaagtcggcgctgtccgtccatatgtatagggatttttgtagacccttaaagttctccattgtggatgtgtttctagaatatctcaaaagttcaagcaccgaacggaaccgatttttgatttcaca

SEQ ID NO: 7004 - DNA, 1508 bp, DROSOPHILA
ctcaactcgaactgaacggaggtccaaaaaaaaagaaacgagcaatccaaaaaaaatcgaataattgaaaaatccaaaatgaacccactaggaatgttgagcctgggcttaatggtgtgccttatcggcgccttcagccggattgcatcggccaagctggaggagaagttctcgtggaagcaactggccttcgattggcccactccggaggccgaggcggaggccaagtcgaatggccactacatcgtggagaacaacctgccgctgggcgtggagcgttggcaaaacagaatctttgtcactgtgccaagatggaaggctggtgttgctgccacactcaactacatcgacattaattcgacggagaagtcgccaaagctgcatccgtatcccagttgggaggccaacaagctgcccatcgatgtgcagccacaggaccaaaagacaccatccggtggacgtctggacgcggacaaggctcaagatgccggcatccagctgaaggacaactccactgtcatttccaccttccgaattcaagtcgacgtatgcgatcgcctgtgggtgctcgatactggcttggccgacatcctgggcagtcccaagcagattacgcccaattcaatcctggttttcgacttgaaaacagatactttactgcgccgtttcaccattcccgctgatcagaccaaagaggactcgttctttgcgaatattgttgtggatgcggaccgctcggagtgccaagatgcctttgcttacattccggatttgggtgcctacggtgtgattgtgtactccctgaggaacgacaaatcctaccgcgtcaagcacaacttcttccacttcgatcctctgcatggtgatttcaatgtgggcggcgtgaacttccagtggacggatggcgtttttgggctggccgtgggcccaatgaatccagatcactccaaggacatttatttccatgccctggccagtaccaaggagttcaaggtttcgaaccgcgtgctgcaaaacgaatcacacgtgaccgctggcgattcgtattacgattttaaatacgttggtgaccgtggcatgaatggccagtccaccgccgaggtctttgaccccgagaccggcgtcatcttctatacgcaggtgaacaaagacgccattgcttgttggaacatcaagcgtccatacactccggacacccaggggctaatcgattccgattcgcacactctggtctttccaaatgacatgaaaatcgacaatgaaggcactatttgggtgctgtccgacaagatgccgacatatttgtacaaggaactcgatccctcggccgtcaactatcgtattttgatgggccagaaccgcgatctcatcaagggtacaccatgcgaaatgtgatcacttggatatttaaatctacatgctgtgtttatgacgcggtgcatttttgtatttacattatgacattattgtttgttagtaagtcagcttaataaactatttgaaatgtg

SEQ ID NO: 7005 - protein, 438 aa, DROSOPHILA
MNPLGMLSLGLMVCLIGAFSRIASAKLEEKFSWKQLAFDWPTPEAEAEAKSNGHYIVENNLPLGVERWQNRIFVTVPRWKAGVAATLNYIDINSTEKSPKLHPYPSWEANKLPIDVQPQDQKTPSGGRLDADKAQDAGIQLKDNSTVISTFRIQVDVCDRLWVLDTGLADILGSPKQITPNSILVFDLKTDTLLRRFTIPADQTKEDSFFANIVVDADRSECQDAFAYIPDLGAYGVIVYSLRNDKSYRVKHNFFHFDPLHGDFNVGGVNFQWTDGVFGLAVGPMNPDHSKDIYFHALASTKEFKVSNRVLQNESHVTAGDSYYDFKYVGDRGMNGQSTAEVFDPETGVIFYTQVNKDAIACWNIKRPYTPDTQGLIDSDSHTLVFPNDMKIDNEGTIWVLSDKMPTYLYKELDPSAVNYRILMGQNRDLIKGTPCEM

SEQ ID NO: 7006 - DNA, 3221 bp, DROSOPHILA
tctctcggagagcagtcgctgcacataggcctgcaccacgtcgtagaagtagtggcggtactccgaaacgggaatctttctcttctgcgcccagtactccatgcacaggtcgatgtgctcgcccttggtggccacctccttgatgatggtcacctcgctaatgcccctccagttcttgaagattttgtcgcgggcctgagcctgcgcctgggcggaatgcatcttggtgggcggagttcttggaatgttctgcgggctttttcacatctctttgttgcaatcaacagttgataatagcgaaaacagctgtatgttctgcttcttcttctccggaaccttatctagttccgagtgcaagtacagtaagcactgaaaataatgacgcacaaattgtattaaatggagccacattttaactaaaaatatctgaaactttgttcagtccattgctgtcgaggaacttttgtctcttacccttttgccacaacgggaagtttaagtttattattattattaagtttatcaatgtcaaagagtaaagtttttaaaatattcaaatcatttaatgtcatctactataagatattcaaaaaaaatttacttaaatattgtggaataaatatagcgatagagtaaaaaaatggccccatccctttctagcacacgtaatttcttttaaaagaaaagttgctgattaagtttttggaatttccggtgtgaacacgacatctgattggccagacctgccaacttgttcgaggtgggtgtaaaactccgatggtatgagtacctgctaggattttagcaaagttcgaacccaatccgtgctcattcttggttataattaggttattttttcgatattttgaggtatatttctacgatagatcggcggtcacatcgtatttccctccttttcgttttcgtttccggcgaagtaagtataataaaatctccacgttttttttaatgctaataattgaaacatctcattggcaaactagcgaataatcttggaataaccagtccgcgagcaacaaaatgtcgaagagaggtaaaaatccgaacgaaccgcgccgctaagcgtgcgaaatgtgacgcgccggatgtggagagtgtcgaagttgtggtgtgcaaaactaataaccctctgtttttcggtctcatccaggacgtggaggtaccgcgggaggcaagttccgcatctccctcggtttgcccgtgggcgccgtgatgaactgtgccgacaacaccggagccaagaacctgtacgtgatcgccgtccacggaatccgcggtcgccttaaccgtctgcccgccgctggtgtcggcgacatgttcgtggccaccgtgaagaagggaaagcccgagctcaggaagaaggtgagtgtggtgcccagtgctccggctgaatcggtcatgtgctaaaagtgcccatgggctagcaacccgcccagtgaacacgtttttccactttgtttgtgtgcgttttcttgaatgaaattcaacttgtttctgtttcaaagaagccaatttgaaattagttagctcttattacattgggttgcttaaggttaataatcgtattttgtgctacactatttgtcatttgttttgaacgggcagttttaatttctatcaattgcagagtatttcattgtaaagtaatacgataatatagatagatttgtattagacgtggaaggtttctccttacgcttccaataaattttccccacatgttttgtgccggctaagatagcttatcgcaccaaactcacgtttttaatatttttgtttattgataagaatttaaaattgtagtgaagaaggtttataaaacggtttcactgcacttctcataattcccccacctataacaacgcacttttgcataactaaccgatgcagcaggaggtttgcacactgccgagcaactttgctaactactattttcatttgtttccaggtcatgcctgccgtggttattcggcagcgcaaaccgttcaggaggagggacggggtgtttatatactttgaggacaatgccggggtaatagtaaacaacaagggcgaaatgaagggctcggccatcactggaccggtggccaaggaatgcgccgatctgtggccccgtattgcatccaatgcaagctctatagcctaaggagtttccttttcaataaacccacaacggaaaacagattgttttgaattcgaattgttggttcttttattgaattgctgcactgcttcgctaccggaggaggagaatgaggatcgtctctaggccttgggtgcctccgtacgtagagtgggcttgggtcgtgtcacttccatcgataccttgccgttggctcccttgaacaaggcgtagcacacctggaacggaagaccctccaaggcatcgccattgaatttggtgataatatcgccgcgctgcagtttgctgtctatctccgggtattgtccttgaatctgtcgagaaagtagttacttagggttgagccttcctaccactgtataccagtggtgtatgtgcactcaccaagtccgcgatggtacatccaatttcgttgggagaaagcgacaggcccagctccttgcctgcttttttcataaggtcaacgttaaacttttccagctccggaggatcagcgcggaagaccgttagggtgaccgctttctcgtatgtggtgtggaataactgatggaccttcagtgtcgtcatggatcccacgtggattggcgtaccatttatatcgcaaatgtggtcaaagatcttgaggcgcttgtcggctgccacttgtccctccggataaacgtgggtgattacacagccagtctgtcagggaaaagttgtttaaggtacttcttgcagaaacagaaagttcagatagcccaccgtgacatggttgttcttgccgccgcagacgatgacgcccattggcttcttttccaccttcaactcaatgagtatctttttgttcggcttgatctcggctgtggcgggttcctgtggcttttcctcctctttcttggcctctgtgagttatcgggatgaagatgtcagttttgaacttgcttggacgcaatacctaccctccttctttttctcttccgccgccttctcagcctttatcgcctcctcgctcttgagagtcaatagaatcatggtcactacgccctcggcacgtttaagcagtccagtagcctgaagt

SEQ ID NO: 7007 - DNA, 518 bp, DROSOPHILA
ctagcgaataatcttggaataaccagtccgcgagcaacaaaatgtcgaagagaggacgtggaggtaccgcgggaggcaagttccgcatctccctcggtttgcccgtgggcgccgtgatgaactgtgccgacaacaccggagccaagaacctgtacgtgatcgccgtccacggaatccgcggtcgccttaaccgtctgcccgccgctggtgtcggcgacatgttcgtggccaccgtgaagaagggaaagcccgagctcaggaagaaggtcatgcctgccgtggttattcggcagcgcaaaccgttcaggaggagggacggggtgtttatatactttgaggacaatgccggggtaatagtaaacaacaagggcgaaatgaagggctcggccatcactggaccggtggccaaggaatgcgccgatctgtggccccgtattgcatccaatgcaagctctatagcctaaggagtttccttttcaataaacccacaacggaaaacagattgttttgaattcgaa

SEQ ID NO: 7008 - protein, 140 aa, DROSOPHILA
MSKRGRGGTAGGKFRISLGLPVGAVMNCADNTGAKNLYVIAVHGIRGRLNRLPAAGVGDMFVATVKKGKPELRKKVMPAVVIRQRKPFRRRDGVFIYFEDNAGVIVNNKGEMKGSAITGPVAKECADLWPRIASNASSIA

SEQ ID NO: 7009 - DNA, 3936 bp, DROSOPHILA
taacaattttcctatttacagtttacaactcaaacttgatcaatttgctttgtcttttgcttagcattagtgatatatttcgcttgcgatttttaggggggcatttacttgcctatacaacaacaataatatcgattctatccaaatgtgaaaacaaaaattcgcttgaaatttcctcactttcgtttttataattcttaataaacatcatcagtcttgaacttagtttaggtttccttcacttttgcccctcatcctcgactctctttctgttgttaacttaagcaaatgttatgatgggtctcattttttgaaaagttgtgaccttgtgtcttttttttttgcgaatggaagtgtaaaattgggatatatggaagggatgataggggaggacgggacgggtcattcgggtcgggtcgggtcgggtcgggacgggactgactacaatccaagttcgaaggcacaatttcaaaagatttctctcccaactccgcgactaactaacgcctcttctatacactagccatactagtaagctctgcttctgtcttagatttcgatgcattctgacggaagatctttacaagggaccaaactcaatgggatattacaaacgttataaaagcattgttaacttacatgtattactcagttgagtaatatttaacaacgctctaaaaacaaactacaaatgccatcgaattgcaatcaaaaacagtgcctcgctacgtatggggtttggatgggaactctggacatatatagtaactaaactcagagacaagtgatcctctgcgcaacagagactcagggattagaggacgggttctgggttctccattttgggatcggagtccggttcggattcggattgtgaaacgcacggcatccgctggcctcctcacacgaaaaactcctcgttgccaatgttgctgcccgatgcttcaaccagttgccagggccaggaccatccgcctcctccgcccccgagaagtgtgaatcaccgctccgtggagtgggtggtgcccaatccgctgctgctgctcccagaaccggaagcggaattcaatccttggcggcggaagaagccgagggtgtccagcgccttaatagtgcgtcggattagctcgtccttgtatttccaaatggttttgtcctcgactgaatgctcccgatactcctcacagctcttcttcagcgtcttgacgcagtccgcccgatagtgctgcagctgggcgtccttggtgtccacaggatacgacttgcagacgccgcccaagcagctcagtggaaagtgattgtggagggtgagcacgcgctccggatcgtggaagcatttcacatactgattcggcttggtgtagttcttcgcacgatggacgtgctgcagcatgtgcatgtacttgggtatgtccttgtgccagccgtgttcgtgctgctggtcgtccaagaagtacacgttgcggaagttgtagctgtggaatccgtccggcttgatcttgcgcgactctggacgcactttgtccatcaactcggaccataaaaccgctccgcctttgggcatgatcacctcgtcaatgtccagcagtgcaatgtagtcgtacagatagagatttttatacagacagtcgttgtacggaataacctcgttctggcgcttgtggttcgtcttcttagttaggtaaaggtgctggaatcccggcacgtttggctgcccaccgggcaatgtcagcgggatcacttggaccttgccctcctgttcgtagtgattgagcactttggtgatgttgggatggacctgtcgagggataggtgaacgatgagtgtggattggctattgaatatcagtttgctgagcaattgttccaatggatattcttgagccatttggaagtagacttttgtgagtacatgtgcattacaatattacctgaagattgtagaagtagattttgtccgccccaaggatattgagcatttcgatccactcaatcagccgcacactcaggtcgtcgtagaggaagtccaatcccttgacgcagacagcaaatcccttcttctggtcgtcgggcggtcggttgtagatgacccgcagattgttcgtggccgtatcacactccttctccaccatcgacacggagctgggcaccacgccgtgaaagggcttgggaatctggcatgcgatcagatatggctggtagatgccctgcttgtagttgccccacttgttgtaccagatgtacttgtactcaaacgttttcacgatgaacggctccttttggccgtcaaaccagaactggcagtaggtcttcaccttgggctcaatcctgtcgatcattccaaggatccgcacagtgggtcccagcaacgaggtgcggcggatgtcgtaataagccccaaaaagctggaacgttccgttcgacgtgcgcagcgtctgccagtagatgttgttgaattccagctcgaaaatggaggggtacttcgcgcaggtcgacgacttctgctgcaggaagttcttattcttgctccagtaggcgatcggcagagaggggatgcgggactccacgtctcggaccaactggtcgtcgtccatggctgccagagaaaggaatgattgcggcaattagatttagtaaaattgttcttataggatcaccccattaaattatttgccgtcatttaatttgaccgcagcattcgtgctcacctgttcgattgtccaccagtatctcgctgggatcgaagtgatccgtggtcgtggaggtggtttccgcatagcgaatgtctttctgcagcaggatgcgtccgttgagtggcacctgctggtactcctggggcaccagattagtaccgtgcatcttgaacagtcctatgatgacgaaggaccagacgcacagcgaaaacaggatcttaaggatcaccttggagtgagccatgatgactggaactggttggcgccgaagtgatttactttttatggctgggatttccttttattcagcctgaggcgctgcaatgagaaatggaaaatgagaaatggtgggtcgttagaaggcgttgcttttgtcatttcatcctgtacttctctccaccccctaatcattcatttttaagctggcggccagccggtaggtctgtttccgttgcccaacctcaagcccccagacccaatcctcgttttccactttggtcaggcgcaaaatgtcaagttgaaaactgcgtgtaatattttctagcctggggcgaaaaatacccaccaggacgacgaggaacgagggagctgcagtgggtgaaggtccttagcctaatggaaaacaatctaaaagcgacacaatacagcagcagctacagtggtcttgaagtggcaaaatgcggctgcaatgtcagcccatatatgtatgttggacatgggggcattacaaaacagtattgcataaaatactggaaaactagaaggatttagtctagttttgccccactaattaacctgttttaaaatgtctatgtatctccctttctgctccaaccactgttcactttggaaaacaaccaattcacttgcattcggtggtgaagtagacacacacacacacacacatgtgtacttacgtacatgccgcccctggtacagtcgcctcccccaaaaggcgacgctgcaggcgacaatctgtttgcctatctgcgctttgtatctttgcaattgcgggctgtgcgtgcgacaaacgagaaaagacaaacgacggacatggacattggacgttggacattggacatcggacatagctcccttcgccattcaccattcaacattcgccattgaccattcagcatccagcgtccagcatttgaacactgtgtctggcggcaaggccttctaatatttatgacattgcatccagcttcttgcccactcggaatccctttgggtcaggacca

SEQ ID NO: 7010 - DNA, 1692 bp, DROSOPHILA
atggctcactccaaggtgatccttaagatcctgttttcgctgtgcgtctggtccttcgtcatcataggactgttcaagatgcacggtactaatctggtgccccaggagtaccagcaggtgccactcaacggacgcatcctgctgcagaaagacattcgctatgcggaaaccacctccacgaccacggatcacttcgatcccagcgagatactggtggacaatcgaacagccatggacgacgaccagttggtccgagacgtggagtcccgcatcccctctctgccgatcgcctactggagcaagaataagaacttcctgcagcagaagtcgtcgacctgcgcgaagtacccctccattttcgagctggaattcaacaacatctactggcagacgctgcgcacgtcgaacggaacgttccagctttttggggcttattacgacatccgccgcacctcgttgctgggacccactgtgcggatccttggaatgatcgacaggattgagcccaaggtgaagacctactgccagttctggtttgacggccaaaaggagccgttcatcgtgaaaacgtttgagtacaagtacatctggtacaacaagtggggcaactacaagcagggcatctaccagccatatctgatcgcatgccagattcccaagccctttcacggcgtggtgcccagctccgtgtcgatggtggagaaggagtgtgatacggccacgaacaatctgcgggtcatctacaaccgaccgcccgacgaccagaagaagggatttgctgtctgcgtcaagggattggacttcctctacgacgacctgagtgtgcggctgattgagtggatcgaaatgctcaatatccttggggcggacaaaatctacttctacaatcttcaggtccatcccaacatcaccaaagtgctcaatcactacgaacaggagggcaaggtccaagtgatcccgctgacattgcccggtgggcagccaaacgtgccgggattccagcacctttacctaactaagaagacgaaccacaagcgccagaacgaggttattccgtacaacgactgtctgtataaaaatctctatctgtacgactacattgcactgctggacattgacgaggtgatcatgcccaaaggcggagcggttttatggtccgagttgatggacaaagtgcgtccagagtcgcgcaagatcaagccggacggattccacagctacaacttccgcaacgtgtacttcttggacgaccagcagcacgaacacggctggcacaaggacatacccaagtacatgcacatgctgcagcacgtccatcgtgcgaagaactacaccaagccgaatcagtatgtgaaatgcttccacgatccggagcgcgtgctcaccctccacaatcactttccactgagctgcttgggcggcgtctgcaagtcgtatcctgtggacaccaaggacgcccagctgcagcactatcgggcggactgcgtcaagacgctgaagaagagctgtgaggagtatcgggagcattcagtcgaggacaaaaccatttggaaatacaaggacgagctaatccgacgcactattaaggcgctggacaccctcggcttcttccgccgccaaggattgaattccgcttccggttctgggagcagcagcagcggattgggcaccacccactccacggagcggtga

SEQ ID NO: 7011 - protein, 563 aa, DROSOPHILA
MAHSKVILKILFSLCVWSFVIIGLFKMHGTNLVPQEYQQVPLNGRILLQKDIRYAETTSTTTDHFDPSEILVDNRTAMDDDQLVRDVESRIPSLPIAYWSKNKNFLQQKSSTCAKYPSIFELEFNNIYWQTLRTSNGTFQLFGAYYDIRRTSLLGPTVRILGMIDRIEPKVKTYCQFWFDGQKEPFIVKTFEYKYIWYNKWGNYKQGIYQPYLIACQIPKPFHGVVPSSVSMVEKECDTATNNLRVIYNRPPDDQKKGFAVCVKGLDFLYDDLSVRLIEWIEMLNILGADKIYFYNLQVHPNITKVLNHYEQEGKVQVIPLTLPGGQPNVPGFQHLYLTKKTNHKRQNEVIPYNDCLYKNLYLYDYIALLDIDEVIMPKGGAVLWSELMDKVRPESRKIKPDGFHSYNFRNVYFLDDQQHEHGWHKDIPKYMHMLQHVHRAKNYTKPNQYVKCFHDPERVLTLHNHFPLSCLGGVCKSYPVDTKDAQLQHYRADCVKTLKKSCEEYREHSVEDKTIWKYKDELIRRTIKALDTLGFFRRQGLNSASGSGSSSSGLGTTHSTER

SEQ ID NO: 7012 - DNA, 10274 bp, DROSOPHILA
cgtacccacactccactcacaactctccctataaaatcacaaagcagaagaagtgaaccgtttatttagtaagcactttcattttaagtaaaatagcggaatcaaaataataattgtacaatctggacaatattgctcaacattttggggggtaaaactgtacgttatatgtgcccttctgtgatattcataagcgtatagcttttccccttaaaagttagagctattgcaacgaaaagtgtttttcattcatagagtataaatgtacccatgttgttaaaaaaaacttttacaaagcctacgaacaaatatacatcatactttttgtcttctctttccagatcaatatccttttatatgcatcttactcggacttaaattaaagctctctaaaaatacgctcaaaaccgaaatgtgcactactcctcgttgaaaaattaccgtttttcgtgaaaaacttaaaaaagttgattagtactaacaataacttattcgaaatctttctgaaatgttctttttcagctgtgagcgaatgtgtttcactgcgaatatgtcaaaggtcggccatgaagtgcgcgaaacacgaaacacaaatgacttttaccctataaaagcaacaacaagacgttaaattgcacaccagttgtaattaagcttagtagttagaaccaacaaccaactaatatataatcataatcgataaggcgaaggtggattgagacaccagagaccgacctgatccacggggtaaagtgagaagtgaggaacaaacatcttatcccctgagaagtgaaacttctccgcaattgtctggctctcaattatcgactacatttaggcttccgacattttgacaacggccacgcgcagaaagcagcatcaaaattaagccaattgacgaccaaatctgaaacgcagcggcgtcgcgtctttcgacgcgtaacggacatttctgtgtgcgctgcgtttaaaaaatctgatggatggaaatgcacaaaatatgtttcacggaaatcatcaagggtgagtgttagccctatgttttggaaaaatagactcaatttcgttggcgagtagaaaccaaattttgtatatccaactgttttctttttctgatccacagagatccctattaccgttatgatgcggcagctgccgcagcagccgcagccgcggcgaacccgcgtgcaatgggaccgcctggcggctatccgccgcgccaccgccccccacatccgctacagcaacagccccaatacccatcgtaccagccaacggcggagaatctctacgggctgggggccgccgatcaccaggcggctatgggcctcggcgttggagtaggagttggtgccggaatgggcgatctaagcggttggggagcggcgccctcggttccgggccaggcagcggcttatcccggagccggactgggggcctatgggcatccgcaagcggctccaccgtcgcagcaacagcgtcagagcaacgctagcgcatatcgtcaacacatgcccgcctatggacaacaggaccagcagaaacttgcttcatacggcgcgcagcagagcatgatggcggggtacggatcactggcgccccagcagcaacagcagcagcaaccgcccacgccccagcagcaacagcaagcacagcaagtgcaacagcaggcgcagcaacaacaacaacagcagcagcagcagagtcagcagcaggctcgactgccgcagcattatccgcaagctcctggtcagcatccgttgtatcctggagtgggagcacccaccgtccaggcgggacaacctcccacgcctcaagcttatgctcacagtccgtacggaagtcccatgcaacaccaaccaagtagaggagctccccagcatgtgggctacggtcatacaggactagatcaggcttctgcttacggacagcatgtgccgggaggagcgccaccgggtcaccacttgtcagcgcagcagcagcaggctgcgcagcaattgggtgcccaccagcagcagcagctccaatcgcagcagcaacagcaggcccagcagcagcaacctcacgtctcgctaatgcagcagcaacagttgccgggtgctggattgccgccgccgcacatgggaatgcctcctagttacggaagccaccatcaacagcaacagcagcaacaacagacccagcaacaacagcagcagtcagcgccgccttacatgtccagcagcaagcatcaacaggcggctgcccagctaaattcctcgccccagtatcgtgcacctttccctcagctttccccacaaatgtcgccacgtcctccgacaatgtcgccgcacccacaaatgtccccgcgaccagttggcgtgtcgccggcgaaaccaccgcccccccaacagcagcaacaacaaacgcaagcgcagcagccgcaacaggttgtaagcaatcagccaagccagcacagcattcaaggcatggtaggcctgccatcgccacgcccacagccgcccacaagtggagcaggcggagcgggagcgaagggtcctgcgccagttgctgctcccgttaacacattacaggccctcgaacaaatggtgatgccatctcaggctctcggactaccacccatggactacccatcggcttacagaagtgccgtgggtcctaggatgccagcttcccctcaacagcagcagcaacaacatcaacaatggggggcggctcatggagcacagcacttggcggccctgcagcagcagcaggcccaacaacaacaacagcaggtacaacagcagcaacaagcacctccgcagcagcagcaacaggcggcgatgttgcaggctcagcagcaacatcaccagcagcagttaagcatgtatggtcagccgatgggacagcaaccacaaaccgcgcagcaacaagttgtaccaccggtgacttcacaaccgccagtagtggccgcctctcagcagcagcaacaacagcaacaccagcagcagtcactcaacgatcaattgcagcactcgatcaacgatattgttgggggtggtaacagtagtggagcaacagggggtgctcagaatcagcaccagcagcaaccccaactggcggccatgtcttcgccgttgcatcagcaaaatctgcctaacatgcaccatttaattcaacctaccatggagacaacacagccgacgcagcagcaacagcaaacgtcacaacaacagcagcaaccacagcaaccgcaggcgactttaacatcgccgcaccaccagcaaatgcagcaccagtctccaatacaccagcagcaacagtcgccgcaccaccagcaacatctacccagctataatcagtcacagcagcaatttgatcccttcgctaacatactaggagacaatcaaccggctgcatcccaacagacaatgtcgcccgctcatgtaagttcgccagtacccgcgcaaatgcaacagcagcaacatcaaacccaacaacaaccatcccaacaagtaccacaaagccagcaacaacaggtgtcgcagccgcaacagcaaacgcagcagcagcaaccctcgaccccatcacatcacctgagcagcattctcaatgaaacagccaactcgaatgattcctccactctggcggtggctgctaatgacagcaacaacagcagtagcaatagtagcaccaatagcattgtcaacaaccagcccacgtcggtgcacgacagtaattcgcaaagcagcattaacagcagcagcaacaaccagcaacagttgctcatggacaacacgaattcgcacggaggaaattcggaatcggcccagaatgctggagtagatgttggtctttttgataacaactcgatgtcttcaaattcagcggcagttgctgccgtggcctccaatgcagcttctgcagcagcagcacttttagatagcaattctcagtcctcgaatgcggagtttgagaagaatcaaagcgaaggtgagggactcggtgttgtggaaggagttattgccaatgaaactgatttgccacaggatgagaacagtgtttctaaaactcaagacataactctaagcacggaattgccaacaatacaagacgatctgcaagaaaagcccaccgctgagatggaacaaactcaattgggacaatctttaggggatctatctaaatctttgttagaggaacccaaaacagtggaggaatccggagaggataaatctcaatcggcccctggagttgcaccccctgcagatcctattatccccgttacacaaccgcctcagcaacagatgcctcctatagggatgcctatgcatcctatcgcccccggatatgaggcccaggctcagggacaagggcacatgcctcccatgatgcctccgtatggaggagcgccaggaatgtatccaccttatccgatgctgcatcaacaagaaattgctgcactgcagcagcagatacaggaactgtattgcatgcctccaggacatgagcttcaacaccaagataagttaatgcgtatgcaggagcgattaaatcttctgacgcagcacgaggtaaacgatcagtgtgctggcggtccacagtgcttattgttccaaaacgttccgccaatgtatggaccaccaggaaaccccctgcttaaccagcaaatggtagagagccctcaagtatctagcaccacgggaagaggtcgaggaaagagtgccaataagccgcgtaagcctcgcgccaagaagggtgagaaagcccaggtgggtcagcagcaggatttgatggacatcagcggcaatgtggcaatgggagcagccaacgccgtttcaagtattccaacgacacaactacccgtctctgaggattgcgtgactcaaggagcgggagataccagtgtggtcggtatgctggagtatagtgaagggatgggtgatctctctcaagatgtgcactcagccaacgaactggatacctcgactgatggcagtggcaaaaagaagaagccccgcaagcctagaacacctaaggatccaaataaacccccacgagatagaacgccgaaggcgaagaagcccaaggatccaaacgatcccaactctaccgagacaccagcagcggtaaaaaagcgagctggtgctagtaaacgcaggaaacagtacggagaagatggggctgagcaaacgggagagggtagcgaagtggaagacaacaagccattggtaccaaaagcaggatctgctgatggtgaagctgaaaccacttcgggaggaactggagtggatggagaatctccagactacgatgacattcccgtttcaaaaattccgcgtggctccaatgaagatgaaaaggaagcggaggccggcgatgaaacagtagactctgttccagattcggcaggagatcctgcttctacaccaagcagaagagatcgtaaaagatccactgcaaggagtcgccgcaatgcaaattctgaggagggtggcagtgctcgcaagaaccgtggatctctttccgccaaggcactaaagaagcgaaggaataggggtcgcattgtacctgaatccgatggcgaagatgacacactggacagaactccacctccatcaccgccaccagactctgaaatggattccaacaagcgaagatcgtcaaggaatactcaaagaaagaaatacatcgatgatgttatgctaaggttctccgatgatgagaactctctcttagtggcatctcccgtaaagaaggataagaaaccatctgcgaatgcgagtaattcaaatgcaggaagtgatgtggaaaaaacggaacctcaatctggtgccgagggagacgctgcccaggaggtgggtgaagaaaagtcaaatctaccactggatgaaagcagtcaactggaagccagttcgagtacttctgcagtagcggagaaggagcgacaaatctctactgatgctgcaaatgcagccatgtcttccaaacccaattacgtgtacataaacactggcgatgaggacagcatggtggttcaattagttttagccatgcgaatgggaaagcgcgaacttattctggacaaacccaaagaaaaagcacccgaacctaaacaagatgaagagaaatctgaattagatgaagccactactgataaacctgagggagatgaaaaattcaaaactgagggtgaatccaagaaagatttaaccgattccgaggaaacgaaattagaatcctccgcaatggaagtagacagtaaggaagaatctgagcctgatgattctaagaaatcggatgaagacaataaggacaaggacaaaatggaagtagatgatgaagttggaaaatcagataaggaaagtaaaccagaagaacaatcagaaacagtgaaaactgaagaaaattctaaagccatcgaggaagacaagtcctctaccgttttaacagcagaccacgccaaggaacctgagactgtcttggagaaaatggaggttgatgaaaaggcaaatgatgaccaatcggctgtatcgaaagcagagggatctgacgaaaaatctactgatgactccaaccccgaagaggctactacagaaaagaataaggaaagtttagaaattgaaggggaaaaggagcgggtcaaggagggagaagaatccgttaagaaggagaatgacgagaaaacagaagctgatatggaaaataagccagagcccgtctttatcgatgtggaggagtactttgtgaaatatcgcaatttcagttatctacattgcgagtggcgaacagaagaggaactattaaagggtgatcgccgcgtagctgctaagattcgtcgctttcagcaaaagcagtctcagcaattgaatatatttgagaatatcgaagacgagcccttcaaccaggactttactgaagtggatagagtgttagacatgtctgtgcatacagacgaaaccagtggagagactacgaagcactacctggtcaagtggaagtcgcttccctatgaggattgcacttgggagctagaagaagatgtagataacgacaaaattgagcagtacctgcgctttaacaaaatccctcaacggagcgagtggaagtctaaaaaacgaccgcatccagaattgtggaaaaaactggaaaagacgcccgtctataagggaggaaatagccttagaccctatcaacttgagggtcttaattggttgaagttttcttggtacaacacccacaactgcatactcgctgacgaaatgggccttggaaaaactattcaaagtttgacatttgtgcactctgtatatgagtacggcattagaggacctttcttagttatagctcctctatctacaattccaaactggcagcgagagttcgagggctggacggatatgaacgtagttgtttatcacggctcggtgacaagtaaacaaatgatacaggactatgaatattactataagacagaaagtggaaaggtattgaaggagcccatcaagtttaacgttttgatcaccacttttgaaatgatcgtgacagactacatggacttaaaagcctttaactggcgcctttgtgtgattgatgaggcacatcgtcttaagaataggaattgcaaactccttgagggtctgcgacagttaaatttggagcacagagtattgctctccggaactcccctacaaaacaacatcagcgagctgttctcgctgttaaactttctggaaccctcgcagttctcctcacaggaagagttcatgtctgagtttggaagtcttcgcactgaagaagaagtaaataagctgcaagctctactgaaaccaatgatgttacgtcgtctaaaagacgacgtagagaaaagtttggcgcccaaggaagaaaccattatcgaagtggagctaactaacatacaaaagaaatattatcgaggtatactggaacagaactttagtttcctgaaaaaggggaccacatctgctaatatcccaaaccttatgaacaccatgatggagttgagaaagtgctgcatacacccttatctcttgaatggagcggaggaacaaatccaatatgatttcaagtcccagcatggcgaagatcctgagtcctattataaaaatctgattctttccgctggtaaaatggttttaattgataaattgctacctaaactaaaagcaaacggccatcgcgttctaatattcagtcagatggtgcgttgcttggatatccttgaagattatctagtgtacagaaaatacccctttgagcgaatcgatgggcgcattcgcggtaatctccgccaggaggccatcgatcgttactccaagccaggttccgatcgctttgtatttctcctttgcaccaaagctggtggattaggtattaatttaacagctgctgatactgttattatttacgattcggattggaatccacaaaacgatttacaggctcaggcccgatgccatcgtattggccagagaaagatggtaaagatttatagattgctttgcaggaatacctatgagcgtgaaatgttcgacaaagcttcaatgaaacttggattggacaaggctgtattgcagtcgatgaacacccaagggtctaaagatggcaataacaagcagctgtccaaaaaagaaattgaagatcttttaaaaaagggtgcttacggggccgtcatggatgacgacaatgctggtgacaaattttgcgaagaggacatcgattcaatccttaagcgacgcactcaagtcatcacaatggaatcggagaagggttcaaccttctcaaaggcttcatttgctgcatccggtaaccggtcggatattacgatagatgatcctgatttttggaccaagtgggccaaaaaggttgacattgatcccgatgcttgcgaaagggatgaaacggaggacttggttttgtccgaacccagaagacgcacccaaatcaaacgctacggccacgaggacgtaatggagctcaattccgaggaatcttccaatgagaatagcgacgaggagggaggaataggtaaggctgaaaaaaagggaaaattcttatgtaaagcattttaatcatttaaatccaattagggctccgttcccgtcgccgcaaggagaagcgagatcgtgctcgtgaaaagaagggcaacgatgaatacattccacgagaacgggatgcattagctgctttgggcttggaggaaattcaatatggtaactgggccaagtctgagtgctttaaagtggaaaagggactgctttcctttgggtaagtttataacgagctaaaatgccacaatttaattttcttcgagccgatttcgccgacgtatggcattgttgagcttcatattgaggatgtagatctttctctgcagcattttttcttccttttcaaggacgtgggcctcttcctttcgctcgatatactcgctgacactgggggcctcatagtcctggagctgtgctctcagctcatccagagtcacgtagtctttggtattgtgcatttgaactgcagccacctccttttccagtttctgaatggctcgcgtgacttcatccgttctattcagaacggtacgcatttctgtttccaagttcatcatggcctgtttttcctcagtcatggccaaggaagtttttcctgtgactcctttaagtcccgccatgtgtatgtttttttcttccagttgattcaccagctcggttctctttataataagtttttcaaaatctacagccgtcaggataccactcaggtctgatttggttatcaaatccgcccgatgctgctgacatgtttcttgaagcgatactatggttaacttcatagttcccagtaaagcgcgtgcatttttaaaccaatttgaagtgaacttgcgcaatttccgttcaatctgtcgctcagttgcagactccaaaaaggccacatcgttctcatcccgtaaaaagtggagcataaagttgttctccgtctcaatggtttcctcacttcgaaagcggagctcttctatcttggctcttaactgtttcacttcggtcatggctaaaaagtgcattgtgaatgaatgagttttgaaaacgagatctaaaatgcaattaacccaccatttctttcaatatccgcgacccgcttctccacctcagctgctcttttctctgccatttcggctttggccttaaaatttagtttgtagtccattccacgtcgcttttctggagcagatatgccacttatggatactagctgattcactgacatgggtatgg

SEQ ID NO: 7013 - DNA, 8112 bp, DROSOPHILA
atgtttcacggaaatcatcaaggagatccctattaccgttatgatgcggcagctgccgcagcagccgcagccgcggcgaacccgcgtgcaatgggaccgcctggcggctatccgccgcgccaccgccccccacatccgctacagcaacagccccaatacccatcgtaccagccaacggcggagaatctctacgggctgggggccgccgatcaccaggcggctatgggcctcggcgttggagtaggagttggtgccggaatgggcgatctaagcggttggggagcggcgccctcggttccgggccaggcagcggcttatcccggagccggactgggggcctatgggcatccgcaagcggctccaccgtcgcagcaacagcgtcagagcaacgctagcgcatatcgtcaacacatgcccgcctatggacaacaggaccagcagaaacttgcttcatacggcgcgcagcagagcatgatggcggggtacggatcactggcgccccagcagcaacagcagcagcaaccgcccacgccccagcagcaacagcaagcacagcaagtgcaacagcaggcgcagcaacaacaacaacagcagcagcagcagagtcagcagcaggctcgactgccgcagcattatccgcaagctcctggtcagcatccgttgtatcctggagtgggagcacccaccgtccaggcgggacaacctcccacgcctcaagcttatgctcacagtccgtacggaagtcccatgcaacaccaaccaagtagaggagctccccagcatgtgggctacggtcatacaggactagatcaggcttctgcttacggacagcatgtgccgggaggagcgccaccgggtcaccacttgtcagcgcagcagcagcaggctgcgcagcaattgggtgcccaccagcagcagcagctccaatcgcagcagcaacagcaggcccagcagcagcaacctcacgtctcgctaatgcagcagcaacagttgccgggtgctggattgccgccgccgcacatgggaatgcctcctagttacggaagccaccatcaacagcaacagcagcaacaacagacccagcaacaacagcagcagtcagcgccgccttacatgtccagcagcaagcatcaacaggcggctgcccagctaaattcctcgccccagtatcgtgcacctttccctcagctttccccacaaatgtcgccacgtcctccgacaatgtcgccgcacccacaaatgtccccgcgaccagttggcgtgtcgccggcgaaaccaccgcccccccaacagcagcaacaacaaacgcaagcgcagcagccgcaacaggttgtaagcaatcagccaagccagcacagcattcaaggcatggtaggcctgccatcgccacgcccacagccgcccacaagtggagcaggcggagcgggagcgaagggtcctgcgccagttgctgctcccgttaacacattacaggccctcgaacaaatggtgatgccatctcaggctctcggactaccacccatggactacccatcggcttacagaagtgccgtgggtcctaggatgccagcttcccctcaacagcagcagcaacaacatcaacaatggggggcggctcatggagcacagcacttggcggccctgcagcagcagcaggcccaacaacaacaacagcaggtacaacagcagcaacaagcacctccgcagcagcagcaacaggcggcgatgttgcaggctcagcagcaacatcaccagcagcagttaagcatgtatggtcagccgatgggacagcaaccacaaaccgcgcagcaacaagttgtaccaccggtgacttcacaaccgccagtagtggccgcctctcagcagcagcaacaacagcaacaccagcagcagtcactcaacgatcaattgcagcactcgatcaacgatattgttgggggtggtaacagtagtggagcaacagggggtgctcagaatcagcaccagcagcaaccccaactggcggccatgtcttcgccgttgcatcagcaaaatctgcctaacatgcaccatttaattcaacctaccatggagacaacacagccgacgcagcagcaacagcaaacgtcacaacaacagcagcaaccacagcaaccgcaggcgactttaacatcgccgcaccaccagcaaatgcagcaccagtctccaatacaccagcagcaacagtcgccgcaccaccagcaacatctacccagctataatcagtcacagcagcaatttgatcccttcgctaacatactaggagacaatcaaccggctgcatcccaacagacaatgtcgcccgctcatgtaagttcgccagtacccgcgcaaatgcaacagcagcaacatcaaacccaacaacaaccatcccaacaagtaccacaaagccagcaacaacaggtgtcgcagccgcaacagcaaacgcagcagcagcaaccctcgaccccatcacatcacctgagcagcattctcaatgaaacagccaactcgaatgattcctccactctggcggtggctgctaatgacagcaacaacagcagtagcaatagtagcaccaatagcattgtcaacaaccagcccacgtcggtgcacgacagtaattcgcaaagcagcattaacagcagcagcaacaaccagcaacagttgctcatggacaacacgaattcgcacggaggaaattcggaatcggcccagaatgctggagtagatgttggtctttttgataacaactcgatgtcttcaaattcagcggcagttgctgccgtggcctccaatgcagcttctgcagcagcagcacttttagatagcaattctcagtcctcgaatgcggagtttgagaagaatcaaagcgaaggtgagggactcggtgttgtggaaggagttattgccaatgaaactgatttgccacaggatgagaacagtgtttctaaaactcaagacataactctaagcacggaattgccaacaatacaagacgatctgcaagaaaagcccaccgctgagatggaacaaactcaattgggacaatctttaggggatctatctaaatctttgttagaggaacccaaaacagtggaggaatccggagaggataaatctcaatcggcccctggagttgcaccccctgcagatcctattatccccgttacacaaccgcctcagcaacagatgcctcctatagggatgcctatgcatcctatcgcccccggatatgaggcccaggctcagggacaagggcacatgcctcccatgatgcctccgtatggaggagcgccaggaatgtatccaccttatccgatgctgcatcaacaagaaattgctgcactgcagcagcagatacaggaactgtattgcatgcctccaggacatgagcttcaacaccaagataagttaatgcgtatgcaggagcgattaaatcttctgacgcagcacgaggtaaacgatcagtgtgctggcggtccacagtgcttattgttccaaaacgttccgccaatgtatggaccaccaggaaaccccctgcttaaccagcaaatggtagagagccctcaagtatctagcaccacgggaagaggtcgaggaaagagtgccaataagccgcgtaagcctcgcgccaagaagggtgagaaagcccaggtgggtcagcagcaggatttgatggacatcagcggcaatgtggcaatgggagcagccaacgccgtttcaagtattccaacgacacaactacccgtctctgaggattgcgtgactcaaggagcgggagataccagtgtggtcggtatgctggagtatagtgaagggatgggtgatctctctcaagatgtgcactcagccaacgaactggatacctcgactgatggcagtggcaaaaagaagaagccccgcaagcctagaacacctaaggatccaaataaacccccacgagatagaacgccgaaggcgaagaagcccaaggatccaaacgatcccaactctaccgagacaccagcagcggtaaaaaagcgagctggtgctagtaaacgcaggaaacagtacggagaagatggggctgagcaaacgggagagggtagcgaagtggaagacaacaagccattggtaccaaaagcaggatctgctgatggtgaagctgaaaccacttcgggaggaactggagtggatggagaatctccagactacgatgacattcccgtttcaaaaattccgcgtggctccaatgaagatgaaaaggaagcggaggccggcgatgaaacagtagactctgttccagattcggcaggagatcctgcttctacaccaagcagaagagatcgtaaaagatccactgcaaggagtcgccgcaatgcaaattctgaggagggtggcagtgctcgcaagaaccgtggatctctttccgccaaggcactaaagaagcgaaggaataggggtcgcattgtacctgaatccgatggcgaagatgacacactggacagaactccacctccatcaccgccaccagactctgaaatggattccaacaagcgaagatcgtcaaggaatactcaaagaaagaaatacatcgatgatgttatgctaaggttctccgatgatgagaactctctcttagtggcatctcccgtaaagaaggataagaaaccatctgcgaatgcgagtaattcaaatgcaggaagtgatgtggaaaaaacggaacctcaatctggtgccgagggagacgctgcccaggaggtgggtgaagaaaagtcaaatctaccactggatgaaagcagtcaactggaagccagttcgagtacttctgcagtagcggagaaggagcgacaaatctctactgatgctgcaaatgcagccatgtcttccaaacccaattacgtgtacataaacactggcgatgaggacagcatggtggttcaattagttttagccatgcgaatgggaaagcgcgaacttattctggacaaacccaaagaaaaagcacccgaacctaaacaagatgaagagaaatctgaattagatgaagccactactgataaacctgagggagatgaaaaattcaaaactgagggtgaatccaagaaagatttaaccgattccgaggaaacgaaattagaatcctccgcaatggaagtagacagtaaggaagaatctgagcctgatgattctaagaaatcggatgaagacaataaggacaaggacaaaatggaagtagatgatgaagttggaaaatcagataaggaaagtaaaccagaagaacaatcagaaacagtgaaaactgaagaaaattctaaagccatcgaggaagacaagtcctctaccgttttaacagcagaccacgccaaggaacctgagactgtcttggagaaaatggaggttgatgaaaaggcaaatgatgaccaatcggctgtatcgaaagcagagggatctgacgaaaaatctactgatgactccaaccccgaagaggctactacagaaaagaataaggaaagtttagaaattgaaggggaaaaggagcgggtcaaggagggagaagaatccgttaagaaggagaatgacgagaaaacagaagctgatatggaaaataagccagagcccgtctttatcgatgtggaggagtactttgtgaaatatcgcaatttcagttatctacattgcgagtggcgaacagaagaggaactattaaagggtgatcgccgcgtagctgctaagattcgtcgctttcagcaaaagcagtctcagcaattgaatatatttgagaatatcgaagacgagcccttcaaccaggactttactgaagtggatagagtgttagacatgtctgtgcatacagacgaaaccagtggagagactacgaagcactacctggtcaagtggaagtcgcttccctatgaggattgcacttgggagctagaagaagatgtagataacgacaaaattgagcagtacctgcgctttaacaaaatccctcaacggagcgagtggaagtctaaaaaacgaccgcatccagaattgtggaaaaaactggaaaagacgcccgtctataagggaggaaatagccttagaccctatcaacttgagggtcttaattggttgaagttttcttggtacaacacccacaactgcatactcgctgacgaaatgggccttggaaaaactattcaaagtttgacatttgtgcactctgtatatgagtacggcattagaggacctttcttagttatagctcctctatctacaattccaaactggcagcgagagttcgagggctggacggatatgaacgtagttgtttatcacggctcggtgacaagtaaacaaatgatacaggactatgaatattactataagacagaaagtggaaaggtattgaaggagcccatcaagtttaacgttttgatcaccacttttgaaatgatcgtgacagactacatggacttaaaagcctttaactggcgcctttgtgtgattgatgaggcacatcgtcttaagaataggaattgcaaactccttgagggtctgcgacagttaaatttggagcacagagtattgctctccggaactcccctacaaaacaacatcagcgagctgttctcgctgttaaactttctggaaccctcgcagttctcctcacaggaagagttcatgtctgagtttggaagtcttcgcactgaagaagaagtaaataagctgcaagctctactgaaaccaatgatgttacgtcgtctaaaagacgacgtagagaaaagtttggcgcccaaggaagaaaccattatcgaagtggagctaactaacatacaaaagaaatattatcgaggtatactggaacagaactttagtttcctgaaaaaggggaccacatctgctaatatcccaaaccttatgaacaccatgatggagttgagaaagtgctgcatacacccttatctcttgaatggagcggaggaacaaatccaatatgatttcaagtcccagcatggcgaagatcctgagtcctattataaaaatctgattctttccgctggtaaaatggttttaattgataaattgctacctaaactaaaagcaaacggccatcgcgttctaatattcagtcagatggtgcgttgcttggatatccttgaagattatctagtgtacagaaaatacccctttgagcgaatcgatgggcgcattcgcggtaatctccgccaggaggccatcgatcgttactccaagccaggttccgatcgctttgtatttctcctttgcaccaaagctggtggattaggtattaatttaacagctgctgatactgttattatttacgattcggattggaatccacaaaacgatttacaggctcaggcccgatgccatcgtattggccagagaaagatggtaaagatttatagattgctttgcaggaatacctatgagcgtgaaatgttcgacaaagcttcaatgaaacttggattggacaaggctgtattgcagtcgatgaacacccaagggtctaaagatggcaataacaagcagctgtccaaaaaagaaattgaagatcttttaaaaaagggtgcttacggggccgtcatggatgacgacaatgctggtgacaaattttgcgaagaggacatcgattcaatccttaagcgacgcactcaagtcatcacaatggaatcggagaagggttcaaccttctcaaaggcttcatttgctgcatccggtaaccggtcggatattacgatagatgatcctgatttttggaccaagtgggccaaaaaggttgacattgatcccgatgcttgcgaaagggatgaaacggaggacttggttttgtccgaacccagaagacgcacccaaatcaaacgctacggccacgaggacgtaatggagctcaattccgaggaatcttccaatgagaatagcgacgaggagggaggaatagggctccgttcccgtcgccgcaaggagaagcgagatcgtgctcgtgaaaagaagggcaacgatgaatacattccacgagaacgggatgcattagctgctttgggcttggaggaaattcaatatggtaactgggccaagtctgagtgctttaaagtggaaaagggactgctttcctttgggtaa

SEQ ID NO: 7014 - protein, 2703 aa, DROSOPHILA
MFHGNHQGDPYYRYDAAAAAAAAAAANPRAMGPPGGYPPRHRPPHPLQQQPQYPSYQPTAENLYGLGAADHQAAMGLGVGVGVGAGMGDLSGWGAAPSVPGQAAAYPGAGLGAYGHPQAAPPSQQQRQSNASAYRQHMPAYGQQDQQKLASYGAQQSMMAGYGSLAPQQQQQQQPPTPQQQQQAQQVQQQAQQQQQQQQQQSQQQARLPQHYPQAPGQHPLYPGVGAPTVQAGQPPTPQAYAHSPYGSPMQHQPSRGAPQHVGYGHTGLDQASAYGQHVPGGAPPGHHLSAQQQQAAQQLGAHQQQQLQSQQQQQAQQQQPHVSLMQQQQLPGAGLPPPHMGMPPSYGSHHQQQQQQQQTQQQQQQSAPPYMSSSKHQQAAAQLNSSPQYRAPFPQLSPQMSPRPPTMSPHPQMSPRPVGVSPAKPPPPQQQQQQTQAQQPQQVVSNQPSQHSIQGMVGLPSPRPQPPTSGAGGAGAKGPAPVAAPVNTLQALEQMVMPSQALGLPPMDYPSAYRSAVGPRMPASPQQQQQQHQQWGAAHGAQHLAALQQQQAQQQQQQVQQQQQAPPQQQQQAAMLQAQQQHHQQQLSMYGQPMGQQPQTAQQQVVPPVTSQPPVVAASQQQQQQQHQQQSLNDQLQHSINDIVGGGNSSGATGGAQNQHQQQPQLAAMSSPLHQQNLPNMHHLIQPTMETTQPTQQQQQTSQQQQQPQQPQATLTSPHHQQMQHQSPIHQQQQSPHHQQHLPSYNQSQQQFDPFANILGDNQPAASQQTMSPAHVSSPVPAQMQQQQHQTQQQPSQQVPQSQQQQVSQPQQQTQQQQPSTPSHHLSSILNETANSNDSSTLAVAANDSNNSSSNSSTNSIVNNQPTSVHDSNSQSSINSSSNNQQQLLMDNTNSHGGNSESAQNAGVDVGLFDNNSMSSNSAAVAAVASNAASAAAALLDSNSQSSNAEFEKNQSEGEGLGVVEGVIANETDLPQDENSVSKTQDITLSTELPTIQDDLQEKPTAEMEQTQLGQSLGDLSKSLLEEPKTVEESGEDKSQSAPGVAPPADPIIPVTQPPQQQMPPIGMPMHPIAPGYEAQAQGQGHMPPMMPPYGGAPGMYPPYPMLHQQEIAALQQQIQELYCMPPGHELQHQDKLMRMQERLNLLTQHEVNDQCAGGPQCLLFQNVPPMYGPPGNPLLNQQMVESPQVSSTTGRGRGKSANKPRKPRAKKGEKAQVGQQQDLMDISGNVAMGAANAVSSIPTTQLPVSEDCVTQGAGDTSVVGMLEYSEGMGDLSQDVHSANELDTSTDGSGKKKKPRKPRTPKDPNKPPRDRTPKAKKPKDPNDPNSTETPAAVKKRAGASKRRKQYGEDGAEQTGEGSEVEDNKPLVPKAGSADGEAETTSGGTGVDGESPDYDDIPVSKIPRGSNEDEKEAEAGDETVDSVPDSAGDPASTPSRRDRKRSTARSRRNANSEEGGSARKNRGSLSAKALKKRRNRGRIVPESDGEDDTLDRTPPPSPPPDSEMDSNKRRSSRNTQRKKYIDDVMLRFSDDENSLLVASPVKKDKKPSANASNSNAGSDVEKTEPQSGAEGDAAQEVGEEKSNLPLDESSQLEASSSTSAVAEKERQISTDAANAAMSSKPNYVYINTGDEDSMVVQLVLAMRMGKRELILDKPKEKAPEPKQDEEKSELDEATTDKPEGDEKFKTEGESKKDLTDSEETKLESSAMEVDSKEESEPDDSKKSDEDNKDKDKMEVDDEVGKSDKESKPEEQSETVKTEENSKAIEEDKSSTVLTADHAKEPETVLEKMEVDEKANDDQSAVSKAEGSDEKSTDDSNPEEATTEKNKESLEIEGEKERVKEGEESVKKENDEKTEADMENKPEPVFIDVEEYFVKYRNFSYLHCEWRTEEELLKGDRRVAAKIRRFQQKQSQQLNIFENIEDEPFNQDFTEVDRVLDMSVHTDETSGETTKHYLVKWKSLPYEDCTWELEEDVDNDKIEQYLRFNKIPQRSEWKSKKRPHPELWKKLEKTPVYKGGNSLRPYQLEGLNWLKFSWYNTHNCILADEMGLGKTIQSLTFVHSVYEYGIRGPFLVIAPLSTIPNWQREFEGWTDMNVVVYHGSVTSKQMIQDYEYYYKTESGKVLKEPIKFNVLITTFEMIVTDYMDLKAFNWRLCVIDEAHRLKNRNCKLLEGLRQLNLEHRVLLSGTPLQNNISELFSLLNFLEPSQFSSQEEFMSEFGSLRTEEEVNKLQALLKPMMLRRLKDDVEKSLAPKEETIIEVELTNIQKKYYRGILEQNFSFLKKGTTSANIPNLMNTMMELRKCCIHPYLLNGAEEQIQYDFKSQHGEDPESYYKNLILSAGKMVLIDKLLPKLKANGHRVLIFSQMVRCLDILEDYLVYRKYPFERIDGRIRGNLRQEAIDRYSKPGSDRFVFLLCTKAGGLGINLTAADTVIIYDSDWNPQNDLQAQARCHRIGQRKMVKIYRLLCRNTYEREMFDKASMKLGLDKAVLQSMNTQGSKDGNNKQLSKKEIEDLLKKGAYGAVMDDDNAGDKFCEEDIDSILKRRTQVITMESEKGSTFSKASFAASGNRSDITIDDPDFWTKWAKKVDIDPDACERDETEDLVLSEPRRRTQIKRYGHEDVMELNSEESSNENSDEEGGIGLRSRRRKEKRDRAREKKGNDEYIPRERDALAALGLEEIQYGNWAKSECFKVEKGLLSFG

SEQ ID NO: 7015 - DNA, 2307 bp, DROSOPHILA
aaaataaaagaagtttttgtttggaatcgaatctcgatgttgcgcgggcaacaagtggccgtctccgaaatatccgaaatgttgccagccggaaaattcgtcttgcatacccgcccgattttccccccagcattcgtcggttacttcgacagcaagatcgtaaaatgctgtgccgaaaaataagacgttaaactttggttttcctcatttcgaaatgttgcaagaggtttcggcaacatgctgctaacttcgaaggatgtttagatagtgttcccgaatattcttacaaaacttatcgaagtgtgagattttcatcttgcatatcaatcggaaaaaccttagctagacatcatctcctcgcgatagcacactttgcgtaatatatgtacatacgtgtagctcttttaaatgtgcccccgaataaagtagttacatttttaatgcttcgttctgaaagtttgttgacaaagctccacaaagattgggcaacaaaaacgtgtcaaaaaacctgacaccagtcgctcgtaaaagtgacgaaatggggcttaagtgccaccgcccagtttctccgcccattgtcgtttgaccttgctgacactcgagaagaaaagagctgaattcttcgccgcctaacggtagacactctccatctcttttagtctccactgaaaacatatttggccaataactgatattaatattcctgtgcacttattacgttatttatgtaaattaatttcattttaaaagagctcagattttcggttttataaattgctattatctatgcactttacttcttaaacttctaccatctcccttgcttgattactttcggttggcaacatgctgcgtcgcatcggctggcaacatttggggttgccagatcttgtggcgcggcaatagctgtggtattttgcggcggcagcgctagcggtgctttcagttacgtttcgacggccaacgcgtcgagtgctctgcttgctgagagaaagaaaaacacaaatagagacaacagaagtggttcttcttcttcatactcgcattctctcgcgctctcttcaccgtatgtgttaacggtcgtggcgcgtcgtgtgcgtgtgtgttagtgtgccagttaaacaatgagaaattgggcttgggcagaatggtgttgttccgattgtccttccattgcagatcggcgaccagggacggctcgggaactgtgggccggcaggtgaggatcaggggcttgcccactggcttgcgctggacttcttgtttgggataaatctccaggatgggggactgcgcacgggtcagttctgaaaaggataatgcgaataaagtgggtaattattagcagggttgcactcagagaaaagcatacgataatttcactgaacattttataattatgttaattctgttcaatattttttttagatatttatgatgattacaagaaaagctatgatggaaaaactatctgaatctgaattggcatttttctactgattgagtgctatggtcactcagtctttgttttcattttatctgctcgctttttccatgtgactcatttgcacaggcgagtaaattttaaattaattttaattgcctttgctggtggacgctcacaaagggcggcgcttttttggggggcgggctgtggggatggtgttgtgccagctggggacctttgcaatgtttgcccccactcattatgcacgaatatcgacgcgagtgtgtgtgtgtgtgtgggtttctcaattaaatgaaattattccagcgaaattccaagtgaaatagaatcgacattttatagaaatgtgatggaaattaggcgagcgcacttggcattggagttatttcatcaagaatttaataaaactgcatgcagcattttgcgctggaaaattgttaaatgaaagtttatgactttgagagtcgatatttcaaattaaatttgaaaaaaaaaaaaaaactaactgtgtgtcgatgtaagtgaaaataattaagtgatgtaaaacttgtcacccaaacggaagctcaattaaaaatgtgcgcaggcacttattgaaatttattgtgagtttatgcataaaactttatttaatattgccattaaagcgatttaaattatagttgttattattttccttccatgaatgcttattggttgctttcatgtgaagcctgttaacgattttaacgacaaaatgtccgttgattgcgttttatgtgaaatactgtaacaattaaaaatcatcaattttcctcttttcgaaaaggttgccaagtggatgagggagatatggatgc

SEQ ID NO: 7016 - DNA, 3414 bp, DROSOPHILA
cacaaatagagacaacagaagtggttcttcttcttcatactcgcattctctcgcgctctcttcaccgtatgtgttaacggtcgtggcgcgtcgtgtgcgtgtgtgttagtgtgccagttaaacaatgagaaattgattcacacaccgaaacagacaaaagaaaaaaaaacaaaagacaccgaacgcaaagtgttaatcagaatagaataatttgtgcaatcacgagcagcgaaaacaaactgaaattttttaaacatttttttcgtgtgcaaccgtaaacaaaccaaagaagttaaaacgagagctatttgcgagcggggaaaactagaaaactactacaactgcaaaaacagcgataaaaatgggtgaattgccgccaaattcagtcggcgtctttttggcgctgctcctctgcagctgctctttaatagaactgacccgtgcgcagtcccccatcctggagatttatcccaaacaagaagtccagcgcaagccagtgggcaagcccctgatcctcacctgccggcccacagttcccgagccgtccctggtcgccgatctgcaatggaaggacaatcggaacaacaccattctgcccaagccgaatggacgcaaccagccgccgatgtacacggaaacgctgcccggcgaaagtttggccctgatgattacctcgctgtcggtggaaatgggcggcaagtactactgcaccgcctcctatgcaaatacggagatcctcgagaagggcgtcacaattaaaacttacgtggccatcacctggacaaatgcccctgagaatcagtaccccactcttggccaagactatgtggtaatgtgcgaggtaaaggccgatcccaatccaacaatcgactggctgcgcaacggagatccgatccgcacgaccaacgacaagtatgtggtgcaaaccaatggcctgctaatccgaaatgtccaggagagcgatgaaggcatctacacttgccgtgcagccgttatcgaaactggtgagctattggaacgcaccattcgcgtggaggtcttcattcagccggagatcatatcgctacccaccaatctggaggccgtcgagggcaagccgtttgcagccaactgcacagcaagaggcaaaccagtaccggagattagttggattcgagatgccacacaactgaacgtggcgaccgccgatcgcttccaagtgaatccccaaactggcctggttaccatcagctccgttagccaggatgattatggcacatacacatgcttggccaagaatagggccggtgtagtggatcagaagaccaagctgaatgttttggtgcgtccgcagatctatgagttgtacaatgtgaccggggccaggaccaaggagattgccataacctgccgtgccaaaggacgtccggcaccagcgattaccttccgtcgttggggaacacaggaggagtacacgaacgggcagcaggatgacgatccccgcatcattttggagccgaatttcgatgaggagcgcggcgagagcaccggcacccttcgcatctccaatgccgagcgttccgacgatggactttaccagtgtattgcccggaacaagggagccgatgcctacaagactggacacattaccgttgaatttgctccggactttagccacatgaaggagctgcctccggttttctcatgggagcagcgcaaggcgaatctcagctgcctggccatgggtattccgaatgccacaatcgaatggcactggaatggtcgtaagatcaaggatctgtacgataccaatctaaagattgtcggcactggaccccgcagcgatttgattgtgcatcccgtaacgaggcagtattactctggatacaagtgcattgcgaccaacatccatggaaccgctgaacatgatatgcaactgaaggaggcacgtgtccctgattttgtgtccgaagccaaacccagtcaactgaccgccaccacgatgaccttcgacattcgcggcccatcaaccgaactaggcctgcccattctggcgtacagtgtgcagtataaggaggccctaaatccggactggtcgacggcctataaccgcagttggtcaccagattcgccgtacattgtggagggactgcgaccacagacggagtacagcttccgatttgccgcccgcaaccaggtgggattaggaaattggggcgtcaatcagcaacagtcgacaccacgacgatcggctcccgaggagcccaagccattgcataatcccgtccagcacgacaaagaggaaccggtggtcgtgtcgccctattccgatcatttcgagctgcgctggggcgtgcccgccgacaacggagagcctattgataggtaccagatcaaatactgtccgggcgttaagatcagcggcacctggacggaactggagaactcctgcaacaccgttgaggtgatggagaccacatccttcgagatgacccagctggtgggcaacacatactatcgcattgaactgaaggcgcacaacgccatcggctattcatcgcctgcttccattatcatgaagacgacacgaggatatgctacaaaaaaaattcaggaattgacgtcatccaagtggctgagcgacaggtcttctcctcggcggccatcgtgggcatcgcaatcggcggtgtcctcctgcttctgttcgtggtcgacctactctgctgcatcaccgtccacatgggcgtcatggccacgatgtgccgcaaggccaagcgatcgccttccgaaatcgacgacgaggccaagctgggcagtggccagctggtaaaggagccaccgccgtcaccgttgccactgccgccgcccgtcaaactgggcggttcgcccatgagcacgccattggacgaaaaggagccgctccgcacgccaacaggcagcatcaaacagaactcgaccatcgaattcgacgggcgattcgtgcactcgcgcagtggcgagataatcgggaagaattcggcggtgtaaggaggttatcctccgtgtcctggaactccagagtccaaccgcaatgtgcacaaaacgatgaggagggaaacatatatggaaatacacatatatgtatgatgatctagcgagaacaagccaaagccaaagctgggggaagagcacttgaatatcgatcgattggcacactaagttggttttaatttactttcgtacacagcgtaaatcttactaaatgtcttactataacgcatacgatatcttaacaacatctaacttctaaaacatagcacattaagctcgaaaaaccagcaagcaagcatacgaagaagtaagaaataataactcaatgtcgcttcattttctagtttaaacaagtattttatatcgctgcatttgctttgtttttccttagtccaaaaaaaaaaa

SEQ ID NO: 7017 - protein, 815 aa, DROSOPHILA
MGELPPNSVGVFLALLLCSCSLIELTRAQSPILEIYPKQEVQRKPVGKPLILTCRPTVPEPSLVADLQWKDNRNNTILPKPNGRNQPPMYTETLPGESLALMITSLSVEMGGKYYCTASYANTEILEKGVTIKTYVAITWTNAPENQYPTLGQDYVVMCEVKADPNPTIDWLRNGDPIRTTNDKYVVQTNGLLIRNVQESDEGIYTCRAAVIETGELLERTIRVEVFIQPEIISLPTNLEAVEGKPFAANCTARGKPVPEISWIRDATQLNVATADRFQVNPQTGLVTISSVSQDDYGTYTCLAKNRAGVVDQKTKLNVLVRPQIYELYNVTGARTKEIAITCRAKGRPAPAITFRRWGTQEEYTNGQQDDDPRIILEPNFDEERGESTGTLRISNAERSDDGLYQCIARNKGADAYKTGHITVEFAPDFSHMKELPPVFSWEQRKANLSCLAMGIPNATIEWHWNGRKIKDLYDTNLKIVGTGPRSDLIVHPVTRQYYSGYKCIATNIHGTAEHDMQLKEARVPDFVSEAKPSQLTATTMTFDIRGPSTELGLPILAYSVQYKEALNPDWSTAYNRSWSPDSPYIVEGLRPQTEYSFRFAARNQVGLGNWGVNQQQSTPRRSAPEEPKPLHNPVQHDKEEPVVVSPYSDHFELRWGVPADNGEPIDRYQIKYCPGVKISGTWTELENSCNTVEVMETTSFEMTQLVGNTYYRIELKAHNAIGYSSPASIIMKTTRGYATKKIQELTSSKWLSDRSSPRRPSWASQSAVSSCFCSWSTYSAASPSTWASWPRCAARPSDRLPKSTTRPSWAVASW

SEQ ID NO: 7018 - DNA, 4115 bp, DROSOPHILA
cgcacgatgttccctttgggagacttccagaagagccaggtcaaggacttggccaagaagattggcttccagcgactggccaaaaagaaggaaagcactggcatttgtttcgttggcaaacgcaacttcaaggacttcatacaggaggtaaagcacttgccgcgattgaaaaagcacatggctcaatttccttgatttcaccacggactcaaatctggtttccctccactttcagtacatcacttccaaacgtggtcccttcctagacatcgacagtggagccgttgtcggccaccacgagggcatccatcaatggactgtgggccagcggtgccgtctgagctcattccttcagccctattttgtggccaggaaagaggccgcaagcaataccatctatgtggcatctggccacaaccatcccgcccttctcagcacccacatagccgtcgatccgcccaactggctgtgttccaagtcccaacagattctttcggacactggcagcttgaggtgtcgctttcgattccagcacaccaaaccattggtggactgtcagctgagcatctctcccagtaacacttttcttgtcgagttggacgctcctttaagagctattacaccaggacaatatgccgtattctatgacgacacagcttgtttgggttcggcccgcatcctcagcgctaatcccctaaagaaaaaaaacgcacagacgcagcaagctcaagccgcaaatctggttagctaatgatgtttcctctgagccagaaaataaaccaaatgtaagaaggcagtccaactgccaacacggcatgtatagatagcatggtaaatacgttttcataaatttaagcgccgagtaaattttagacgtgaatcgacacttttaattccatggtaaacactttaatttaaatttattattctaggtcaaatttacaattagtttttgaaaaaggacattttgcattttgtggtcctgggagcaatgataaagttattaacacacaatcgtacataaatagggtttggtaaaatcttaaactaagtgtacacgtgaggtctcgcgatataaaactagcttagcacataatatgattgagcagggatgtgtcggtagcaggtagaatagaaagcggcgtggattaggctaacagcaccgtgagggagtccagaaagcgtgtgaggtcgctctgccgcagctgcaccaccgctggctcgaaaaagtcctgcaatagagcgactccactcttttgcgccgcctgctcgaaggccttgccaaagaagtttcgcggagagtcttcccttaccgggacaatgcctaccagcaagcacatgccctccgaagcgttcaggggacaacttgcgatcaacggcaagtccgaagcctgcctggctctactcgtggccacatgtccgcgcaaaagaaagcgagccaacagtccaagggcataggggtatgagaagaacgcgtgttcctcctgcagaacgtagtagaaaaaggagcccgctgaatgaacttggcgtgcctccaagctgctctgcacctgccgaaagacagcagcatgcaaaagcttcgcctggtcgatgcctgcagacagcagctgcttgtgctgacgactcaaagcatccgaggcctccagaaagcaatcctccggagtcttgtgcttcttcacggactccatgatggcgagcagggcataaacgtagtccgccgcagcatatctgctgcggtagccgtagctcagcgtaaaggtgccgtaaactatgtccgctatgtcgtacttctccgccaggcgctccaccatcgagaagaactccttgcgcaacaccaaatccatggctccgtacgtttggcgggcgtgcaccaagggaagtcccatctcgagcagcagctcgtgtaatctcttctctccgcgcagtgtccacagcttcagctggcatgaggagtagcgggaatacctacgattatactacatgattaaatggcatagaatacactgtcaatgctcacctcatggattccgtgacgggccagtggcggtacaagaccagatgcaaatcattctcgaaggttatcttggaggcactcatcgtgttctgatcattcgttttgttcgtcagtcgggacacatgcgactggatttgctccagctccaaagtatacgctccactctcgatcttgcccagcagcagctgctccgtgatgcccacaatggcccaccagagcaggtccatgttgtcttttgagagcttccaggccaactcaaaaaccatcaaagcggcggacctgccgtagtagctgaactgcgtgtactcgaacataatcctgtcgcgctcagactcccactgtcggcgggctcgctgcttcaggatgcgttgctcgtgccgctccaggcgactgagcttacggctccttggcgcctgatcctcctggtccgattccccggcaccactgtcgtcgtgctgctgttccgtgtcagaggactcgtcctcatcctcgtcttcaccttcagagtcatagaaaattgtctcgaacgctggaatattctcctccaaggaggcatcccccaagatgcacacctgccgatcgctgtagatgttacacacatccaacgggcgatgtgaatcgcatatgaagaaggtcacgtcgtccgacggctgcaggagctccacaatatctacacagccgccgcagttcaccaacaccacgtacttaacgtcgccctggtgctctccataggcccgcttcagacccgtaacgcccattatgggcaccacggtgtacagcatgtgatcgtacttgaacaaggcctgcaggatgcgactggcgcagatggcatcgatgtcgtagttgaccacgatcaagatgcgcttgccaaccagctggcggtaaaagtcgttgcgcagatcctggacaaacatggtgaacacttctggcgggaatcccaatcgtctgcctaatctgtctacgtctagacacaacggtctctttccaatcgcttacgatgcaaagtagaattctacatgagtgcagtgcgttgcattttgagggtttccctgcggcttgcgctattttccagcttcccactgccgctccacttttgcttttctggcaatcgcaattggcgaatcaaaaacgcgggaaacagctggcttagccagtgtgaccagtgtgaaataatggaatggcgcggaaatacaatcgttgctgggaaaagaatattctgcgaatttccagaaattttgagctgccaaaaaccgaaattataatcacataatgttgaattttgagagctctttgcagttgctgctattgcagtaggagcaatatcttggcgctccagatacggtcacaccgcgacgcccatgtgttttgaattgccacaaaaacgaaagtctaccagtcgaccagctttgtgcgacaaaagcctcagaatatgagcagggacaacaagatgaagcacctgacccagcgggccatctcctcacgcatgaactacctgttccaggcctcgaatttaatggcagtaggcaatcaaccaaaattggccgcctattatggcaaactctgccgcaatgtgggcaccaaggctatcatgcacatgtaagtggcttctccagtggagtatgggcaaataattcatggcgtcaactggtttcaagggccccggccgtgaagcgttccctgtgcaggcgctgtttccttcccctgattcccggagtgaatacggagctgcatgtggaggaaggagcacaggaggccaagactgatgcacaagctcaatcgaacggagcagtcaaaacgaagaaaaagcgccatcgcaggcagcgcaagaagcccagaagccggaaaacagggaacaccaaccaggaggaatccgaggagcaaatccaagaaagtactgaacaggtctcttttttcttagagtgctcactctgctgcggccggcgaagctttgcggcgaacagtcaaagagactgctggttggagcagccgcaatccatagtgcaagtggtctcgctccccaaagagaaagacgagcgataagctgaagctttgcttatcagccagcctgcctgttgtgccatcacctgattgctcggcagtt

SEQ ID NO: 7019 - DNA, 2063 bp, DROSOPHILA
aaaagcaaaagtggagcggcagtgggaagctggaaaatagcgcaagccgcagggaaaccctcaaaatgcaacgcactgcactcatgtagaattctactttgcatcgtaagcgattggaaagagaccgttgtgtctagacgtagacagattaggcagacgattgggattcccgccagaagtgttcaccatgtttgtccaggatctgcgcaacgacttttaccgccagctggttggcaagcgcatcttgatcgtggtcaactacgacatcgatgccatctgcgccagtcgcatcctgcaggccttgttcaagtacgatcacatgctgtacaccgtggtgcccataatgggcgttacgggtctgaagcgggcctatggagagcaccagggcgacgttaagtacgtggtgttggtgaactgcggcggctgtgtagatattgtggagctcctgcagccgtcggacgacgtgaccttcttcatatgcgattcacatcgcccgttggatgtgtgtaacatctacagcgatcggcaggtgtgcatcttgggggatgcctccttggaggagaatattccagcgttcgagacaattttctatgactctgaaggtgaagacgaggatgaggacgagtcctctgacacggaacagcagcacgacgacagtggtgccggggaatcggaccaggaggatcaggcgccaaggagccgtaagctcagtcgcctggagcggcacgagcaacgcatcctgaagcagcgagcccgccgacagtgggagtctgagcgcgacaggattatgttcgagtacacgcagttcagctactacggcaggtccgccgctttgatggtttttgagttggcctggaagctctcaaaagacaacatggacctgctctggtgggccattgtgggcatcacggagcagctgctgctgggcaagatcgagagtggagcgtatactttggagctggagcaaatccagtcgcatgtgtcccgactgacgaacaaaacgaatgatcagaacacgatgagtgcctccaagataaccttcgagaatgatttgcatctggtcttgtaccgccactggcccgtcacggaatccatgaggtattcccgctactcctcatgccagctgaagctgtggacactgcgcggagagaagagattacacgagctgctgctcgagatgggacttcccttggtgcacgcccgccaaacgtacggagccatggatttggtgttgcgcaaggagttcttctcgatggtggagcgcctggcggagaagtacgacatagcggacatagtttacggcacctttacgctgagctacggctaccgcagcagatatgctgcggcggactacgtttatgccctgctcgccatcatggagtccgtgaagaagcacaagactccggaggattgctttctggaggcctcggatgctttgagtcgtcagcacaagcagctgctgtctgcaggcatcgaccaggcgaagcttttgcatgctgctgtctttcggcaggtgcagagcagcttggaggcacgccaagttcattcagcgggctcctttttctactacgttctgcaggaggaacacgcgttcttctcatacccctatgcccttggactgttggctcgctttcttttgcgcggacatgtggccacgagtagagccaggcaggcttcggacttgccgttgatcgcaagttgtcccctgaacgcttcggagggcatgtgcttgctggtaggcattgtcccggtaagggaagactctccgcgaaacttctttggcaaggccttcgagcaggcggcgcaaaagagtggagtcgctctattgcaggactttttcgagccagcggtggtgcagctgcggcagagcgacctcacacgctttctggactccctcacggtgctgttagcctaatccacgccgctttctattctacctgctaccgacacatccctgctcaatcatattatgtgctaagctagttttatatcgcgagacctcacgtgtacacttagtttaagattttaccaaaccctatttatgtacgattgtgtgttaataa

SEQ ID NO: 7020 - protein, 575 aa, DROSOPHILA
MFVQDLRNDFYRQLVGKRILIVVNYDIDAICASRILQALFKYDHMLYTVVPIMGVTGLKRAYGEHQGDVKYVVLVNCGGCVDIVELLQPSDDVTFFICDSHRPLDVCNIYSDRQVCILGDASLEENIPAFETIFYDSEGEDEDEDESSDTEQQHDDSGAGESDQEDQAPRSRKLSRLERHEQRILKQRARRQWESERDRIMFEYTQFSYYGRSAALMVFELAWKLSKDNMDLLWWAIVGITEQLLLGKIESGAYTLELEQIQSHVSRLTNKTNDQNTMSASKITFENDLHLVLYRHWPVTESMRYSRYSSCQLKLWTLRGEKRLHELLLEMGLPLVHARQTYGAMDLVLRKEFFSMVERLAEKYDIADIVYGTFTLSYGYRSRYAAADYVYALLAIMESVKKHKTPEDCFLEASDALSRQHKQLLSAGIDQAKLLHAAVFRQVQSSLEARQVHSAGSFFYYVLQEEHAFFSYPYALGLLARFLLRGHVATSRARQASDLPLIASCPLNASEGMCLLVGIVPVREDSPRNFFGKAFEQAAQKSGVALLQDFFEPAVVQLRQSDLTRFLDSLTVLLA

SEQ ID NO: 7021 - DNA, 3691 bp, DROSOPHILA
ataacatttggggcagaggagcagagtggtggttggcagggcgagtgcgaggacgagggagggccgcaggggaaaaggacgcctgcctccatgtggctgacataatgaaacattattaagagccacgacgtcaaagcggcaaaaggtatctaaatttgcgcaaaatgtttatcccccccaccgccgcgttcgttggcttctgcagtcgctgccaatttgccgccgcttggagagaggaaaacacaaatatcgcatttacagccagggctctccaccattttgtgaggacttgcagcgagtgggagagggatggcacgagctagttcgcatagattggttcgcaggatatcaacccatcccccgctagaaagagaggcttggccgggctctcttgctctctctccctctgctgcgatgctgtcggggcgcagccaggatgctgccaggatgccgtcaggatgctctgcccgcgccaacggcgacgtcggcagtagaatcacagttattcgagatacgaaaacacagcaacggcgacacaaaagctcagggaaacgtcagcggcagcggcaatggcagcggtttttcataaataaatgtttgagttatgtagaaaaacattttgggcgagaagattttcgttttcgttgcgattcagttaacatttggccagcggattccgccttcaacggacgcgacgacggactaggcgctagccaactttccactttccacaccactgctggccatatgtacagtttatcctagcagctaaaccggaaacgacggtaacagcgaacggttaacggaagcggaaatagaaaagaaaatatcaaattccaagttgaatcgaaaagcatatgcaaatgccaagtgaagcaagtgaaacgccaaaacgaacacagttcctgagcaaaatagttaaataacagtgttgcgtcctctaaatttagtgagtccaattcgcggactcaaatagactacagtgtatacccgctaagacatgcacaccagcacggatcccatgcacacattgcacgacagcgtctccctctcgccgccgctcatcaaaagctccagaggcggctcctccatcggcaacggaatcggatgcagtgcgtcctcgcgcactgccgccgcagatgccatgtccatgggctgcgacgacagcgacatcgagccgtcgtccatgggcggaagtggtgccgccggcggcaacggagacggctcgggatcttcgggtggtcccctggtaaagccaccatactcctacatagctctaatcaccatggccattcttcagtcaccgcacaagaagctcacgctcagcgggatctgcgatttcatcatgtcgcggtgagtttgccagcaaagttaatatccttaaatgaagaagcaatagtttgattttttccaagttatcttaaaacatcagaaaaagagaataaaagtagtagtttgtaaagacgataaaaataaataaatcctataaaatttcaattgaaaacatagaaaagaagagacattcagtgctttaatcgatttcaaaaattataaattttaaaatgtgatattttatttactgattgcaatgtaagtgatctagataaacaaccaaattctttaaaaaaaattcctcgaaaaaatgttaaataacttgtgcattttacttgtagctttccatactacaaggacaaattccccgcctggcagaactccatccggcacaatctcagcctgaacgactgcttcataaaggtgccccgcgagccgggaaatcccggaaagggcaacttctggacgctggacccgctggcggaggacatgttcgacaacggcagtttcctgcgccggcggaagcgctacaaacgggcgcccaccatgcaacgcttctcgtttccggcggtctttggcacgctgtctccattttggatacgcaagcccgtgcccctcgtgccagtgcatttcaacgtgcccaacttcaatgggagcagggagttcgacgtggtccacaatccggcggatgtctttgactcagcgctgcgagcggacaagaagtttaacttctttgcgaatgccgaagcatccttctaccagggaagtcagtcgggggacaagttcgaccggctgcccttcatgaatcgcggtcgaggagcggatgtcctggatgcactaccgcacagcagtggctccggcggaggagtgggcgggggatccgagagcagccgtggctccaagtacaaaagcccatacgccttcgatgtggcgactgtggccagtgctgcgggcattcccggccacagggattacgcagaacgactgtccgccggcggtggttacatggatctcaatgtgtacaatgacgatgcggacacagaggccgatgcggaagccgagggagatgacgactcatgcgaggacaagatcgacgtggagagcggcaatgagcaggaggactcacatatctcggactcggtggacagcgcctgtacaaatcgcctggatgcgccgccggaagcgttgatctttgaggcttctgccgaggcgtccgattcaagtccaaggagacgcttcgatagcgagcccctggttctgcggaccagcaaacagagcagcgccaaggactttcgcatcgagacgctgattggccaccacctgcatcgcggtggcagccaggaggagaccagcgactaggcgggattcccactcgcttgaaccaattggcttgtgtacagtccattgaacggtgatttcagtttcgatctaagcacgttttaacagcccactaacaccaccaccagcaatccccaggaatccaatccgagcagcaagtagtgatcagtaggtgtatccgtaggatgtaggagccagcacacgagtttttaaatgcgaccaaatcgaagtcaacgctatagttgccagtccacttacgtactaaacatatatctgcgcgtaatatctatgtaaatctgaagcatcgcacgtctatagtatacttttaacacgaattcttggggtctggagtcgggatttcaggttctagacctatatctaccatgcaagtactaatcatgtgtatgtgtgtgcgtgtgcgtctgcgtgtaactgtaacacatccaagcaagaggaacactattaactataaattagactaagatttttgctgatgttattgaaaattgaataaacaacaacataataatagtttacacggatacatgtttgactggtaggtaccgatatacgtgttgttactacagctactacagcatgttactaatatgtttgtagtatactaaatattaatttttaatcctattgatacctgtaatattgtattatttttataattatattattatatgtggccactctcttccttgtaataatatccttaaagggatccctcttttcgacgttttgttaccttttgtttgcaataaaacaccccgagttatttgaatttaccgcccagcaaacctgtccaggtgtggcacccctgcctggaaatcagttcagctttagcgcctgcgcagtgaccatcgctcagctgatttggcgcaggacgtagttgtgccgccatagaacgccgtggagttcggcgctaccaaacgaaagctccgctctcccacgagcgtcccgttggcttccagtgttaaaacatgaaaagctgcgcctggcagcgggacaacag

SEQ ID NO: 7022 - DNA, 1371 bp, DROSOPHILA
atgcacaccagcacggatcccatgcacacattgcacgacagcgtctccctctcgccgccgctcatcaaaagctccagaggcggctcctccatcggcaacggaatcggatgcagtgcgtcctcgcgcactgccgccgcagatgccatgtccatgggctgcgacgacagcgacatcgagccgtcgtccatgggcggaagtggtgccgccggcggcaacggagacggctcgggatcttcgggtggtcccctggtaaagccaccatactcctacatagctctaatcaccatggccattcttcagtcaccgcacaagaagctcacgctcagcgggatctgcgatttcatcatgtcgcgctttccatactacaaggacaaattccccgcctggcagaactccatccggcacaatctcagcctgaacgactgcttcataaaggtgccccgcgagccgggaaatcccggaaagggcaacttctggacgctggacccgctggcggaggacatgttcgacaacggcagtttcctgcgccggcggaagcgctacaaacgggcgcccaccatgcaacgcttctcgtttccggcggtctttggcacgctgtctccattttggatacgcaagcccgtgcccctcgtgccagtgcatttcaacgtgcccaacttcaatgggagcagggagttcgacgtggtccacaatccggcggatgtctttgactcagcgctgcgagcggacaagaagtttaacttctttgcgaatgccgaagcatccttctaccagggaagtcagtcgggggacaagttcgaccggctgcccttcatgaatcgcggtcgaggagcggatgtcctggatgcactaccgcacagcagtggctccggcggaggagtgggcgggggatccgagagcagccgtggctccaagtacaaaagcccatacgccttcgatgtggcgactgtggccagtgctgcgggcattcccggccacagggattacgcagaacgactgtccgccggcggtggttacatggatctcaatgtgtacaatgacgatgcggacacagaggccgatgcggaagccgagggagatgacgactcatgcgaggacaagatcgacgtggagagcggcaatgagcaggaggactcacatatctcggactcggtggacagcgcctgtacaaatcgcctggatgcgccgccggaagcgttgatctttgaggcttctgccgaggcgtccgattcaagtccaaggagacgcttcgatagcgagcccctggttctgcggaccagcaaacagagcagcgccaaggactttcgcatcgagacgctgattggccaccacctgcatcgcggtggcagccaggaggagaccagcgactag

SEQ ID NO: 7023 - protein, 456 aa, DROSOPHILA
MHTSTDPMHTLHDSVSLSPPLIKSSRGGSSIGNGIGCSASSRTAAADAMSMGCDDSDIEPSSMGGSGAAGGNGDGSGSSGGPLVKPPYSYIALITMAILQSPHKKLTLSGICDFIMSRFPYYKDKFPAWQNSIRHNLSLNDCFIKVPREPGNPGKGNFWTLDPLAEDMFDNGSFLRRRKRYKRAPTMQRFSFPAVFGTLSPFWIRKPVPLVPVHFNVPNFNGSREFDVVHNPADVFDSALRADKKFNFFANAEASFYQGSQSGDKFDRLPFMNRGRGADVLDALPHSSGSGGGVGGGSESSRGSKYKSPYAFDVATVASAAGIPGHRDYAERLSAGGGYMDLNVYNDDADTEADAEAEGDDDSCEDKIDVESGNEQEDSHISDSVDSACTNRLDAPPEALIFEASAEASDSSPRRRFDSEPLVLRTSKQSSAKDFRIETLIGHHLHRGGSQEETSD

SEQ ID NO: 7024 - DNA, 9261 bp, DROSOPHILA
aactctatacttgtactaagcgcccatgaacacttcatccactaacatagctactaatcctcatcctagtggaggatgcagttggtccagacactctgttatttgttttatccatcctcgtacttgtctttgtcccatttagcactttcgttgcggataagaactttgtcagttattgattgtgtggccttaataagattataaaactaaatattataacgtacgactatacatatacggatacagatacagattcagacacagttagtacagatacagatatacatatacgcttttgtacctaatgaattgcttcttgtttccattgctaatcatctgcttttcgtgtgctaattttatacactagtacgtgcgatatcggccgtgcagatagattgctcagctcgcgagtcaagcctcttttggttgcacccacggcagacatttgtacatatactgtctgattgtaagcctcgtgtaatacctccattaacaccactcccccaccacccatccatcgaaccccgaatccatgactcaattcactgctcacatgtccatgcccatgccttaacgtgtcaaacattatcgaagccttaaagttatttaaaactacgaaatttcaataaaaacaaataagaacgctatcatttaatattgttttcttttgattcctgatgtagtccaaccatgagatcgttgtagaattccttggtttttgtctgcaactatgcccaattaaaaacaaatagttttaatgaattggcatacttttaggaagtctcttgacaaaaaaaaaaatactgagtaaaagtactgcgcttcatttcttcaatggcaatgtagcaatctaacatgttaggagattggggtgcaggactgccgtgtttctaaccagaagcatctccaaactccagaatggaatcacagactccgaaaagtatgctactgatggtaatttcaatgggtaagtaacaaaagcaggccgtttggtttatttgaatgtatttttattcatttccgtttcggtataatttctagtttgttctcttcgtctttagtactagttggtttagcaattgtttaaattaccataaattatttaagttttatgttacgtagtcgtataatgtagatttataatttaaaaattcgcatgggaaagaaagtcgaaagtcatttaactggcagccactcctttctatcgttccgttccttcgctaattactttcctagagctaaataaaaacaaaataataatcgcaattgtaataatgaaccgtaaacttagaaaaacaaataatagcaataattcaaaacaaaagttaaagctggaatcgctgcgttctactcgtaatcgtaatcgtatcgtaaataagagtacacgtatatctagagatgaaagagtgcctaggttagcattgcatcaactgtacagtatggcttatacgcgtataagtcgccgccctcctccacgccagcaaacgattagattatgtttataataatgcggggagcagactccgcgcggagatatcaagtgtatttgttttgttttgcgtggttatgtcgtagtcgataattaaatggataaataacaaaaatgactgtaggagcgttttcctcactctggctttgtgggttgagtggcctggatccaggatcaggatgtctcacctatgtatgtacatacacgaaatcgatatctatgcgaattggttacgatcgtacacattttgcttatggttaacgcgtggataatagacatcatatcatatcatatcatatcatatatctcatattacatgttcgagtgttctgattaaaagcggcctcttttctctgtgtacatagggaagctacaactttgctttagaatatagtataatatgtgcacatgtacggtatgtaaatatgtaatgtattgcatgttgacatctagatttgctcaaattgaatcgaatgcaatgatgagttcttgagtttctcgttcctcgttaacatagccaatgcggtaattaagcgttaatttagttaattcaattatataaaagtacaaaaaggtcctttggccgtggctatacgtacgggtcgcgttgaaccaaccgatctatatacacacgctggtctgatctaatccaaaactgagtccataattaaatatccaaaccgaactatattgaactacacgtcgcgctgagctgagctgcctacaagttagccttggtatatctttgtgttgcatatgtgtgttgttgaatacgggtaatatgaatgctgagatttctctgctccagtcctggacctgcttacgtgccattggccttcggcagcgatcgcaccagatacagcttttcgccctgcttattcgtgtagatgggcgctctttggtagtgatcgaccagttggtccagcgagtggaacttcctctgcccaatgcagtacatgttctgctccacgtgcacgcggaagtgcttgttgcgccctggggcctttaacgaaaccgaatagtctcccatctgcaagaaaggatgaattcgtttatacactctcaaagaattcgggcggaactatgttatggcacttcaattgcgaattccacttacgttagtctcactgtctctgatgaggaagtcgccatcgtgcccgtggccgttgagcaccgtgtcgcactggctgcgggtgatggctccataataccacgacttgcccgccagatttggccgctcgattggctggccggaagattgcgccgccggcttattaccctcattgcgccgctccatggagtcgtttcctccgccaccacctgcgccgccattacttcctcctccatttccgtttcctgcactggcactcgcattacgatagggcgtggccaggtagtcgttcaactcttggagataattgcgtggaactaaaccgacttggccctgattgttgcgagctttgtaccagtccggatcggaggcgggccgatccacgatctccaagcgatcgcccttctcgaacgagagctcctggtcgttgtttgacgtgaagctgtacagcgcgacctatatatttgaaaatagttgttattagccaataatgacaacctctcatagatgatgtgaatgtttattttgagaacacgtccagttactcaccacaatatcaagcacgttctcggccattgcgtaggtgtggatctcgccgtcgttatcacaatcctccgttgtgtagttgctggggaaccagccgacggaattgccgctctgtccacgccaccatccatcgttggacttctccaggatgaggattcgtgtgcccttggtcagcgaaagttcatcgggctgctgggcctgatagttatacttgaccacagccgttccgatggcctctgcgggatctgggggaagtcggcgcgacatggttggactctcgacctgtcgcgaaggcgaacaattaggcagtgtcttcgatccggagccctttttcaccttcttcttaatgctgcacagaaatcgtaaatcaaaatattcacgatcagtattgggatgaagttttatggttagatttcattggcggtttaaagtgggttagactagccctagttggtttgggtgttagtggatctttagtttttaggggcaagtggggctcgacagacaacgaaatcaaaacgaatttgttgttttgaaatacaaaatacaaaagccgaaagcagttataagttaaattacgatagccaaagcaaaaggtggaggcgggtatttgaacgcgatagagatacagatacatctacggatacggatacagatacaggtatagagggcttaattctgctgaaatcagagcaagaagaacgcttaggtttagtcgggccaggaatctgacgcacctgtcgaagagcgagggcttctccttcttcacatagttgcttggcacgtagccggactggttgcgactgttctggacgcgccaccagtgcttggagtcgtccagcagcaggtagcgctcgttcttgcgcagatccagctcctgggcaccctgcgccgcatagtcgtacttggctaccacgtagcagacgtcgtcctgagatttgcctgcggagtgattaacaggaacaggttagaagagtaccaagtgcacacacagttagaaaagcaaaatgggccagtatgatagaaccacaaattcattagcatacaaatcctagatccttttactacacccaatgctcttctcgctgtgaggttattgtgttgcagttgctcaccgtgcttcatgttgcccgccattgattgggttccagcgttgccggcggcactgccactggaggagttgccgctaccgcttccgttggcgcttccgctgccgttgccgccgcagtcgagcgctggctggccgaaggtcacacttttgtgctgggcgctgcaggaggaggcggtggacagggtgcggtggtggtgcaactgctgttgctgggagagcgaagagtgccgctggtgatgggcaggtgagccgggaacgggcacgggcacctggggacggtactggtagatctgattctggttcaggttctgattctggttgagattcagattctggtgctgcggcagctgtggcggatgctgctgctgctgcggatactgctgcgaactggctgaggagtcggggatgttgcgcacaaaccgctgggggtgttccaacattccagactggctgctcctccgccgcggggggattcctgctcctccagctgggactgccctgatgctcctggtgatgctcctggaggcaagaggcggtggctcagtgttggtggacttggagttggggttggagttgatgaacaacaagtctttgatggtttggttatgtgttgcagttgctcgctggcactctaagcttgctgcaaatcgcctctagccaatgcataattgctgtgggcgtggtttcagggggcgaatgggcgtgagcgtgggcggaagcgtaggcgtggcaaagtaaacataagcaacgcaataacataagcaacgaacgaagaaagaaagaaaaagagagcaaatgatatatgcaaattaggcttaattgtttcgcactgaagaagctaaagagcgtaaaaatgattagcttaaaaaatacaatgcaagtactcaaactcgaaataccaaataggaaatcaactcaaaattagccgagagatgaatgtttgtttttggggtcagcgagccggcgatgaagatgaatgagtgaagtgtttgtgttgtgatgatcatgatgatgataatatgagcgggagatggatatgggggctgagggatctggccattccagttgtggggcaattaaaatctgtgcaagtgaaagttgcctccgactgactccactcaattgaatccaattgccaggcgagcgaataagtggccatcgggtattgatttgttcaacggggcagcctcaccgaggctggagaaccagagactcaaaatccgggccatttcaggccaagaaagacacagaaatcaactgagacattcgaccgcaatgagtcacgaacgtgaatggtcgggggtattgggaaattggtttcttaaccgagatttaccgagtgacataaggcagttagcgggcggcacagaaggttatttcggccagagatctctagagaggcttcccgagttcgttggccaggttggcgagccaacaaaatcaaagtcaatgtcatagccgagggccatctttggataattaaaaatcaataagtgtgggccacgttgagaaaacgctctactcggtctttgactctaggccaatcttggtttcgcttttcaatgactgttaggtcatacacgagaggctgagtcagctgaaagtgttttcgagagctctaatgccattcaattctggcatttcggtgcaatatctattagcaactgacccatacgtatataataagaaatgcaggcaatgcataaatttgttttgccggtaaacttctaatcgtgcttcctgttcgaattttggccataataatctccatgtgataacgagtgtttttgtttactttaccatcgattagtcaaaggtttttgcgttagctagagatacggagaagtacctgtttaaccgaagcattggtcgcaaagtgattcactgttgtgcgaattgtctgtgtgttttccctattttttgagaggagaaagcgggagtgaaaccgtaaccgaacccagatagaaacggagaaagaacccgaaaaagattatatttatgcaaatgctggagtgataagggggcggttcagttcggttcgcttggggacttggtaaacatgaaacgcctggctggctggctggctgccaatgaactgaaatgcaccaccgttggattcggatcggtgtttggatttctttggcttggtgattgttttgttattgtttgcgcttgcataagcccaacagccgagacattgacattacactgctgataaaatccgaagaaatcggaaggaacttgctgataagttcgttagcgcggagaaattgtcaaaaaatatattatgaactatgatttgataagattccctactgctactgcaataaatgaatatatatttttaaagaattctttgtggtatgatttcttagcttcccgtatgacaaacatttatgtttttttccggtgcactcgttcattgttttcctgacagcagttcgtcttttcgctgagagaaagaaagagttgcacgtgcttgggggacaagcccacaagtttatgaggcggaaagtttgtttccccgtgctgtgtctgtgtattggttgaagatcggttccagacgagggagtatagtcattggtccccaagaaaagccatcacgaacgaattggtggccccgaaacgggagcatttgggtctataacattgagttacgacttcggtggatggatggggcagccatggaggaactgaaagtggggcactcttatctggatctcggggcgtgggaggcaaagggcagcctgtttacataagatcactcattcagggagctgggagtccactcccgcccgggttgattaagtagatgcttttgctggggaatgggattcgaatggggtttcggtttcggttttgttttttgtattttgtattttttttttggcttttgttgccgagggagtttgcgacatttgccggccgtttcgtttagagatgctgcgcaaaatctctgcgaggtggtggctttttggcagcgagagggtggacttctcgtcctgcaaaggatggcaggactcgttcccagtgttgttaagagtacaagcttttgtacctggcacaggcttttgaaaaacacaagtacctactatagtagtatttgagcaatgaacatattatagatttatggtaagtgaagcatcttcacgatttatctgtttcatctatctagacaagggaaagggtacatatgtacacacatatatatcggtggcacagtttgccgtaaacacgaccatggttacccaaaaaaaggtgatggaaagcggagggctaagggttgcagcaccgcccactgggcgggtggtggaccgagccaaaggactacgcaccaccaggtgacgagggcgagataaagagagagagcgcaggtcaagagagagagagagagagccgagagagagagccgtgagagattcgaacaggagctaaaaaggagcagccgaatattttgtgtgtacctaccggagacgaagcggttggactggcaactcctatattcctcctggatctccttatcctggcactccttatccgtatccgtatccttatccggaaagtcggagtccgtatttctcggtcttaacccttggcaatcctcaggatttgggagtggaagacatgggataagacactgctcctggaactcctggaacgcactctatatcacttccactttccactgggctattgcactttacacacacttaaaacacaactttaattataatacacctaggcgtgagtgtgtgtgtgtgagtggggcgggggtgagcctgtgtgtgtgtacatatgctgctgccgcgattgaaaaacacacaaatcctgacaaataaacgcttttccacgcttctgattaccgcacacgttaactgcgttaagtggcaaattgtttgcacaattttgcagcgctctcttgcggttaactaattaaattttaatgattttgccggagccgtttctttcacgtcgcccatccgatttcgatgtgcggaaggcgatagcgattgaccacgaccagggctgtcaggtggcgtatcagcggtttttcttagcgaactatcgataagcacgttgcgcgctgtgcagcacttgtccggtcatcgggtctatcgatatcgggtggcgtttttgttatgattttggattacatggttggtttaacccgaaataccatgctgaaaactcggggtattgtgcttggcatcagcaggtcgtacaccgccaaggcgaagaggggtgtgctggcgcaggacaagtcgaagatcaaggagtactcaccgaagacgacggacagccatgagcaccgagtttacgtgtggggctttcaggaaaccggcgctctcggtctccagaccaacgtgaagaaggccaaggaacgctacacggagatggtgcaccatcccacccgcttgcagttctccaacaacaacgaaatcacggatgtggccgccggctacgggttcacggtctacgccgtgaatagagatgacggagagacgctctttggcagcggtttgaacaccgactcccaactgggtttccaggtgaagggaaatcccaatgatccggccaaccttgacgtgatcatttatcctacagccattaaactgccgagagttcagggagaaacagacgaggacatgcgtgtgaagagcatgtcggcgggtagagctcacctggtggttctgacccaaaacggaaccattttcaccctgggaaacaattcgtacggccaatgtggccgctccatcatagaggaggagcggtacagcaagagtgccctgatccacaggatatcgcaggaagatatatgcggcaaggaggatgaggtggtccaggtggagtgcggccaggaccacagcatgtttcttaccaaaaagggacgcatttacacatgtggctggggtgcggatggtcaaacaggtcagggaaactaccacaccgccgggcagataaccctgattggaggagatgtggaaaaggagaagattgtgcggc

SEQ ID NO: 7025 - DNA, 3723 bp, DROSOPHILA
tcgccttccgcacatcgaaatcggatgggcgacgtgaaagaaacggctccggcaaaatcattaaaatttaattagttaaccgcaagagagcgctgcaaaattgtgcaaacaatttgccacttaacgcagttaacgtgtgcggtaatcagaagcgtggaaaagcgtttatttgtcaggatttgtgtgtttttcaatcgcggcagcagcatatgtacacacacacaggctcacccccgccccactcacacacacacactcacgcctaggtgtattataattaaagttgtgttttaagtgtgtgtaaagtgcaatagcccagtggaaagtggaagtgatatagagtgcgttccaggagttccaggagcagtgtcttatcccatgtcttccactcccaaatcctgaggattgccaagggttaagaccgagaaatacggactccgactttccggataaggatacggatacggataaggagtgccaggataaggagatccaggaggaatataggagttgccagtccaaccgcttcgtctccgcaattatgcattggctagaggcgatttgcagcaagcttagagtgccagcgagcaactgcaacacataaccaaaccatcaaagacttgttgttcatcaactccaaccccaactccaagtccaccaacactgagccaccgcctcttgcctccaggagcatcaccaggagcatcagggcagtcccagctggaggagcaggaatccccccgcggcggaggagcagccagtctggaatgttggaacacccccagcggtttgtgcgcaacatccccgactcctcagccagttcgcagcagtatccgcagcagcagcagcatccgccacagctgccgcagcaccagaatctgaatctcaaccagaatcagaacctgaaccagaatcagatctaccagtaccgtccccaggtgcccgtgcccgttcccggctcacctgcccatcaccagcggcactcttcgctctcccagcaacagcagttgcaccaccaccgcaccctgtccaccgcctcctcctgcagcgcccagcacaaaagtgtgaccttcggccagccagcgctcgactgcggcggcaacggcagcggaagcgccaacggaagcggtagcggcaactcctccagtggcagtgccgccggcaacgctggaacccaatcaatggcgggcaacatgaagcacggcaaatctcaggacgacgtctgctacgtggtagccaagtacgactatgcggcgcagggtgcccaggagctggatctgcgcaagaacgagcgctacctgctgctggacgactccaagcactggtggcgcgtccagaacagtcgcaaccagtccggctacgtgccaagcaactatgtgaagaaggagaagccctcgctcttcgacagcattaagaagaaggtgaaaaagggctccggatcgaagacactgcctaattgttcgccttcgcgacaggtcgagagtccaaccatgtcgcgccgacttcccccagatcccgcagaggccatcggaacggctgtggtcaagtataactatcaggcccagcagcccgatgaactttcgctgaccaagggcacacgaatcctcatcctggagaagtccaacgatggatggtggcgtggacagagcggcaattccgtcggctggttccccagcaactacacaacggaggattgtgataacgacggcgagatccacacctacgcaatggccgagaacgtgcttgatattgtggtcgcgctgtacagcttcacgtcaaacaacgaccaggagctctcgttcgagaagggcgatcgcttggagatcgtggatcggcccgcctccgatccggactggtacaaagctcgcaacaatcagggccaagtcggtttagttccacgcaattatctccaagagttgaacgactacctggccacgccctatcgtaatgcgagtgccagtgcaggaaacggaaatggaggaggaagtaatggcggcgcaggtggtggcggaggaaacgactccatggagcggcgcaatgagggtaataagccggcggcgcaatcttccggccagccaatcgagcggccaaatctggcgggcaagtcgtggtattatggagccatcacccgcagccagtgcgacacggtgctcaacggccacgggcacgatggcgacttcctcatcagagacagtgagactaacatgggagactattcggtttcgttaaaggccccagggcgcaacaagcacttccgcgtgcacgtggagcagaacatgtactgcattgggcagaggaagttccactcgctggaccaactggtcgatcactaccaaagagcgcccatctacacgaataagcagggcgaaaagctgtatctggtgcgatcgctgccgaaggccaatggcacgtaagcaggtccaggactggagcagagaaatctcagcattcatattacccgtattcaacaacacacatatgcaacacaaagatataccaaggctaacttgtaggcagctcagctcagcgcgacgtgtagttcaatatagttcggtttggatatttaattatggactcagttttggattagatcagaccagcgtgtgtatatagatcggttggttcaacgcgacccgtacgtatagccacggccaaaggacctttttgtacttttatataattgaattaactaaattaacgcttaattaccgcattggctatgttaacgaggaacgagaaactcaagaactcatcattgcattcgattcaatttgagcaaatctagatgtcaacatgcaatacattacatatttacataccgtacatgtgcacatattatactatattctaaagcaaagttgtagcttccctatgtacacagagaaaagaggccgcttttaatcagaacactcgaacatgtaatatgagatatatgatatgatatgatatgatatgatgtctattatccacgcgttaaccataagcaaaatgtgtacgatcgtaaccaattcgcatagatatcgatttcgtgtatgtacatacataggtgagacatcctgatcctggatccaggccactcaacccacaaagccagagtgaggaaaacgctcctacagtcatttttgttatttatccatttaattatcgactacgacataaccacgcaaaacaaaacaaatacacttgatatctccgcgcggagtctgctccccgcattattataaacataatctaatcgtttgctggcgtggaggagggcggcgacttatacgcgtataagccatactgtacagttgatgcaatgctaacctaggcactctttcatctctagatatacgtgtactcttatttacgatacgattacgattacgagtagaacgcagcgattccagctttaacttttgttttgaattattgctattatttgtttttctaagtttacggttcattattacaattgcgattattattttgtttttatttagctctaggaaagtaattagcgaaggaacggaacgatagaaaggagtggctgccagttaaatgactttcgactttctttcccatgcgaatttttaaattataaatctacattatacgactacgtaacataaaacttaaataatttatggtaatttaaacaattgctaaaccaactagtactaaagacgaagagaacaaactagaaattataccgaaacggaaatgaataaaaatacattc

SEQ ID NO: 7026 - protein, 548 aa, DROSOPHILA
MLEHPQRFVRNIPDSSASSQQYPQQQQHPPQLPQHQNLNLNQNQNLNQNQIYQYRPQVPVPVPGSPAHHQRHSSLSQQQQLHHHRTLSTASSCSAQHKSVTFGQPALDCGGNGSGSANGSGSGNSSSGSAAGNAGTQSMAGNMKHGKSQDDVCYVVAKYDYAAQGAQELDLRKNERYLLLDDSKHWWRVQNSRNQSGYVPSNYVKKEKPSLFDSIKKKVKKGSGSKTLPNCSPSRQVESPTMSRRLPPDPAEAIGTAVVKYNYQAQQPDELSLTKGTRILILEKSNDGWWRGQSGNSVGWFPSNYTTEDCDNDGEIHTYAMAENVLDIVVALYSFTSNNDQELSFEKGDRLEIVDRPASDPDWYKARNNQGQVGLVPRNYLQELNDYLATPYRNASASAGNGNGGGSNGGAGGGGGNDSMERRNEGNKPAAQSSGQPIERPNLAGKSWYYGAITRSQCDTVLNGHGHDGDFLIRDSETNMGDYSVSLKAPGRNKHFRVHVEQNMYCIGQRKFHSLDQLVDHYQRAPIYTNKQGEKLYLVRSLPKANGT

SEQ ID NO: 7027 - DNA, 3372 bp, DROSOPHILA
atcccaatccctcaacttcaaacgaaaccattcacgaatcatatattatagagagtaaaaaaccactagaaatcgaataaatattcgggaaacaccagtgaaaaatggtaaaacaaatagtttcaactgcaatatcggactgaacaaagctgccatatgaaaagtatatacatgtaatgactttgtatataaagttagctacagatttccataaaagaaaaaaacgaaatttcaattgtgattccatcgaaaatctaattttgtttccacatcgaagaatttaattgaagaactcgaaaacacacacacaacgtataccgaataaaatataattttgtttgctggaaaaaaccgcatgtaagcggagaatcctaacaaaaagaacttttctttttgtttttagttcattatatttttttatataggtgccatacaggaagcgtgtatgtgaattaatcaaaattgatttcatccaattggtattaagattaagcccagagtttccttaattgtgagttgaaacgagtaccgaaaaccctaaagtatatatactagtttttaactggttgtaaatgagaaatgctcgtgtaaaattagtattaaattatagcacgaacccaacaacaacaacaacaacaaaaaagcaacaaacataacactacaattacaaattaaattagtttaagacccaagtcttctaagcgaagagcaaaaagcaataattttacttgaaaagagagtgacacgacaagaaaattataatgataaaaatgcgtgtgtggctagtaacagcaaaagggtggaaatctggaaaactcacgaactcagagagatgcaataatgtttccttggaaatatctagagttttccggagcagcccggaaaaatgtctacaacaaacaaaaagcacacactagcggatgaaaagccaacaaaacagaaaaacacacatttttatatgtatatgtatgtaataataaaagatcgtatttgacaaaagtgtatttaaagtttgctatttattttgcgaaggatttcaataaatatgtgaaaatgtcttagctactttctacagaacgacctatacaaggcgatgcgatggatccaccaaatccataaggatctagatcaatatctgaatcttactcatccttgttgttgatggcacgcaggcgttcgagctcggcacgctcctccttgttgcgcaacagggggacattgtagtcgaaggcgtagaagaagcccttgggctcgccggtctcctcgggtccgggcacatatggcggctcctcgtgcacgtagggctggtactcgggctcagtgggctggtagcgaccctcctgctggtactcggcggcataaggatcgggattgtggccagcggcggcggccagctcaccccacagcttgaagtgctcctcctcggccttgaggacagccggagtcttagtggccggcagtttaaggtgtgccggacgattgtcctccacatggaaaccggtcttatcagcataatagttggccacaaagtcacggccatgtggttggacatacttgtacgatccggtcactttgcccgtctcatcgcgcttctcgttcttgccctggttccaatccctatagccataggcaaattgacccaaaccatcctgaccatgatactgatgggcatcgtagtgctcctccacatactcctcgggatgctcgatcacacgacccatgtagacgaactctcccttctcgttgcgcgcctcgggcaggggattctcaccggttttcggggcatactcgatgtcgccaatgccacgcagttgggcgctgttaaggaattgctgcgcctcctcgggagttatgttgatcttgaagatgttctcaccgctggctagtgtggcctgaaatgaattaagcgtaaaaataattagcaaaatattaagacaaaccattaaagtgtgacttgggtggttagcagactttatggccaatttaacacgctacacaattctcgagagatcacaaaaagaaggggtatgatgtcatatcaccatcatcatcatcagtgattaaagtctcatctcacatgtaacgcgatgtttgcttaatttttgcacattgtataactttcgtatttgcactttacgatccggacacatttgacatttatagagtcaccacaacccggactttaattgaatggatcggatggatctattcagagatgctcgtaaatatcagcttaattatgcaaattatctgcatttaccagcaacagggcagccaagatgtagcacttcatagtggattcgatttgaaatatgagttatatgtgtggtttatccaggtatcacaacgtgtattcgctattctccagttggcgggctactaataactgagtaaccaaaaggcactgcttatatactaactttttagatctacttggtattgttgttttttgttttgcgttttgcataaatctgaatgaagatgtgctggctggccgactgtttcactgaccagcagcagtctgagcttcacctgtccggtttcttactcagctttagaatctcgattcgcaaagccagtggcggcaatttgaagttcattatcggcgtcgctcaaattcgcacttctcacactcgactacggatatatgaatattttcggagtgatgcggagacacctatggaaacattattaattgtatgtatgccgtttggtcaattagttatctaatagctttgtggtctacccatctattgttgactgccacagaacccttttcgaaacgattcaagtggcattttcagcgctcgttggctgtcagtttcgagtatcttaaagatacttttttgaccaatcggaattcattggttcagtaagcatattcggcgactgggtgtctgaaatctggtttcgatcatcttatcttgatggtataactagcatttagatacccatttttcttcataattcttaattttatttgttgcataatttatgaaaatagtacgaaaaagtacaattttttatacaggttctgtataagttacaaggtacccattagtcgaaaccttatttatcgaactttataacctaaccacttgactatgatttatttacaattaagcatctttgagcgcttcaattactttttacttccaattaatgcaaagtatactgcctaaggtttaactttgactccgggtttcctgtagatcggcggaagtttttttgtttagacatgcgccaagcacttgaagtccgcaattgactgctgcataattagatgcgatgcgattggaatagaggatgcgatgggtaatcacatcaacacttggacaggcgatcaagtgtcagttcaataagaccggctca

SEQ ID NO: 7028 - DNA, 1004 bp, DROSOPHILA
ccaactggagaatagcgaatacacgttgtgatacctggataaaccacacatataactcatatttcaaatcgaatccactatgaagtgctacatcttggctgccctgttgctggccacactagccagcggtgagaacatcttcaagatcaacataactcccgaggaggcgcagcaattccttaacagcgcccaactgcgtggcattggcgacatcgagtatgccccgaaaaccggtgagaatcccctgcccgaggcgcgcaacgagaagggagagttcgtctacatgggtcgtgtgatcgagcatcccgaggagtatgtggaggagcactacgatgcccatcagtatcatggtcaggatggtttgggtcaatttgcctatggctatagggattggaaccagggcaagaacgagaagcgcgatgagacgggcaaagtgaccggatcgtacaagtatgtccaaccacatggccgtgactttgtggccaactattatgctgataagaccggtttccatgtggaggacaatcgtccggcacaccttaaactgccggccactaagactccggctgtcctcaaggccgaggaggagcacttcaagctgtggggtgagctggccgccgccgctggccacaatcccgatccttatgccgccgagtaccagcaggagggtcgctaccagcccactgagcccgagtaccagccctacgtgcacgaggagccgccatatgtgcccggacccgaggagaccggcgagcccaagggcttcttctacgccttcgactacaatgtccccctgttgcgcaacaaggaggagcgtgccgagctcgaacgcctgcgtgccatcaacaacaaggatgagtaagattcagatattgatctagatccttatggatttggtggatccatcgcatcgccttgtataggtcgttctgtagaaagtagctaagacattttcacatatttattgaaatccttcgcaaaataaatagcaaactttaaataca

SEQ ID NO: 7029 - protein, 260 aa, DROSOPHILA
MKCYILAALLLATLASGENIFKINITPEEAQQFLNSAQLRGIGDIEYAPKTGENPLPEARNEKGEFVYMGRVIEHPEEYVEEHYDAHQYHGQDGLGQFAYGYRDWNQGKNEKRDETGKVTGSYKYVQPHGRDFVANYYADKTGFHVEDNRPAHLKLPATKTPAVLKAEEEHFKLWGELAAAAGHNPDPYAAEYQQEGRYQPTEPEYQPYVHEEPPYVPGPEETGEPKGFFYAFDYNVPLLRNKEERAELERLRAINNKDE

SEQ ID NO: 7030 - DNA, 2918 bp, DROSOPHILA
ttgattgcgattttgttaacccattttgctactaaaagaacatttaatcatcaacaatgaatttgaaaactatgcgcccgcggccttcggaaggatttcttgtgcaggcttggaatcccagtctctatacctaatttctggattgctcagaatcttggccacacccttcagaaagcttggcttactgatagtggtttttctcacagaatcgttgcttttcttttccaaggcatgcggtataagtgaggaaaaatttagagatgcctcgttagtaagtgtcccatctgaggattcaattggcaagagagacatccccttatttcgcttgttgttgaacttctcgagatatttcttggcacccaaacgggcggatgtctttaaagcattcatatcccaggacactcccagcttggatttgatctcctcggaggcagtcttgtcgttcgaagagaacagcgtttggaacatcttcttcagctcgaggtccttgggatcttgtagcgatcggactgcccgcggatcaatctgcccaatggaattgtcttggcttttggtttccgcctcccgcttggaatccttgttcagctcaactaagtcgtttaacgacaatttggggtccaagttcccttgcagctgctggaaatccatttcgggcgcatccttcggcaggtagccgcggcttttcaggtaaactagcggcgactgccagttgtcgatgaggttcttaacaatggtgtcaaccgaattctcatacttaactacttttaaattgcgatcagctgcagcactataaaatagacagatgtataagattaaagaaatcattttaatttaaattgtgagcctgttatcgatgactttgtgaaacggctacactatcgatataaattgttattgacagctacgtctcagcagccctggatctaaatcagctgttgtgttgtaagcaaacgtaaaattaacaaaatcctacaattattttgttttttattgaatttcatagcctttcaggtttttggttgatcgcacaggactgcaacgctattatggtcatcaccaacaacacaacactgcccgaggagtcggagctgaacgtccaggagctaaatctatcgtcggcggccttacgggcaggcgccttccatttgggcaagcaatgcgagcaggccaataatgttagtacatccagattgcaggggaatcctcctgatagtaatgcttaggtgaaaagcgccttaaagtgaagctgggagccgctgcctctttaaaatccgagcggcttagttatataacctaacctcaaaaagcaccttccccgtttgtttaccttttccttcgtgtaatttcaggagtttatgctgtgccggcaggagctggatgacccgcgagcctgtttggcggagggcaaagccgtgaccagctgcgccctggacttcttccgcaaggtgaagaagacctgccatgaggagttcacgcagtacgccacctgcctggataagagcagcggtactatggctttttcacagtaagcactccgtaaatgttgaatattccaatcatgctataccaatgtccatccatactttagttgccgcaagacccagggagtgttcgacaagtgtatcaaagataacttcgactgggatcgtccctcctatggatacttctcgagggccaaggtaatttctcggcatgctttatttagacctctcctaatcacttctgttttcaggtcatccaatcagctcgggaagcacccaagaaggaggagaaggtctcctatcccgatgccacccccggtttgcccgaggattaccccaagccgccagcaaagtacggttcccgcttccactggctggagtagacagctgccagcgcctagtgaaatttgaaagcgttcatcttaatataaactcttgtttccattagtactcgatatatttatttcatcgtatctttttcctcgacacagtttgcttgattttggccataatatccaggtactggttgttcaggcagcatccgcagtagctaacagggaagcaggcgctgccctcgatacggcggaaaagtggcgtgttctgatagaagacccacgagatgttttcttcgcccagcaccagcatgatcttgtcgaagcggacgccctgcacctgaaacagctccatgtcgccggtgatgatgcgccactctgcgtagcgtatgttagcatctgggggcagcttggagcgctccctcatcatcacatgctcgaaccaatcgcgcacttggataatcgatccggtgggagcgtgctttctgatctggtagctgatgcgcgggtacagaggatttctgcgacaggaatgaatgagtttctggcgatctcttgggtatttatattaattgcttacatgtaaggaacaaaggccaggcgcaccagcacaaattcaactttctctcgaggagccatcttgaagataattttatttttatgcggacgacgcacttcacaggcactgctatgcaatactaatgaacttggtccactgctcagactatatatgcataatacgcgacttgcaggcaggtagaatcattgctaaagcagatgttccgtttctaatcccaagaaaaagtcccagttttcccgttagttacctgtatcgattttctcatttacagttttattgctaaaaagatttttcttatcctagaagagggagcgctactccgtgtaccacttggtacgcttaggcttcttgattttacctcccgtaacgccgccacctccttggtttccactaatcatgttcttgtacttattaattaggggccgaaggtcatccgtttccttcttgcgtccttgcttgggccgattatttgccttgcgctctgccaggtgggactcgcgtatcttcttgttcttctgcttgcgc

SEQ ID NO: 7031 - DNA, 628 bp, DROSOPHILA
tagcctttcaggtttttggttgatcgcacaggactgcaacgctattatggtcatcaccaacaacacaacactgcccgaggagtcggagctgaacgtccaggagctaaatctatcgtcggcggccttacgggcaggcgccttccatttgggcaagcaatgcgagcaggccaataatgagtttatgctgtgccggcaggagctggatgacccgcgagcctgtttggcggagggcaaagccgtgaccagctgcgccctggacttcttccgcaaggtgaagaagacctgccatgaggagttcacgcagtacgccacctgcctggataagagcagcggtactatggctttttcacattgccgcaagacccagggagtgttcgacaagtgtatcaaagataacttcgactgggatcgtccctcctatggatacttctcgagggccaaggtcatccaatcagctcgggaagcacccaagaaggaggagaaggtctcctatcccgatgccacccccggtttgcccgaggattaccccaagccgccagcaaagtacggttcccgcttccactggctggagtagacagctgccagcgcctagtgaaatttgaaagcgttcatcttaatataaactctt

SEQ ID NO: 7032 - protein, 175 aa, DROSOPHILA
MVITNNTTLPEESELNVQELNLSSAALRAGAFHLGKQCEQANNEFMLCRQELDDPRACLAEGKAVTSCALDFFRKVKKTCHEEFTQYATCLDKSSGTMAFSHCRKTQGVFDKCIKDNFDWDRPSYGYFSRAKVIQSAREAPKKEEKVSYPDATPGLPEDYPKPPAKYGSRFHWLE

SEQ ID NO: 7033 - DNA, 9165 bp, DROSOPHILA
taacacacacacacacacacactctcccgccgtgcaagccggtaaacaaaactggaaagagagagtgccagagagcaaagcttcctttttttggcaaagagcgcgaagaagcttcgtgttgccattgttgttcgtcttcgtgtggttgttggtgttggtgtcgttgtgcgttttttaacacaattgcattcaaaaaatgtgtgcttagtatttcggcaactttgtgactgtgcgaacgttctgtgttctctgcttttcattatttctgagatttttcgtgagtaacttgcgatttctggcccgaattgagtcacacattcagagcctagactgttgataagacccgaaaaaaatattaaacaaaaaacgcaagtaagaggagccacgagaaaccaaaacaaaagtgaaatgccattgacatttgtccatgcgaagttgaagttgactgaccttgaattcccatgtgtgagagcaaaactgtttcaagagagccagtgagagaatggggagccactggaaagtgggtggcagtgggaggcgtgctgtagaaatcctaaggaaaacgaaatccttaccataacaataatatttgaatatgacgagcgcttttcgcgtattttttttcgcaaatgtcaatgactttattttcaaacgtgcgcgtaaaaataacacaaacatagaaaccttacacatacgccttcgataaaatgcggtttattgcacttccattgtgtaaatacaatgatattacacatatgataatattcccgagtttcccctctctctgccttacttactacatactccacacaaagtgtgccgatctttgtgctataattattattattattattactggctgtgtgtcatattatgcatgcgtttttgctctggacgcttccgcatcatcgccaaataaataatgcccgcggtttaaatgtcgccgataaagtgggcgcgatatgaataaagtttttatgttcggatatgtatctcacagatgagatctgagcagatgatgtgtctttatgaggcccataacagagtagaatttaagatgaatatttccagtcggtaccttctgatttttttcaagccaattctatactaataagatagagttaattgcagttattcttaatacttaaaaaatttttaattatagcacatatttaaatgtatctaaagctctaatatgtaccacaataccctatttctttcagtatcgtgagatttgtgacaagggccaaaatcgtgatatatcctcaacgtcgacgaacaacaacaactctacgacaacgaccaacaacaacacgaatagcaacaataacaacaacaccagcaaaccgcaagcaacctcaacacgctgcagccgctgtgccacggacaactgctcgatccatccggtacaacagggcgaggtctcgtcgacggaaccaccacttccagagccatcactcctgctcggccaggtgccagagatatcggcatactttgaggcactcgagcattacatcagcggcgtcggctgggtcctgctgcaggtgaacgccaacggcatcattgagtcctgcacgcagaacatccgcgatctgatcggctatgagaagcaggagctgtaccaccagccgctctacatgtacctctattcgggggatcacgccaagctagagccgatcatcaatacaatgtacaacaatccgaatggcggaaatagcaattccgccaataattctggtccaggtggcagctctgctggcacctcagcgggcgtgtggggcgatctcgaggagctgaacaacggcaatgcctcacagggctccaattccagcggagcgggcggcttaggtggagcaggtggcgctgcggccggcaagaagcgcagcatctccaccaaggtgcgcatgctagtcaaagacacgcgcaccgccacccaaacgtcgtccaactgcgaagagaagccactgaggcagtccggccatcaggataagtacgaggaggtggtccttatagcggcaccagtcaagggtaagtactaagactcaatttaatcggttgaaacaccatataattcatattattttcagacgatgccgatgccagcagctcggtgctgtgcctcatcacacgaccggaggatgagtcgcccttggagatcaacattcaacagcacgtgcagcagcagccgatcgagcagatgaccttcaagctggacatccacggcaaaatactcactctcgatcccacggcactgcgggagccgttcaagcagcacctgcagacgtgggtgggacgcctgtggcaggacctatgtcacccacacgacctatccaccctcaagtcgcatctgcgcgacatacaggactcggccagcgccaattcgccgggtgctggggcaggtaccagtgtggtatcgcgtccgtttcgtctaagattaggagcaccggatgtatacgtgcatgtgaaggcaaactcgagactgttcctcaaccagacgcctggcgagggcgactttataatgtccgtgcagacgctgctcaactcggagaacgacatgaacagcagcaacactggagcgggcagtggaggactgggcttgggtcaactgtgcgccatggcaccgagtccctcacttgccagctcactgctcagcagcctttccatggatggtctgcacggaggaaccggttcgggatcctcgtcttcgccagcggcctctggcatgttgcccacccatctgctgggcggactggtgggcggcggacaacagggcggcggtggcaacagcacgcagactacaagcgtgggcggaccgctgatgagcagcgcgattatcaatggcaccggactgcagcagcaacaacagcagcagcagcgatccggtgccagctcatcggccagctcgtccgcgaatgcgctggttaacgcgtttaccgcttcgccagcgccagcggagcacagcttctatggaagcgataccttcgaattcgacattgcagcacattcctcctcattcgaactggatcccagcggcggtgtgggagcctggacggattcgcgtcccaattcgcgagcgtctgtggccacgcccgttagcacgccgcgccctccgtctggacacggatttagtccggctgtttgcgcatctccggccacgccctatcagctctcctcgcactccgccgccagcctgccctcgccgcagtcaaatgccagtgccggcggtggcaactacggtggcttcaacttccactcctttgattcaagcgatgtaaagcccgagaaggatgtccagcaacaacaaaaccagcagcagtcaaacaacaatagcagcagtagcaatccactattgggcggcggtttgccgaacggagtgggtggaatgctgctttcccagcagcaacagcagcaacaaacgccgcctcaacagcagcagcagcagcaacaacaggaatcctcggagcgattgcgccacttgctgaccaagtcgcagagcatggccggcggtctgggaggactgggagatgatgagaaggttagtcccaatgtacgattttggtcaataacttgaacttgactaaaactggttttgcacatgaaattcgcggatctatactaatgcaaatataattatttcacagtacttcaagccagagggcagcgaggaggagaagcacgccagcggaggtttcaagatgggtggccagcccggagggatgggaatgtttggacccatgggatcgatggggcgtggtgtcggcaactcaagtatgctgcacaaggcaggcaattcccagaaccctatgctgctcaaggtatgattctaatatttcgaaatcgaaccactttcaagttacatatttacttgcagctactaaacgaaaagtccgaggacgatgatggcaacggatcgggtggtgggccaggttctatgaacaactcccggcagagcgagctgatgcgccagctgaagaatccggacggtggcagccatggcatgcaccgtaacagtgccagcggcaacatgagtaccgaggatctaaaggccatgctcaaaatccaaagcgatccatcgctgaacagaaagcgatcgctaaatgagcccgacgacgatccctctgccaaacggtctgaggacaagcccagcaaattgtgcacgcaaaacaagatgttggccaagctactgcagaatccgccaaagatacccaaagcacccaatcccgagcagccattgcaagtgaagactctgccggacatcaccagctctacggtgagcagcacgctagccgctccgggtaacctcattagcgctggcagcaccggacccaaagcggcagccaatcgcaaccgaaagcagcagcaacagcagcagcagcaacaacaacagcagcagcagcaacaggtcgccggcattccttcccagcagcaacaacagcagccaaacgatgtctacctcagtcagcagcagcaacagcaactccagtcgccgcagctggccttccagcaccagcaactggcgaccacagcaactacctcaattaccacagcggcctccacttcggctgcagctgcggcagcggcggccattctgggcgaaggcgactcagagctatccaaattgctggacagcgtaatggagtattatccagatgatactcccatcgtgacaaatgccccatccgaggcctcggcaatcaacgacattcaaaaatcgctgatgctagacgtggagtcggcggcctttggtaacgatctaaaccagcagcttatgatgacccagcagcaacagcaccagcaacaacagcagcagcaacagctgctggcgttgcagcttgcccagcagcagcagcaacagcgacagcagcatctgcagcagccccctgcctatccgggaatgctcaacatgcaacagcagcaacaccaacagcagcaacagcagaaccagcaacacatcatgcagcgtctggaagccatgcggaatcagggcaatcagggtttccagcgacctccacccatgtatcccgcccgcggtcgcggacccatgaatgcggtggccactccgggaggcgtcgtgttgcctgcccaacagcaactgcgaaacatacgacaacagcagcagttggcggccgcacaacagaaggagcgtttattgcagcaacagcaaaagcaacaattgctcgttccggagaatgcgagtgagtattggggaaactctaatttacaattgattattaaacttattgtgtcttatattttagctggcatgaatgcgggcttgaacaacattggctcgcttctcaacacgacgggagctccaaatgtgtccctgtcccgcacgaatctgccctcagatgcccagcttagtccaaactttgctcagaccctgatgcagcagcagctcagtcccggtcgtagcgcaccctacagtccgcagcccaatcaaggtatgctgattatgaatatgtcattgataatctaatgatgaattttggatttgtaggctatgcccctcagttcccgcaacctggccaacgactctccccgcagcagcagcagcaactcagccagcagcaacagaacaatgtccagcagcaacagttggcctaccaacagcaacaggttggcgatggcggacgatccaacactccgtttggctctaactcgggaatgcagtcgccgggcatgcagaatagtccacagcagtggggatctggcggcggaggaggcggtggtcccggcggtccactgccgtcaggcaatgccggtagaacgctgcaacaacacaacccgatgctcattgcacagctgcaggtgagtgtctgagaattgactcagccaaagcagacccattaacacctttccatggccgcgctgcagggcgtgagtccgtacaatgcgcgtcaataccaacagaaccagagacgtggcctcaattccccaggcgctgttggacccggtggcaatccggcggcacaagcggctctgcagcggcagaactcgttccagggacagggcggtggcggtgccacaacgcccgacggttccggcgtgggtttcggcggaccacagtccccctacggcaccaatgtaaatgttttccagcagcaacagttgcagcgactgcagcgacagggcagcgtgccacaggccacccaacatttgccaggtaaggaatggaacggggaacaatgctggatcaacaatcattgaactgaaaactaggcgtttagtttatttatggcgagtaaaaaaacgtttttaggagcaagtaagggggagtacaattaggatatcaagattaatgtacctttaattgcctctaaaaaaatcgagtatgaaaaacaaatgtagttgatataaatcttgtgatttaagcaccccttaatccacatactaaacattaaactacatacttagacagctttacacacactcacacataacatacacacacccacacacacacacttgatgacctgaactagttttaatcaatgccaaacgaaaccaaccgcttaaccaaaacaggctcgccacgctttggctcctcaccgggcagcagcaacaacactgatagttcagctgccgccggcaaccagcagcagcaacagcagcaacagcagcagcaacagcagcagcatcagcagcagcaacatcagcagctgatgaacgggctgagcatgtcgccacatccgcatccgcacccggcgatgatgggcgtgggcggcatgggcagtggcggtggcaacggcatcattggccttggcggcgggggcggcaactatggggccacccttggcggctacgggcaatcgcagcaggcgaatgatttctatggtcgcgcccagaccggtaagcctgtgtgctcttctctctctctcaaactgaaaccatcatttaaatatctcacgcgatcgctgtataaatcaccccgccttgaaaaaagtgtatatatatgtctatatataatacggctgtataatccattgccacgcatcgtaaagcaatcaaaaaaaaattgggagcattctgtatatacatgtcaaaaatctacatttgagctggaaaaaacacacgtatcaacacccctaacccacacatatgcgactatatctttgtataactctgtacgatcattgtaattaacccgatatccgcccaataagtcaagttggttgaactgtacataatatctagcatacatagttgcaggcgctgcacccccacgaaaacatttggtgtatctaaaatcccccaacaatgtttagccctaagaacacatttcgaaaaccaagatccaagttttttctttatcaaaaattaattataaataaacaataatagattatagaaagcaagacactttcgatatgcaaaattgaaattggtcactgctgtaggagtttagtacgtttatcggtatccacctagcaaaattaattcccgatcccaattttcagtgtgcctcaacctttgtgttctatgttgtatttcgttgtgtatgttttgtatttattttatgttttatgttttatgtttagtattgagccaaaccaatgtgactaaaccctatattatattgtggcttggagcccagtgtactgggtcatagacctatgatcacttaaccgattccctttcaatctttcagctggcggtggtggcagcgtagccggtggtaatgccaattccgaattcgtcaaacaggagctgcgcgcggtggtcagtgtgcgggcccagcaggcagctgcggcagccaccggaggagctggagtcggaggaggcgtagctcaacgaggacagacgccgcagagtccactgcagcagggctcagtgatcgggggtggcggtggcattgtgggcggagtcaacagtacaaacacaatgggcaatgtcacgcccacgggcagcggcaatgtcagcaactccatgctcaacacgccaccggacccaacgctgagcttcagcttcgagacgcgtaagtactagcacatatatttattttggttataatttttaaaatttcatttttatttcgatagcggacttcttcaccagcagcgctacgaggtgaccctaaggtgcctagttcagaaccaaggatcacgtacaaccaaaacttctcttgcgcacgcatttatggctctagatacgaaaaacaataggaaatcaatggatgaaaggcgaagcatgtacatctaattaaaaatattagcagcactatttaaaaaatatatatctaaatatatttattttataatactagcaaatattaattttaaagcaaaatgggaacctcgtctaaaagaaatcgcgaaaacataaataccagacacaagctctagttaaatattttgaaaacagcataataacttcataagaagatgcaaacatgatataagtaatgcatatttattacgtttaaagataaagcctagtactaagagctatatatacaaaagaatgaaagcagaaacaaagcataaaacataaataattatgcgttaagtgctggccgtttcgaggtgttgttaaattgatatatgtatatttaaagagaattaatattaatattgcataacatttggagaggcgttggcaacggcagcagttggctaagctctagatataacgacaagcgataatataatgtatacaattggaagggaaagcatgtaacatgtaacacacaaaaacacaaacttgctgtacatttaaaaaaaagtagtgttgaattttttcagtgtgataatttgttgaattttatgtactaaatgttgctaatttgttgctgcaaaagcacgaggacctcgacctccaaaggctttgctttatgtataccttctaaaccttttccatcatctttaaaaatttcttttcaattcaccaattgaccaatcagacccaaaatatatcactttgactatggttagaaaaactatccctttgctgtaaatattttcactgagtatcttttctaagttgagccgccttaaattttaaattgtaatttagttaatgctcgtttaaatttattgtaattacgtttaaatacttttatatcaaagcgagaaagcaaagcgcgcaaagcaaagttggcgttgcaatttcatgtgaaggctattttacaggttttgtttaaactaatatgtaattttaaacatt

SEQ ID NO: 7034 - DNA, 5337 bp, DROSOPHILA
atgagatctgagcagatgatgtgtctttatgaggcccataacagatatcgtgagatttgtgacaagggccaaaatcgtgatatatcctcaacgtcgacgaacaacaacaactctacgacaacgaccaacaacaacacgaatagcaacaataacaacaacaccagcaaaccgcaagcaacctcaacacgctgcagccgctgtgccacggacaactgctcgatccatccggtacaacagggcgaggtctcgtcgacggaaccaccacttccagagccatcactcctgctcggccaggtgccagagatatcggcatactttgaggcactcgagcattacatcagcggcgtcggctgggtcctgctgcaggtgaacgccaacggcatcattgagtcctgcacgcagaacatccgcgatctgatcggctatgagaagcaggagctgtaccaccagccgctctacatgtacctctattcgggggatcacgccaagctagagccgatcatcaatacaatgtacaacaatccgaatggcggaaatagcaattccgccaataattctggtccaggtggcagctctgctggcacctcagcgggcgtgtggggcgatctcgaggagctgaacaacggcaatgcctcacagggctccaattccagcggagcgggcggcttaggtggagcaggtggcgctgcggccggcaagaagcgcagcatctccaccaaggtgcgcatgctagtcaaagacacgcgcaccgccacccaaacgtcgtccaactgcgaagagaagccactgaggcagtccggccatcaggataagtacgaggaggtggtccttatagcggcaccagtcaaggacgatgccgatgccagcagctcggtgctgtgcctcatcacacgaccggaggatgagtcgcccttggagatcaacattcaacagcacgtgcagcagcagccgatcgagcagatgaccttcaagctggacatccacggcaaaatactcactctcgatcccacggcactgcgggagccgttcaagcagcacctgcagacgtgggtgggacgcctgtggcaggacctatgtcacccacacgacctatccaccctcaagtcgcatctgcgcgacatacaggactcggccagcgccaattcgccgggtgctggggcaggtaccagtgtggtatcgcgtccgtttcgtctaagattaggagcaccggatgtatacgtgcatgtgaaggcaaactcgagactgttcctcaaccagacgcctggcgagggcgactttataatgtccgtgcagacgctgctcaactcggagaacgacatgaacagcagcaacactggagcgggcagtggaggactgggcttgggtcaactgtgcgccatggcaccgagtccctcacttgccagctcactgctcagcagcctttccatggatggtctgcacggaggaaccggttcgggatcctcgtcttcgccagcggcctctggcatgttgcccacccatctgctgggcggactggtgggcggcggacaacagggcggcggtggcaacagcacgcagactacaagcgtgggcggaccgctgatgagcagcgcgattatcaatggcaccggactgcagcagcaacaacagcagcagcagcgatccggtgccagctcatcggccagctcgtccgcgaatgcgctggttaacgcgtttaccgcttcgccagcgccagcggagcacagcttctatggaagcgataccttcgaattcgacattgcagcacattcctcctcattcgaactggatcccagcggcggtgtgggagcctggacggattcgcgtcccaattcgcgagcgtctgtggccacgcccgttagcacgccgcgccctccgtctggacacggatttagtccggctgtttgcgcatctccggccacgccctatcagctctcctcgcactccgccgccagcctgccctcgccgcagtcaaatgccagtgccggcggtggcaactacggtggcttcaacttccactcctttgattcaagcgatgtaaagcccgagaaggatgtccagcaacaacaaaaccagcagcagtcaaacaacaatagcagcagtagcaatccactattgggcggcggtttgccgaacggagtgggtggaatgctgctttcccagcagcaacagcagcaacaaacgccgcctcaacagcagcagcagcagcaacaacaggaatcctcggagcgattgcgccacttgctgaccaagtcgcagagcatggccggcggtctgggaggactgggagatgatgagaagtacttcaagccagagggcagcgaggaggagaagcacgccagcggaggtttcaagatgggtggccagcccggagggatgggaatgtttggacccatgggatcgatggggcgtggtgtcggcaactcaagtatgctgcacaaggcaggcaattcccagaaccctatgctgctcaagctactaaacgaaaagtccgaggacgatgatggcaacggatcgggtggtgggccaggttctatgaacaactcccggcagagcgagctgatgcgccagctgaagaatccggacggtggcagccatggcatgcaccgtaacagtgccagcggcaacatgagtaccgaggatctaaaggccatgctcaaaatccaaagcgatccatcgctgaacagaaagcgatcgctaaatgagcccgacgacgatccctctgccaaacggtctgaggacaagcccagcaaattgtgcacgcaaaacaagatgttggccaagctactgcagaatccgccaaagatacccaaagcacccaatcccgagcagccattgcaagtgaagactctgccggacatcaccagctctacggtgagcagcacgctagccgctccgggtaacctcattagcgctggcagcaccggacccaaagcggcagccaatcgcaaccgaaagcagcagcaacagcagcagcagcaacaacaacagcagcagcagcaacaggtcgccggcattccttcccagcagcaacaacagcagccaaacgatgtctacctcagtcagcagcagcaacagcaactccagtcgccgcagctggccttccagcaccagcaactggcgaccacagcaactacctcaattaccacagcggcctccacttcggctgcagctgcggcagcggcggccattctgggcgaaggcgactcagagctatccaaattgctggacagcgtaatggagtattatccagatgatactcccatcgtgacaaatgccccatccgaggcctcggcaatcaacgacattcaaaaatcgctgatgctagacgtggagtcggcggcctttggtaacgatctaaaccagcagcttatgatgacccagcagcaacagcaccagcaacaacagcagcagcaacagctgctggcgttgcagcttgcccagcagcagcagcaacagcgacagcagcatctgcagcagccccctgcctatccgggaatgctcaacatgcaacagcagcaacaccaacagcagcaacagcagaaccagcaacacatcatgcagcgtctggaagccatgcggaatcagggcaatcagggtttccagcgacctccacccatgtatcccgcccgcggtcgcggacccatgaatgcggtggccactccgggaggcgtcgtgttgcctgcccaacagcaactgcgaaacatacgacaacagcagcagttggcggccgcacaacagaaggagcgtttattgcagcaacagcaaaagcaacaattgctcgttccggagaatgcgactggcatgaatgcgggcttgaacaacattggctcgcttctcaacacgacgggagctccaaatgtgtccctgtcccgcacgaatctgccctcagatgcccagcttagtccaaactttgctcagaccctgatgcagcagcagctcagtcccggtcgtagcgcaccctacagtccgcagcccaatcaaggctatgcccctcagttcccgcaacctggccaacgactctccccgcagcagcagcagcaactcagccagcagcaacagaacaatgtccagcagcaacagttggcctaccaacagcaacaggttggcgatggcggacgatccaacactccgtttggctctaactcgggaatgcagtcgccgggcatgcagaatagtccacagcagtggggatctggcggcggaggaggcggtggtcccggcggtccactgccgtcaggcaatgccggtagaacgctgcaacaacacaacccgatgctcattgcacagctgcagggcgtgagtccgtacaatgcgcgtcaataccaacagaaccagagacgtggcctcaattccccaggcgctgttggacccggtggcaatccggcggcacaagcggctctgcagcggcagaactcgttccagggacagggcggtggcggtgccacaacgcccgacggttccggcgtgggtttcggcggaccacagtccccctacggcaccaatgtaaatgttttccagcagcaacagttgcagcgactgcagcgacagggcagcgtgccacaggccacccaacatttgccaggctcgccacgctttggctcctcaccgggcagcagcaacaacactgatagttcagctgccgccggcaaccagcagcagcaacagcagcaacagcagcagcaacagcagcagcatcagcagcagcaacatcagcagctgatgaacgggctgagcatgtcgccacatccgcatccgcacccggcgatgatgggcgtgggcggcatgggcagtggcggtggcaacggcatcattggccttggcggcgggggcggcaactatggggccacccttggcggctacgggcaatcgcagcaggcgaatgatttctatggtcgcgcccagaccgctggcggtggtggcagcgtagccggtggtaatgccaattccgaattcgtcaaacaggagctgcgcgcggtggtcagtgtgcgggcccagcaggcagctgcggcagccaccggaggagctggagtcggaggaggcgtagctcaacgaggacagacgccgcagagtccactgcagcagggctcagtgatcgggggtggcggtggcattgtgggcggagtcaacagtacaaacacaatgggcaatgtcacgcccacgggcagcggcaatgtcagcaactccatgctcaacacgccaccggacccaacgctgagcttcagcttcgagacgccgctacgaggtgaccctaaggtgcctagttcagaaccaaggatcacgtacaaccaaaacttctcttgcgcacgcatttatggctctagatacgaaaaacaatag

SEQ ID NO: 7035 - protein, 1778 aa, DROSOPHILA
MRSEQMMCLYEAHNRYREICDKGQNRDISSTSTNNNNSTTTTNNNTNSNNNNNTSKPQATSTRCSRCATDNCSIHPVQQGEVSSTEPPLPEPSLLLGQVPEISAYFEALEHYISGVGWVLLQVNANGIIESCTQNIRDLIGYEKQELYHQPLYMYLYSGDHAKLEPIINTMYNNPNGGNSNSANNSGPGGSSAGTSAGVWGDLEELNNGNASQGSNSSGAGGLGGAGGAAAGKKRSISTKVRMLVKDTRTATQTSSNCEEKPLRQSGHQDKYEEVVLIAAPVKDDADASSSVLCLITRPEDESPLEINIQQHVQQQPIEQMTFKLDIHGKILTLDPTALREPFKQHLQTWVGRLWQDLCHPHDLSTLKSHLRDIQDSASANSPGAGAGTSVVSRPFRLRLGAPDVYVHVKANSRLFLNQTPGEGDFIMSVQTLLNSENDMNSSNTGAGSGGLGLGQLCAMAPSPSLASSLLSSLSMDGLHGGTGSGSSSSPAASGMLPTHLLGGLVGGGQQGGGGNSTQTTSVGGPLMSSAIINGTGLQQQQQQQQRSGASSSASSSANALVNAFTASPAPAEHSFYGSDTFEFDIAAHSSSFELDPSGGVGAWTDSRPNSRASVATPVSTPRPPSGHGFSPAVCASPATPYQLSSHSAASLPSPQSNASAGGGNYGGFNFHSFDSSDVKPEKDVQQQQNQQQSNNNSSSSNPLLGGGLPNGVGGMLLSQQQQQQQTPPQQQQQQQQQESSERLRHLLTKSQSMAGGLGGLGDDEKYFKPEGSEEEKHASGGFKMGGQPGGMGMFGPMGSMGRGVGNSSMLHKAGNSQNPMLLKLLNEKSEDDDGNGSGGGPGSMNNSRQSELMRQLKNPDGGSHGMHRNSASGNMSTEDLKAMLKIQSDPSLNRKRSLNEPDDDPSAKRSEDKPSKLCTQNKMLAKLLQNPPKIPKAPNPEQPLQVKTLPDITSSTVSSTLAAPGNLISAGSTGPKAAANRNRKQQQQQQQQQQQQQQQQVAGIPSQQQQQQPNDVYLSQQQQQQLQSPQLAFQHQQLATTATTSITTAASTSAAAAAAAAILGEGDSELSKLLDSVMEYYPDDTPIVTNAPSEASAINDIQKSLMLDVESAAFGNDLNQQLMMTQQQQHQQQQQQQQLLALQLAQQQQQQRQQHLQQPPAYPGMLNMQQQQHQQQQQQNQQHIMQRLEAMRNQGNQGFQRPPPMYPARGRGPMNAVATPGGVVLPAQQQLRNIRQQQQLAAAQQKERLLQQQQKQQLLVPENATGMNAGLNNIGSLLNTTGAPNVSLSRTNLPSDAQLSPNFAQTLMQQQLSPGRSAPYSPQPNQGYAPQFPQPGQRLSPQQQQQLSQQQQNNVQQQQLAYQQQQVGDGGRSNTPFGSNSGMQSPGMQNSPQQWGSGGGGGGGPGGPLPSGNAGRTLQQHNPMLIAQLQGVSPYNARQYQQNQRRGLNSPGAVGPGGNPAAQAALQRQNSFQGQGGGGATTPDGSGVGFGGPQSPYGTNVNVFQQQQLQRLQRQGSVPQATQHLPGSPRFGSSPGSSNNTDSSAAAGNQQQQQQQQQQQQQQHQQQQHQQLMNGLSMSPHPHPHPAMMGVGGMGSGGGNGIIGLGGGGGNYGATLGGYGQSQQANDFYGRAQTAGGGGSVAGGNANSEFVKQELRAVVSVRAQQAAAAATGGAGVGGGVAQRGQTPQSPLQQGSVIGGGGGIVGGVNSTNTMGNVTPTGSGNVSNSMLNTPPDPTLSFSFETPLRGDPKVPSSEPRITYNQNFSCARIYGSRYEKQ

SEQ ID NO: 7036 - DNA, 4687 bp, DROSOPHILA
aaaattgaatacataatctaatattttcttctttacagataaggcctcaactatacaacgcaagtggacaacggtcgccgtagtcatgtccatcgcatccttagctctaagcagttagtttggtagtgtcctttttatgtaggctacattcgtttttatgtttggactaggaactttgatactccttaatttttaatagacttttaacggataaacgtaattttttgcggtatttttaaaaaaaagcgcttattttgtacatgcatgtatttgtaaggataacgaaacacaaaacaaaaacaaacaccacaatgcgtaagcaaacgaacccataaagacaaaaaggacaacagtaaagcataacaagaaattcttgtattcatatatttaccacataaataaaatatatatgatagttatatacgatgtataggtctaattgagtacagaaacgctaataaaaaaaatacgaaaagaaacattaaaagtgcattaaaccaaccgccttcgtcgtcgtttttctttgctaaaaaactaaacaaattttaaaattgtatttttattgtaaaattacgctgtagattggactcaagtcacacatataataaaaaaaagtctcagcatgactaattaaatccaaattacttttgtttatggcatctatggattggtttaaatgaagtttgtttttaataattcgttttaatcatgtgggcgttacagggccacagggtgttataaaatttattaacataaattattatttactatttttatgtttgtatattatatttccacgcgtcaaaggcttataagctttaaaaacattgctatttgcggattttacaacagtgcggatgctccgcttcaccgtctgactgtgaatgcaaccctgcgtgcctgttcctgcgcacacccttccagccctgccgaccttccagccttccagtgtgcctatgagtatgcagtgaaaatgacagcagtggcagaggagccatcaacatcaccatcaccgtagacagcagaaacgttgacgccagcgccagacgagagccaaggttcctgccacccagttagcccactcgattggataatcgccgaggatcggaaaacgtgaaagcagccctcgaatagcccaagtccacaatcccagccagccagcatgtcctagtgaagtcctagacgtgggaagagtgcagagaagagaagagaatacgatagcagagcaggagctgcacgatggcctccggcgatggcgacaccatcaacaccatcgacatggacagctcctcggcgtctcaggccaaactggccgagcccagcaatggtaactattatccacagaccccgtcacttttcgcagcgtgaaaaaaatcaatgactgtcgaatggaaatgcccctggcgcatgtgtctcgcgcgaagggaggaagcgtgagtgtgaatccacccccgcacttgtcaaacggacttccatcggctcctatttatattttgggattgataacaaaagaaagtcacacgcgactggagggagagtgtcctgtccaagttcaagttgcggtgattgaccaggcgactgcgtcatggcctgaattaaacatgactcctaataatgaactctgtccgtctttctttagcctccaccgaccatgtgggaaactcatcgcccgacgtaagtacatccgccttgacctcgaggtcactcccatccaaactaatcgggtcaattactttcactcccaaccaaccaactaaccaaccattcatccgtccagctgggcaaccgaccgaaccgagcgtccagcaaggcggacaaggagcgcaagattggccacagacgcgtcggcgagggcggcgagattacgtacaaaaagatccagacgtcgcagatcatgggctccatccaactgggaatccagcacactgtaagaaacattcatagccttaagtactggagcttgcatgttttactagcactatttccaaacatttcaatgaactcagggcggggttacaagattgacccaagcttgattcgtatgacatatcttgtatatcttggctttttccatctacttagtaatcttgaaatatccttcgcaggtcggcagtctggcctcgaagcccaagcgtgatctacttatgatggacttctgggaaatcgagagcatcacctttccaccagagggttctagccttacacctgcccaccattacagcgagttcagatacaagatctatgcgcccatagcgtttcgctactttcgggatctgtttggcatccaaccagatgattttatggtgagtgggcgaccgttccaagtcggcagatactgatggtccatactttcagatgtccatgtgcacgtccccgctgcgggaactgtccaatcctggtgcttccggctctatattctacctgacgaccgacgacgagttcatcataaagacggtgcaacacaaggagggtgaattcttacagaaactactgcctgggtgggtaacccgaacaaatctttgcaagaagacctatttaaaaagtgttatctgcatttcagttactatatgaatctaaatcaaaatccgcgcacgctattgccaaagttcttcggattgtactgcctgcagacgagcaatgccaaaaatattcgcctggtggtcatgaacaatctgctgccctcgtccgtaaagatgcacctcaagtacgacctcaagggctccacgttcaagcgcaaggccaacaaggcggagcgtgccaagaagtcgcccacgtacaaggacctcgacttcatggagcagcatcccaacggcatattcctggaggccgagacctacgccgcgctgatcaagaccattcagcgcgactgcacggtgctggagtccttcaaaatcatggactactcgctgctcctcggcgtccacaatctggacgtggcgctaaaggagaagcagagtgagcagagaaaaccgcttagggctccgctggccgaggactccgatgtggatgcagacgatccgctggacggcgatgcggccacaggcatcagcaggaataagtgagtatctcagcttgctgccaagccttcgggcaatctaaagatctaacccagtgcggcatacaggtcagtgaatcgccagcggctggttgcccactccacggccatggagagcattcaggcggagagtgaacccatcgacgacgaggaggatgtgccgtgagtgcctcagtttcagttccatatatttttccgagcttacatgcgacgacctaacccaattccagacctggtggcattccagcaaggagtgagaagggcgagcgcctgctgctctacatcggcattatcgacatcctgcaatcctacaggctgaagaagaagctggagcacacattcaaaagcatcatacacgatggggtaagactgatgattctagcaagaatttgccactgatatatactcttgcaggaaaccgtatcggtctgccggccctcgttctatgctcaaagattccaaaactttatggccaagaccgtgttccgcaagataccctcccgtaagtggaccggtcgtggaagtcgggctaagtactcgtactgtaaggcatttttgtgtgcagttggccgagttatgcaagcactcagttccggttccggttccggtttccgacatttttgagtagatagttagccatagacactttcacaccatttacattcgaacacaccgaacaccatttagacactcgtagcttgctaatgttggttaatcgatcgatgtgcagcaaaaatgcaatatggtacacttggcctgagtagacgccgatttgaagagatacctatatacatatctctacatcaaatcaatatccaccaacaaaccgctctgttctctgctttcttttatggccatgtctcgaatgcaatcacccactcttacgtacgcatatagtggatctcccagagatcaaggggaatcacagaaaatttcgtaccttggtgaccagctatataggtaaacaaacgaatggtcgatgtcctttaacttttgattatctctcactttctttacttacacctttcttaacgagtattttatagtgtttattaacgatgttttgtattcaccacttggttttatatgatttcgaaacggacgccaaagcatgcctctcaatctcacgttagttgatctcacatccctggcatcctcggcatccttggcatccttggcatcctggcaaccgtattgctcttggcttcgcatagttgctttggaagtgctatgctttttgaactttttcttttgatcgaaacaaatttatgcgttccgcaactaattactgcatttccatcatttttgcagcgcttaagcattcgccttcgaagagaaaaagcctttccaaggctattcagcgctccattgacagcgacaacgaggtggcctccaggcgtaagttaatcactctaaaaattaatgtatactaaccacgactacaacttgttctaaaacactctttcgattcctaaacctattataatttgctcagcggttcacgcctcgcactcgcacagcagtggcaagattcaccagccagccaagccgcccaccaccgagcccacgccagcgggagcggcaggtggagccgaaagaggagcaactgccctaggtccagcaaccaccagt

SEQ ID NO: 7037 - DNA, 1795 bp, DROSOPHILA
acatcaccatcaccgtagacagcagaaacgttgacgccagcgccagacgagagccaaggttcctgccacccagttagcccactcgattggataatcgccgaggatcggaaaacgtgaaagcagccctcgaatagcccaagtccacaatcccagccagccagcatgtcctagtgaagtcctagacgtgggaagagtgcagagaagagaagagaatacgatagcagagcaggagctgcacgatggcctccggcgatggcgacaccatcaacaccatcgacatggacagctcctcggcgtctcaggccaaactggccgagcccagcaatgcctccaccgaccatgtgggaaactcatcgcccgacctgggcaaccgaccgaaccgagcgtccagcaaggcggacaaggagcgcaagattggccacagacgcgtcggcgagggcggcgagattacgtacaaaaagatccagacgtcgcagatcatgggctccatccaactgggaatccagcacactgtcggcagtctggcctcgaagcccaagcgtgatctacttatgatggacttctgggaaatcgagagcatcacctttccaccagagggttctagccttacacctgcccaccattacagcgagttcagatacaagatctatgcgcccatagcgtttcgctactttcgggatctgtttggcatccaaccagatgattttatgatgtccatgtgcacgtccccgctgcgggaactgtccaatcctggtgcttccggctctatattctacctgacgaccgacgacgagttcatcataaagacggtgcaacacaaggagggtgaattcttacagaaactactgcctggttactatatgaatctaaatcaaaatccgcgcacgctattgccaaagttcttcggattgtactgcctgcagacgagcaatgccaaaaatattcgcctggtggtcatgaacaatctgctgccctcgtccgtaaagatgcacctcaagtacgacctcaagggctccacgttcaagcgcaaggccaacaaggcggagcgtgccaagaagtcgcccacgtacaaggacctcgacttcatggagcagcatcccaacggcatattcctggaggccgagacctacgccgcgctgatcaagaccattcagcgcgactgcacggtgctggagtccttcaaaatcatggactactcgctgctcctcggcgtccacaatctggacgtggcgctaaaggagaagcagagtgagcagagaaaaccgcttagggctccgctggccgaggactccgatgtggatgcagacgatccgctggacggcgatgcggccacaggcatcagcaggaataagtcagtgaatcgccagcggctggttgcccactccacggccatggagagcattcaggcggagagtgaacccatcgacgacgaggaggatgtgccacctggtggcattccagcaaggagtgagaagggcgagcgcctgctgctctacatcggcattatcgacatcctgcaatcctacaggctgaagaagaagctggagcacacattcaaaagcatcatacacgatggggaaaccgtatcggtctgccggccctcgttctatgctcaaagattccaaaactttatggccaagaccgtgttccgcaagataccctcccgtaagtggaccggtcgtggaagtcgggctaagtactcgtactgtaaggcatttttgtgtgcagttggccgagttatgcaagcactcagttccggttccggttccggtttccgacatttttgagtagatag

SEQ ID NO: 7038 - protein, 515 aa, DROSOPHILA
MASGDGDTINTIDMDSSSASQAKLAEPSNASTDHVGNSSPDLGNRPNRASSKADKERKIGHRRVGEGGEITYKKIQTSQIMGSIQLGIQHTVGSLASKPKRDLLMMDFWEIESITFPPEGSSLTPAHHYSEFRYKIYAPIAFRYFRDLFGIQPDDFMMSMCTSPLRELSNPGASGSIFYLTTDDEFIIKTVQHKEGEFLQKLLPGYYMNLNQNPRTLLPKFFGLYCLQTSNAKNIRLVVMNNLLPSSVKMHLKYDLKGSTFKRKANKAERAKKSPTYKDLDFMEQHPNGIFLEAETYAALIKTIQRDCTVLESFKIMDYSLLLGVHNLDVALKEKQSEQRKPLRAPLAEDSDVDADDPLDGDAATGISRNKSVNRQRLVAHSTAMESIQAESEPIDDEEDVPPGGIPARSEKGERLLLYIGIIDILQSYRLKKKLEHTFKSIIHDGETVSVCRPSFYAQRFQNFMAKTVFRKIPSRKWTGRGSRAKYSYCKAFLCAVGRVMQALSSGSGSGFRHF

SEQ ID NO: 7039 - DNA, 3252 bp, DROSOPHILA
tcgagaattacgaaggatattttgcatatttgttctatacttctactaagttcacttatatatgtgtagtgacataaaattttctttctgtgttcgcattcccggtccgtcctgtctcatcattgtcttttgacgctgcgagcgtttatcgttcatctgggggagtgggtgtgtatcctcgtcttcctgttcgagctccggatgcttcctgcttacttctcttatgtgtatttttttaccgacgctgatttttattcctctgcaggatgtgatatttcattcagggccgctaacagagcagctaaatgctcccctcctgtcccctggatatggggcagataataatttctcatctttatgatgttttcacgctctgctgtgccctgcttaagtcaagaaaccaacgattgttgctgctgaaggcaaaaaaggagaaaagatacaagaatacagggaactgggaacgggatgagcatctttcacttttcactttctcggtcccattcccgttcccatccgcacaatcgaatttggaatgcccggaagcagtgtgaccataattgccagcccgactagacgaagacattgttttccgtggaatcggagggatgcgatgacgaagatgccgtctttggtggagtgaatgatatccctctcgtccggtggcttcatcctccaccaaacttgtttgctgccccagcttgtcatggtccttttgttccggagaagtagtgggtcagcgtagctggctggatgtaataatgaaatttatgtctgcataacgctgatttatgtacgctaatgagctttttaattagttaatgcacgtgcggggtacggcgggtggtaattaaataaaaattaattatgaaaaactagccctgccgaaatagccattatgctcatgcagccctggataaaaataaattctttacatttagatacctttgcttattcagtatagaaagaatttagcaaagctagcttgctacaactgaaaatgttagaggaacttgcaaaagacgacgagaagatggatggaaaccacaccgatgctaatcagatcatcaaggatcgccgaagacaggaggagcattatttcaagctttatggccgcattgagatacacgaatggctgttgaaggattcagtccgaattaaagcctaccgcgaggccatccagcacaacgagttcttcaggcacaaggtgggtagagtagtacatgtatttaaacagatccctttagagatccttccgctccaagactgtcctggatgttggctgcggcatgggcgtcctttcgatgttcgcagccaaggcgggttccaaaagggtcctggcagtagaggcggccaccatttcggaatttgcccaacaggtagtccaggataatgaattcggcagagttatacaggtgattcagggaaaagtagaggacattgaactgcctgatgggatcaaaaaggtggatattatagtgtgcgactggatggggtaagtaggcaaatcagggaaagttccaaataaacagaaggtactttctatctatgtatatatattatcagttaccctcttattttccacttcaataaccttaagcccaaaactattttgccacagctcctgcctgttttctggaaatatgctcgagtcgttattatttgcgcgggacaagtggctatcggccacaggccacatctatccggacacggcgcagctttatctggcggccatcaagggacgcgaccaggatcttggattctggcacgatgtgcacggcttcgacctgtccgccatccggcgcagatgcgagtccaaggcggtggtggagcacgtgaccggtgaccagatgatgagcagggtgtgcctggtcaaatcgctggatctgtacaccgagccccgccaatccgccaagtctcgttcgctattcgagctaaaggtcagccgaaatggctgggttcacggcctggtggcctactttgatgtcggattcagcaagagtacgcaaaggatcagcttcagcacatcgccctctgctccgtggacccattggaaccaaacggtcttctatctggagacaccactgcctgttagggcaggtgagtgcatcaagggcgtgctcaccatgaaacccagcgaggacagcatctttgacacggaattcgacatttttgtgaacttcgatggccgtgagaaatcggttaccatccatcagtcctttgtgctctccgatcccctaacactttgttgagcctgcaacaaaagtggcacacgaaatatcatcggatcatgataaaatgaacgaccagtaaaataaagtaaaagccagccacattgccagtggtgcaatatttatataattttattgtgtgtaggcacacataaaaacatctctatgcaagaattcagtggcctacatatgcgagggattcaggaaagagctacgggctcaataactttccaacaccctgaatcttggaaaaaggtgactaaaagtacgcaacaatatatttgtgtgcacaagcacactaataaaaaatgcttatcctccacttaaaatgtaaataaaacaaaattataatctcaccttgaataacttacgaatttgatatgcgcgtagggcatctcaaagttacaatggcaactggtttgctctttgcagcacacctagtgcacacagttggcaaatggtgtaaataagtgcagcgccagcatttaattatttaaaacaattttccgatgtgtgtgtgcagcgttgtgtgtgcgatgtgggtgaatctactgcgcgttgcttttaatttatgccccatgtttttattttcatatgtatttttttttttttgtgctgtttcccattttgcattttttctatcgctgcttatttatgccggtcagttgacgccataaactagcgcattaagcgaatgcataatattgtttgccacaacaattgccaaactatttcatttaaatactgcaggatctgcggcgtgataaatgcgccgaaagtcggcaaatcgtgccccccccccccccccccaaaaaaaagattcattctggatcactcctcgcggacttttcaatcaaattataagctgtttggcatttgcttgtgctctggcccagttccccacttccagccacatttcactcgcaaattggcccacagagaagggctcctgctgttatcctgcaaaccgttgacggttatgcaaatgttaggtaaatgcgcataataataatttcaaata

SEQ ID NO: 7040 - DNA, 1068 bp, DROSOPHILA
atgttagaggaacttgcaaaagacgacgagaagatggatggaaaccacaccgatgctaatcagatcatcaaggatcgccgaagacaggaggagcattatttcaagctttatggccgcattgagatacacgaatggctgttgaaggattcagtccgaattaaagcctaccgcgaggccatccagcacaacgagttcttcaggcacaagactgtcctggatgttggctgcggcatgggcgtcctttcgatgttcgcagccaaggcgggttccaaaagggtcctggcagtagaggcggccaccatttcggaatttgcccaacaggtagtccaggataatgaattcggcagagttatacaggtgattcagggaaaagtagaggacattgaactgcctgatgggatcaaaaaggtggatattatagtgtgcgactggatgggctcctgcctgttttctggaaatatgctcgagtcgttattatttgcgcgggacaagtggctatcggccacaggccacatctatccggacacggcgcagctttatctggcggccatcaagggacgcgaccaggatcttggattctggcacgatgtgcacggcttcgacctgtccgccatccggcgcagatgcgagtccaaggcggtggtggagcacgtgaccggtgaccagatgatgagcagggtgtgcctggtcaaatcgctggatctgtacaccgagccccgccaatccgccaagtctcgttcgctattcgagctaaaggtcagccgaaatggctgggttcacggcctggtggcctactttgatgtcggattcagcaagagtacgcaaaggatcagcttcagcacatcgccctctgctccgtggacccattggaaccaaacggtcttctatctggagacaccactgcctgttagggcaggtgagtgcatcaagggcgtgctcaccatgaaacccagcgaggacagcatctttgacacggaattcgacatttttgtgaacttcgatggccgtgagaaatcggttaccatccatcagtcctttgtgctctccgatcccctaacactttgttga

SEQ ID NO: 7041 - protein, 355 aa, DROSOPHILA
MLEELAKDDEKMDGNHTDANQIIKDRRRQEEHYFKLYGRIEIHEWLLKDSVRIKAYREAIQHNEFFRHKTVLDVGCGMGVLSMFAAKAGSKRVLAVEAATISEFAQQVVQDNEFGRVIQVIQGKVEDIELPDGIKKVDIIVCDWMGSCLFSGNMLESLLFARDKWLSATGHIYPDTAQLYLAAIKGRDQDLGFWHDVHGFDLSAIRRRCESKAVVEHVTGDQMMSRVCLVKSLDLYTEPRQSAKSRSLFELKVSRNGWVHGLVAYFDVGFSKSTQRISFSTSPSAPWTHWNQTVFYLETPLPVRAGECIKGVLTMKPSEDSIFDTEFDIFVNFDGREKSVTIHQSFVLSDPLTLC

SEQ ID NO: 7042 - DNA, 2716 bp, DROSOPHILA
gttttgtttgtgaggatttgtaagtagcagggcttatgcgatggtttttttttttgtgggaagggtaggatgcagcttcttgatcgagacacaggcacagaattcaacaggtgaacagcattatagtgggttttgtttatgttttttgcaggctcgcaggatttgaaaaacgcgcgattgtgtggcgagttcggggtatcgatggactaacgatttcgaggcgacggcgaagcgcggtttgcttgcgtttggcttcagcagctccagcgaagtgttttcgctttttgtggatttttgaatcgatgcgcgtgcgcgcggtcaggtgtggtgggaatcccactggccgactgtggtggaaacgatcgctcacgaaggtaagatcggcttgaacttgaacggggatttcggtggctaaggcagccacgcggttttacagtcactgggggtcgaggtctgtttggatgaccccaggctacctatgggtcacactattggagggatatatctggactcaagcgttgctcacagaggtcctatggccactaccgccactaccaattagtcccgccagtgtcctcatgttccgcaacaactgggacgctcaaagatcccgatgaaaacgcgtttttccgcctggcaaatagtttttatttaactcgcacgcaatttgcaccttttcactactttattttgacgtaacagtgcagaacagctgctgcgaacagctgtttagggttgcaacgtgcgcggtgacgcaaggcagccggctaaaacgtagcactagaagtgtgcaacgtaaggcgacaaagtctgcaaccttaaaacggtagttatttacggatgctgacattattttaaaagtagttacaccatttttattgctcttttttgaattaacatttttacatctattttgtgccttacttacgtttttctataaacatatcgatagcacagctgtttcctcttgcgcatctctaatcacgtttacgtaaatttcagaagagcagcaacaagatgtctagaaatttgtttttatcaattacaaactttattaggaacttagagagcttgttcctgccacatggaggacaccctcctggtgagaagcaccagcccaagataaagttaccctgacttacccactttttacacagctttagcgttggccggttttcagcatgatcacagccctaaatcctcccaggaattcagtttgaagcagcttattggcgacggattgctgtgggctgttccgaagcacagaagatccgtggagaaacgcctgaagcggaagttcggatatccggaatacaactggaagcctttgagggagaagagaaacctccgctcctgtctgcaatgtggccatgaccacgagatgggagttctttgtcgtaagtagccttaaaagtatacaaagaggtagccacctttaatgttgctcttccagccttctgctaccaaaaggtcctgaaggagactgagctcatgcagtcgaaaatccaggagacactcggtctagatcccgtggacaaggaagtaatcgttctttatgaaggcgagaaggccgaacagtccacagatgatctgaaaaacaagcgcatcgtggagatgaagaagcctcgtcccatgtggttcaccaagaatctgctccaaaaatccacgcagcagctgtccgaaaccaaggaagtcaagccctccgacttggcctagatactaagcatccattgtgcattaaatccacacgttcgttatcaaatcgatgctattttattctctgtgaaggataaggaccttgcttgcttcaggaatccgttgttaaagtcctgggcactcataggttttctaccttccacgcgtaactgaagcacttccaactgactctgctgagcacatccgattatgagggatctcgacttccttaggtagctgatggcaccaggttcttggacgggaactctcttctccggtaatcgcaactccagcaactgcacttgcttgcccaaaaagttggttgtaaggtttttgtagccatacaaagctcgatgacgagtgtatatttcaatggcactcagctcggaccagataatttctgtgattttactggtaatcttgggagctgaaggcaaaaatatagtttatataggttctcgaagtgcttagatatgctttaccatagctgacccttgaactatcttggggtttggcttccttaagtcttactgataggttgttaatagtatccacaagtaactcggctcctagcgacgccaaagatgcatgcagatccggcatgaagacatcgggattaatagccacttctcgctgagctaaaatctaaagcataagtcgtcaatactactgcatacaatggtaagataagaatgaacttacatcaccgatatcgaaccggtgaggttcgattttcatgatggaaactccagtgctggcatctcccttcatgatggcgtatatgatgggagcagctccccgccatttgggtaacaaactagcgtgaacattgatcatcccataaggaaatccattgatgatactaccaggaatcaggtggccaaaggagaccaccacacccagatcaaattgcggacacacagaaggatctatgggccacttttgcaggggaagcttctccttttccgcgtaggtcctcacacagttggcgggacttttgaaggaggtaacaactcccaaa

SEQ ID NO: 7043 - DNA, 605 bp, DROSOPHILA
agaagagcagcaacaagatgtctagaaatttgtttttatcaattacaaactttattaggaacttagagagcttgttcctgccacatggaggacaccctcctgctttagcgttggccggttttcagcatgatcacagccctaaatcctcccaggaattcagtttgaagcagcttattggcgacggattgctgtgggctgttccgaagcacagaagatccgtggagaaacgcctgaagcggaagttcggatatccggaatacaactggaagcctttgagggagaagagaaacctccgctcctgtctgcaatgtggccatgaccacgagatgggagttctttgtcccttctgctaccaaaaggtcctgaaggagactgagctcatgcagtcgaaaatccaggagacactcggtctagatcccgtggacaaggaagtaatcgttctttatgaaggcgagaaggccgaacagtccacagatgatctgaaaaacaagcgcatcgtggagatgaagaagcctcgtcccatgtggttcaccaagaatctgctccaaaaatccacgcagcagctgtccgaaaccaaggaagtcaagccctccgacttggcctag

SEQ ID NO: 7044 - protein, 195 aa, DROSOPHILA
MSRNLFLSITNFIRNLESLFLPHGGHPPALALAGFQHDHSPKSSQEFSLKQLIGDGLLWAVPKHRRSVEKRLKRKFGYPEYNWKPLREKRNLRSCLQCGHDHEMGVLCPFCYQKVLKETELMQSKIQETLGLDPVDKEVIVLYEGEKAEQSTDDLKNKRIVEMKKPRPMWFTKNLLQKSTQQLSETKEVKPSDLA

SEQ ID NO: 7045 - DNA, 2828 bp, DROSOPHILA
aagctgcttggctccatgtgaaaacgtggacagctttaagccccaccgcgtctttagttttcacattgagggaattgtaaggtcaaaaaatctgacacaccaaaagacaatcgaatgcatcgagtatctcaagagtaagctgctaaacacggagatgaatgtacatctggtacagcgcctaccggatggcttcctaattcgcttcctggacgattggaaatatatacctgaacagctattgcaacgcaactacgctcaggttagccaataagtcgggataagtcgtcggaataatgttaatcaaatttaaagtagacatagtttacataacaatagttcctaagctatttgtaagcttttcatttctgaccatgttacaatttaaccacttacattatcatgacaatgcttacatttctttcgaaggactctttttgtttttgaattatcactacttcggagcgatcccaataaactgactatgttcgaacatgttatccagatgtcatgtggcttgattaatgtcctatcttggggctggttcaattatgagcgcggaacagccattggcaaatgacaaacacaaaactgtctcgaaactaaaacaataaaaataattgcctttaatgtgcaaaagcaaaaaatcaagggacaccgttttggacgtggaagcgcggatctgtctgtcgggtggggtgctaatagattatgccgcaacgattagagaggcaataaataccacctggccgggatcccatgcgtgtttggttcgcgggcacatattcggactgcgatgacgacaggtcctccttgtgtcctccgctgtcctggtgttgacaatctaaacggttcggccaaaagggtaatgggcctggccaagggtcacattggggcacagttcgtcggggatgtactccagatcacaaacagggatagttggcctattcacaatggtaatacttaaatcagtttcggaagcatttcccctataaacacctgcgacattccaacccctgagaataattagcctggttaagtgtcaaaaggatggcagaccccgcgacatgtgttcccaacataatgatgattatgaccacccgtactcaactaactaccccgaaacttggatttgtaggaattttactagacgattacaatttggaagaagtgtggagagtgtgtgtggcgcgttactctgctgatctgcaaggaaatgaactcaataaacgaaatggttaacacaacaaaaagtgaaatcatttagtagttggctccgcgctggatgcagggtccgctggagatggatcccgcctccaggctcggacagttgaccttctgcagctcggcaatgcgctgccatgtcatgttgaagtggcgcgcggaacgggcattggagagtttggcaatgggtcccagggtgcggtatccattggtaatgaagcgtatgaatcccttggccgttaggtccagcagagcggtcttcacctgcgactccagatcgccacaggcaaagggtctatttagatgattagcattaccattaccattaagtatattactcgatctgtcttactccttttccagcatctccagaatgtgctcctcgtggataccattgctgtacttgggatgatcctggaagatgcgcaccatgtccaaaatatatagcggcaaattgatgtggtagctgttgaaaggaagccgcaaggtggtgggctcacattccctgatcgatccttcgtcacacatttcgttgcttataaaaatacgatttccttgttcgatgaatacttgttagatgaatactattccgagagacaggctaagcgaagcctatgctttgactgtaggatgggggcagggcccacttggtcatgccccagacccccgggtgctaatgtcatccaattaaaggtgtcattaacggtttgtccaccgcgaagtccacgaggtttgctcttcaattactgaccaaacaaacaacgaagcaataacgtgttctactgtctagattacccggtaatttgtctaacgcattaatagcctatgtccaaaacgatcctcccaatgcattagcaatgggtccccggggtgggtaaaaaaaaatcgaactcagtccgtagagtagaagtttggtggtttggtaatgccaaccaattcaaaccgattccaaaacgtactgctttctatatgtgtgcatttcgaatccatctcgctcgaccctttgatggatattagactgcctccaattctccagacatgtcactccggcacgcaatccattatttccgggttcggctctcagttgggccaaaacaccataaacgaaacatcggtggcatgacagtcaaagggttaactatgtatggcccaaacttttgccaacagataataaattagcgcatacattatgaaacgccataaggatgcgacttccggttgccggagacggcaaggactccgtgacccaaactgccaatttaccaccccggcaaacaaacaggtgacactttctcaaaccgaaacgaaacggaacgggttaaagacgacacacggagttcatttacatgtcgatggttgttggatatgcatacggtggtcttggatgtcgtgagtggcattgtcggaaggcaagtaaaattttacgattttgaagaatcatgcttgatcaaaataaagttggtaacaactttttgatgtcttaataatagcggattaggcatattgcaactttctgacgctgcagtttttggagctcagctaaaaaggagcagaagctattcctcttaggactattgaaatcgattggtacacgctggaaaaatcct

SEQ ID NO: 7046 - DNA, 771 bp, DROSOPHILA
gcttagcctgtctctcggaatagtattcatctaacaagtattcatcgaacaaggaaatcgtatttttataagcaacgaaatgtgtgacgaaggatcgatcagggaatgtgagcccaccaccttgcggcttcctttcaacagctaccacatcaatttgccgctatatattttggacatggtgcgcatcttccaggatcatcccaagtacagcaatggtatccacgaggagcacattctggagatgctggaaaaggaaccctttgcctgtggcgatctggagtcgcaggtgaagaccgctctgctggacctaacggccaagggattcatacgcttcattaccaatggataccgcaccctgggacccattgccaaactctccaatgcccgttccgcgcgccacttcaacatgacatggcagcgcattgccgagctgcagaaggtcaactgtccgagcctggaggcgggatccatctccagcggaccctgcatccagcgcggagccaactactaaatgatttcactttttgttgtgttaaccatttcgtttattgagttcatttccttgcagatcagcagagtaacgcgccacacacactctccacacttcttccaaattgtaatcgtctagtaaaattcctacaaatccaagtttcggggtagttagttgagtacgggtggtcataatcatcattatgttgggaacacatgtcgcggggtctgccatccttttgacacttaaccaggctaattattctcaggggttggaatgtc

SEQ ID NO: 7047 - protein, 143 aa, DROSOPHILA
MCDEGSIRECEPTTLRLPFNSYHINLPLYILDMVRIFQDHPKYSNGIHEEHILEMLEKEPFACGDLESQVKTALLDLTAKGFIRFITNGYRTLGPIAKLSNARSARHFNMTWQRIAELQKVNCPSLEAGSISSGPCIQRGANY

SEQ ID NO: 7048 - DNA, 13202 bp, DROSOPHILA
cactttggcactgcttccatctttcatgctttctgactgcctcgtgctctctctccctgtctcctgtctggatagtgtgttgctgtcgatgtaaagcccaaaggtcgaaataataaaacaatgcgaatttctaatcatacgataaaaattgttaattgatattgatatcttaaaatatggattaggagacgagggtgaactccataccgataaggtattaggcgtcatttctaaaagattttcgaattaaaccatttcatggttttacttctctttgctttgcgctgttgttgcgcctgctgttattattttattttatcccttttttccgttgtcctgcgtccgtccgtcattaccccgttcatcttcccccatttggctgcctcgctctttcgctctttcgtgccgttctctatgtgtcgtcaacagtttctgtggtacatttgtttcattgccttagctttttttgcctgcgattccgccgtgtgttgttctctccccgctccagggtttgtgtttaggtgcgagtaagtgtgcggcaggctcttgtctcgcttctttgcttacattacacagttgacacaatgtgcccgctgcggccgctcttcttcaactcgtccatccactgcacactcacagtcacaatcgcatctaggttgcttctgcccgcgccctcccttgaattgtactctcgcgaagccgaagtcgatgctctctctgtcgctctcccttattgcaagtgacgctcattcacctccgagttggatgtcggtctcagttttagcccacctcattcatattcacattcacccaaaacggcgtttgacttaatctcacgattgtttggtttcctactctcccgcgctccctctcttctgagtctctctttctggctgattcgcattcgattttagccgctgccatcgccgttgtttgcctacctatgtgtgtgtgtgaggagtgtgtcttgtattttagtccgcaatgcgctccgctcattatttgtttgagcgccgcggtgtaaagttgtaaaaagtccaagtgctcgtggaaactcgatgcaagacggggaaaacgaaacgcgataaatcgtgagaaagagagtgcgctaaaggaagagggagtgataatcaaacgaaatggaataatgtatttgcagaggcaacaacaacaatgcaaatagttgtcattgaggcgcaatgaatgataattagtgcttaattgaaatcaataatcatgacgaaagcgtaaagcttcgattttgccaatatattcttgattaccagtgagtctgtgatattgccgtgtgttcgaaaatggaggttattaaacccatggacttcagcagcttctcggcgttctgcgagcatcttaacaaatcttcacaaattgcagcaacaactgcaacgacgataccgccaacaataaacaatggaaaaggcatttatttggaggtaaaagcaaaaaatacaaatatttcgatgcgaaattgcaagcatggacatgatgcgtctcctaattaaaatgagaatgcaaaaatgcagagagaatatgcaaagaatgtgtgcatgcagttagtcaagataaagtgaacgagacccaaaaagagtgggacagacgacgaggagggggatcatttggccctctcgctcgtaattcggtctgtagcgagtggaaatacaaaacaataaatttaagcctataaatttcacatgaacaaaaagcgttcacgttgccccttttagggtttaatagggtttaggttgggaagttgtgtgcgcttgtgaggggtagagagagagagaattccatgttgcaagtaggtgttattggtaaggcaggtccacactaaaccgtttcaaaataaaattactgataatataaacataaagaaaattaaaaataatttttaattcacgactgaattgttgtacgatagaatcttaatgtgatcttttaaatgaatttgtaggccaatgtggtttcaagtattattattatttaattgatctactcttaatcaatttcttaaaaaccactttgtgcaacggttatatctatttattgccttttaagtgcactcactcaaattcttttttgcgcggctgtttattgctccgcgttctctattttatttaccctattgctatttacctaccgccgcctccaagcctgtagccatgttcatagccagcggttctactaatattcataatcaatcgctcaagtcgcctcgcacttgtgtagtgtaaatgcgatggtggaacggtgcggagaaaacgagtgatagagaggcggagtgagtgcgagcgagagccaaatgtatagtacgcgagaagggaagaaagaagaggcctcgagtcgctgtcgtgttatcttcttttgtcgtttgtttttgtttgtccccttttcggatttcgttataccatcgttcgtagcctgcaagcaatggttggttaggaggggagggaggcctagcagtacaaacagaggcatggaatcacaaggatacaccgtatacagagttgccaacctgggcgccacttggcatcattttaatttttggattcgctccaggaaggattccataacgttttcagttaggttacgcatttatacatacatgtatgccaattttttttattatatgtacatatttagaaaagaagacaaattcgttgtgcccatttacctcgataaagatagaaactaatgtaaattcaatcaaaggatagaataactatttactccttatatttttcaaattataacattaagactttggaatgaaccgcatatttggcagccgtaaatccaatggctgttactatgttgacccctaggacggcttacaattttgtgtatttgcgtgacgtttgcttctgtttctagcccttgcagcagtgtgtgccacctattatttttagtttaaatcgacgcaccaaacagcgcataaagtaagtgtgggtgagtgggagtgtatgaacttccttggctgtggcgcgtgcaattggtctcacaggattcatttgtttgtctctatttatttttgaaatcaccttcgcatgccccttacttttgagcgccattgcttggtgcggcttgctggttgttccgtgttccgattccacgtcgttctctgttgctgtcgccttttggcctctgtcctccggccgaagcgttattaggggtgtaaaatggattttttacttttattattatgattttattgtttttccagtttcggtctcctctctctttttttgagcctttgtctcgctcttattttctatatgcgcgtgtcattcgcattatgtctttccctttttgcttttcgcaaaaatttgtgtgtaattcgaaagccaggagcctgctatgtgctgatgattatagtgatgagggaaggtgtcgtaacgtggccaccccacatcaccaccaacacagtcgcgctgtgtgatcccaacccctggggacgcagtgatgggtggtgcaatgcaaagggtcgtttaaatattttttcaagctaatttggaaaatattcgtaatgaatttgcattgcaaaatgtgcacatcacatatggggtgttctatttcgctgagctgatatgtagaaatatgcttctctgttgtaaaaattttttgaaatatactattattgaaaagaattatttaaaaaaaatataatgcttactttatttttaattaaatagtagttaagttttgataacattcgaatggcctgatttaaacattttttatacttgcatagatggttattaattcgatatatttatttattaccaatatattttgtggacattgacgaacacctcaaatacttggggtcagacagactatgtttcgatacgtgcagtacctttgtactttggggttctatgctttttataaaaaatttacttttggttattgcaaaatcaaactaaaaatctaacttaaaaatatgttaattctatgactctaagacttgcaccatgtttttgcaagataaaatttattattgttttaacgaaaatatttataataaatattttatattttcggtaatttttacagaaaatggagcgacagggaaagatggaactggcggcgaaggagcgcgagtcccaacggctgcagctcattcccaaaaaatggaaccgccgggaagaatacgaatttcttagagttcttaccgggtatggtgtggacctacacgtctcaacacctatggcttcctctaatggaagttccctttcgcccgactggaccaagttcaaacagatggctcacctagagagaaaaagcgatgaaacactgacggactattataaggtatttgtggccatgtgtaaacgacaggcgggtttaaagctctctgaatcggagcgcggcttagaaggtatcatcgaagaaatcgaaaaggaacacgccaagctcatactggatcgcttggaagttcttgccaaattgcgagaagtcgctcggaatcccatgcttgaggaacgcttaaaactctgcaccaagaatgcggatactccagattggtgggagcccggtcgacacgacaaggaattgattacagccgtcctcaagcacggactttatcgctccgaaacctttatctttaacgatccaaactttagttttggagagtcagagaagcgttttattcgagaactagaagctcagattcaacgtactatcaaactggaggctttcaatgctgaaaaggcagagaagttagcggcagctgaaaaagatgctgcaactgaaaaagctgcggcgactgaaaaggcggcagcagaaaaggcagcttccgtgaagaatgaggtcatagaccttgatgatgagctcatgactaatgagagtgtcataaagaaagaatcgccggttactcccataaaagaagaaattaaatctgaagagagtcctgaaaagcatgatactgctgataatctcgaagataaaaattcagatgctgaagagagtacaaagataaagggtaaagaggattttaatccagaaaccacggaaaaggaagcactggacgaatctacaaatttgaataaggataagtctagcactgaaacattggttccagaaattgaagatagcaaacctagcgaagataaaatggaagttgaggaattgcccgttgccgaaaatggtgagaaggaaggttcgcctgagaaatgcagtgatgctgaggataagaaattttcagaagaaaagccaagttcccctgcagttcctgatggtaaagtgtcagaaatggaggcagatgaagctgcccctaatacagaagaaaactgttctggggattcggaatcgcccgaaaaggaatgtgaagacaaggttgttgaaaaggttgaggaagagaagggtgaaaactcatatgaaaaggctgaggaacaaaaagaagaaacggaaaaactggaaaaatcgagtatagaatcagagccctctgaaaaatctgaaactgtcctcgaacccgaagtagctgtgcccaaaaaatccactggcgaccaagacatactcgacctggtggctggtccttcagatcccgatgatgacgaggtgatgaaggaaaaagagaaagcagtagaagaagaatgcaagaagcaggcagcagaacttaaagcccgctttccggacttggaagtgattcaaccggcaactgttaagcagcaaaagttggagaagccaaagcttgaaatgtgcatgatccgatggtttaaggattttgcgttagaacgccgtattgcgcacattgtcgcttgcgttgagtcaggaaattggcctgtggatagtaaatacagtgcctttgcaacctgcaagggggccactgatctaagcattgctcttcacgaatccattcctcacttgagcagtttggaacgtcgctccacaacacccgatgtcattaccataacaacggaccaaggtgtcacaaagcacttgcagacctcccacatgcagcaagttgccagctcggcgtccgctgcatccacttcctcgggagttccccaggtcacccaatcaaagccctcttcttccaacagtttacctggcttggatgctaaaagcatcaatgctgctgtggcagcggccgttgcggcagctgcagcaggtggaaatgccacctccctatcgtctctgcttcccggaatgtcactgagtgcagcaactggctcttcggccggtggagtgagcggattgagcgttccgagtgccgggtctggagtgggaaagaagcgcaagcgacacatcgccattgacgtggagacggaaagggctaagctccacgctctgcttaacagttctacaagtaagtgtattttaaactaaaattctgtttaccccaattaaccttatctcaactttagtggcgccgaaagactgggagagtgagattgcaaacatggaggccttgagtggctcctctggtcgtggtcgaggtggcaattcttctgcttcgagtggcatgcagccgcctccagctcatcaacatgcttcactctcgcgacaatcatctggacagttcagcaagccagctgtccccgcaatgaagactcctcctccctcaatgggtgcaccaatggacctttcatcaaggtgtgttctttaaaataggtcattacgtttcccattgtacaaatatttttttaaaactgtgtctaacagcctgccgaaaatgaatatgactgagatgcttaagtcggcttccagttcgggagccatcgatttgagtgaggttcaggacttctctatgccttctaagaaatccagtgtacatgctgctttaagttccgcttttccctcgatgggaaacaagagcaaattggacgacacgcttaataaattgatgaagaaaaacaattgcgtaagttttaaattaaattaaattgaaattatttaaggcaacttacacctttgttttgttttattgtagaccattgaagagcctgttattggtaaggagaaaaagaggaagaagttggacgagatcgttctcggcctatcggctgctaaagagcaaaagaccttccctgacccatctctgccatcatcaaagaaaccgcagatccctccaagcgtatcggtgacgccagcaaaccttcaatcctcgtccaaccagcagtcaaatcagaaaccctttactatcactgttaccacagtgcctggaagtgagtttgagtctctgcgcttttaccttttcaccagccgaagattggcatccatctaataggatttttcactaatcgaatgtatctgtctttcagaatccaagagcggctcgtccaacagcggatccggcacaggaggaagctcgtcggccagcggcggaggagccggcggcagcggcttgagcgccctgcagaatatggcaatgggaggtctgtcatccaaagacagtctcaatgccctgttggcacagacaatggccaccgaccctcagacgttcctcaaacaacagcaaaagatgatgcagttcctgccccccgctcaacggaaggcttatgaaaacatgctagccgagatggaacaggccatgaagatcagttcaaagttttcaacaaactcaccacacgacgtcaaggtcaacaagtggctttcagacatgacaagtccactgggtgaccagctgagcattgattacgtaggaggaggcggggcaagtggttcgggaagtggcaatagtcggcgctcgaaccgccagcagggaaactcacaacaatcctcaagtgcagcccaattgcaaaagcaacagcaacaacagcagcagcagcagcaacaacaacagcaacactcgatgcccgggccacagaatttgacaggagaggagcccgtaccagtgatcaataaacagacaggcaaacgcttgggaggcaataaagcgccgcagctaaagagacttatgcaatggtgagtgtttgataagaatggaatattcagccttgaaaccattatctgtaacaaattaatgtctgatataataatattttttttactctaggcttacggagaaccccaattacgaagtggatccaaagtggctggagcagatgcaaaatcccatgtcaacaccgtcaccaaggcccgcatcaatggagagcggctacggctcctcggcagtgaaatcacatggtggtcgtccattatctaatttgagtagcacctcatcatcgtcccacacccaacagcaatcatctgcagctcaatcgcaagcgggagggaactcaggcagctcaaagaaaaattcccgccaacaaactgcggcatcagctgcactggatcaagctgccttacaatttggctccttagcgggtctgaatcccagtctgttagcaaatcttcctggactgggcgcatttgatcccaagaatcctcttgctgcatttgatcccaaaaatccgttgctatccatgtcttttggaggaatgcccggaatgggtaatattcctggactaggtaacctgaacaacatgaacctatttgccagtttggcaggaatgggaggattgggtaatcttgcagggatggacactcagtcgctggctgcgctcatggctgctgccgggccaactcttggcggattaactggtgcatccggaggagcgggctccggcaagagccaggcgcagtcgcaatcatccgccacttcgtcatcctcttcggctagtaaaaagaagcagcagcaacagcaacaacaggcacaaaatgaagctgctcaattggcagctgctatcagcgcaagcactggaggatctggcgcatcagggggaaagaacgcagctgcttctgcatcacaattggcggccggatttccattcctatttccgaatccatcattgctgtatccgcccatgggactaggtggcctgaatccgtattcccttggatctagtggacttggttccgcatacgatcagttggctcagcagtataacctgctaaatggagctacttcatcggcctcaaatacgagctccacgcagtctaagtcgcatcagtcgcaatcaaaatccagtcagtccaggaataccacagcatctgccaactcagcagcaagtctgatgaatgctatggccagcatgggcggtggcgctagcacagttaccacgccttcaacttcagcatcaggatccggacgtggcaggcaatcaagcagcagaaatcagtcccaaaccacacccacagcagcagacatggctcaactcagtagtctacttatgccaggagcggatccgcatcttctcgagtccttgagccgtatgagcaacatggatttggcgcaggcaacacgtctgatgagctccctgggaatgccgcctctttcaggaacgccgagctcttctggtggaggtaacacatctacaagcaagagaagcagccaagccgcaaatgaagctaacgttcaggccaaggaacagcaaaagtggttagaaagtttagcccgaggagctctgccaactgatttagccgcgcttcaagctttctcgcaaggcaaaatgccatcaacatccggatcaaatacgggaacatccacttcctctagtaagagctcgaaagcagctgcgacagcagcggcagctcaattaccacaaattcctggcatgtccagcgatttcccacaggcctttttagctgaaatggctgcacaggcaatggcggctgcggggggatcccttcctcttagtggtccaggttcattagctagtttggctggcttaactggtggctctgctggaggtggtggttcttctgcctcaggaagcactagccactcttcttcgaaacggcagcgtgaacaggatgcctttaagcaacagatggactattataccaagaccttaggtctgggatcaggaatctcgttgatacccacatcctcggcgggaggatcatctgcatcctctagtgcagcaaacgcagcagcagctgcgtatgctgcagctttggacgcagagcaacagcatcaacaacagcagaaggcgctatccaaacgagcacgtggggatttacaccccacaaaggaggaattggccgcccttgcggcaggcttaccccttaatcttggtgccagcatgagtagcatagaaaagagtctaagaggcggaagcagttccagtagcagctctacaccagcgcccatgactgcggaacaggataaagttacattgactccccttaatgcctctggaggcggatcggggtcctcttccagttcagcagctgctgcgggactggcagctaatctgcccagtcaaactacaataaccatagctcctcccattagcagtggagccagcactagcagcgagcgttccgaacgctccgagtcgcgcatttcgctaaccataacaaatgcagcggatgccgcgaaactaccgccgccctacgaagaagccgatgagctaattatacagcccatactcaaaaagcctaccgctgccaatccaggcagtagtcatggcggaagcgtggacgatctggatacagctgaaaatacttcagctgctaatctgagtggctcatcctccagttctgcagctgctgcggctgcagcggcggctgaagagaatcgacgttcctccaatcgcttgaagcgtccgaggtctggtaacgaacaaggatctggttccgtggaaggacaaccgcctgagaagcgacgggagttgcgatccactcgtcatacacgctcttcggcagatgccagtacgcttaatctttcaactggaagcgaatcgggagcggaggaacggaacgaatgagtattgcgcagatccgagcgccagcgctagcagaatgacacggcccatactaagggccggagaaaatcgcgtagaggagaagccaatccggccaatacatgcaagtcaccggagcagaaaatcaacaacagaaagatgatgagaaaccagctgcagatgcggatgcaaacgagatcgaggcgaaatttaaatgctaggttaactgttaccactagatcccttaagcttaaagttgtgtaaagtataagaaccatatataatctatatatagagattaggagccaatttggagaaaacggatttgggtttgtctcaacgccataaagttcgacactgctgcaactccgtctgaactggagggcagagcgccttacccatgacttactcaagtttcatctgctgcttatatggtgcttgataagtcaatagtgtcccttcctctggctgcttaattatttatataattacgaacataattaaaaagcgcttataatttaattgtaacaagagaaacaaagtgctgttgcacgacgaggattttccgtttaaattattgctaaaacgtataattgataagcgacagaaaaatgtttaaacaaaacactatccatgcataaaatgtagagacacatatacttgggtttctggcgctgtcctggcacatgcagtctctatacatatataatacctgtacataattcataatcttaaaatgactcgtattgcttaactgtttttaatatagtaaggcaccatgtattctcctcaaactaaaccattttccacacttccatccccaatatgttgtatactgaactctctattctttatgtgtgtccccgaaagctgcgtgtaattttgatcattttaattctgtaattagtaaatgtgaaaggatggaatgctaatggcgcaaatcaatctttcaagcgtatattttaaactcttgtatttgtaattcgtatgttttattatacacttgtgtgtcccatgaaccaccgacaccaacatgcaagtcctggcgcgtaactaacaggtgggaagtgtttattgaaaaatagaattttttaattaaatcaattttgttgtaattgagaagcccgagaatatgaatcttgcacgcttgatgagcagcaatgcaatatttaggtcattttgtataattattcagctgagtaaatgaattatggacaaatttgatccgcactttatgagaacaatttattttgagacgttaacaaggcacacaaaaaaaaagcaaaacaaacaaccacatatattgcatacttaatttgtaagtattactcgtaattaaaattattatataactgcagaacaacaaacaaaagcaacatcaaccagaagaagcaacaacagcaagaaacacccaagcatcaactattgatattgatgataaataaatatataaaaaataaattttaaaaattacattaacatacgatttattactgagctcctcgatttttagacgtgttaaggtagcctggtcaagtctgcgattcgtatgcccttaacgaaacttttccgcaaggcatttgccttgatcacgccgtaccgttccaggatatggccacccgaatacaaatggcagtcaagttcttgatggattaattccgaaatgtatccttaaaacagcatataaaaagcaatgttctttatgtgtgaattttggagttgtattttagatctttttgctatgcatttgtaatgtacttgtatacggatgtatattcacagtaattgactaaacttaaaaaaaaagacaggcgtgttgaagtccgataaagcaaagtgatacctaaaatgttttgagttcacaggcacgagaactaatttctttatataattagaggtgatcgaatataggatgagggtgttttggttttgaggtgaggaagagaacttacaataattacaaaaaagtacaaatgtataatatacaatatataaatcagtgtatccgcttggcccgcctcgcttagcttcgatgcgagagtaaactttaagtcttatagtctaagctaacactgctccaatgttttgtttaccaaaatatgattttttttgcggacgcttacgggcgactcgtgttaaacacggagaaacagtcagattctcgattgatcttttttgtaacagtgaatttatatgagccacagtattaatagatacgacccacagtttgcaaccgcaaatataatctagttaggcaaccatcttgaagggcagcgtaatttgcgcatacttttctgtgggctattggctttgttttttccaggtgtccatcgtttttattccactttaattagtggaactgaaggaagagggagcgttcgcaggcctcctcaagcaaagcttgctgcctaaccttctcttcgggagtgagctctttcaccaattcgtcga

SEQ ID NO: 7049 - DNA, 8199 bp, DROSOPHILA
atttgtttgagcgccgcggtgtaaagttgtaaaaagtccaagtgctcgtggaaactcgatgcaagacggggaaaacgaaacgcgataaatcgtgagaaagagagtgcgctaaaggaagagggagtgataatcaaacgaaatggaataatgtatttgcagaggcaacaacaacaatgcaaatagttgtcattgaggcgcaatgaatgataattagtgcttaattgaaatcaataatcatgacgaaagcgtaaagcttcgattttgccaatatattcttgattaccagtgagtctgtgatattgccgtgtgttcgaaaatggaggttattaaacccatggacttcagcagcttctcggcgttctgcgagcatcttaacaaatcttcacaaattgcagcaacaactgcaacgacgataccgccaacaataaacaatggaaaaggcatttatttggagaaaatggagcgacagggaaagatggaactggcggcgaaggagcgcgagtcccaacggctgcagctcattcccaaaaaatggaaccgccgggaagaatacgaatttcttagagttcttaccgggtatggtgtggacctacacgtctcaacacctatggcttcctctaatggaagttccctttcgcccgactggaccaagttcaaacagatggctcacctagagagaaaaagcgatgaaacactgacggactattataaggtatttgtggccatgtgtaaacgacaggcgggtttaaagctctctgaatcggagcgcggcttagaaggtatcatcgaagaaatcgaaaaggaacacgccaagctcatactggatcgcttggaagttcttgccaaattgcgagaagtcgctcggaatcccatgcttgaggaacgcttaaaactctgcaccaagaatgcggatactccagattggtgggagcccggtcgacacgacaaggaattgattacagccgtcctcaagcacggactttatcgctccgaaacctttatctttaacgatccaaactttagttttggagagtcagagaagcgttttattcgagaactagaagctcagattcaacgtactatcaaactggaggctttcaatgctgaaaaggcagagaagttagcggcagctgaaaaagatgctgcaactgaaaaagctgcggcgactgaaaaggcggcagcagaaaaggcagcttccgtgaagaatgaggtcatagaccttgatgatgagctcatgactaatgagagtgtcataaagaaagaatcgccggttactcccataaaagaagaaattaaatctgaagagagtcctgaaaagcatgatactgctgataatctcgaagataaaaattcagatgctgaagagagtacaaagataaagggtaaagaggattttaatccagaaaccacggaaaaggaagcactggacgaatctacaaatttgaataaggataagtctagcactgaaacattggttccagaaattgaagatagcaaacctagcgaagataaaatggaagttgaggaattgcccgttgccgaaaatggtgagaaggaaggttcgcctgagaaatgcagtgatgctgaggataagaaattttcagaagaaaagccaagttcccctgcagttcctgatggtaaagtgtcagaaatggaggcagatgaagctgcccctaatacagaagaaaactgttctggggattcggaatcgcccgaaaaggaatgtgaagacaaggttgttgaaaaggttgaggaagagaagggtgaaaactcatatgaaaaggctgaggaacaaaaagaagaaacggaaaaactggaaaaatcgagtatagaatcagagccctctgaaaaatctgaaactgtcctcgaacccgaagtagctgtgcccaaaaaatccactggcgaccaagacatactcgacctggtggctggtccttcagatcccgatgatgacgaggtgatgaaggaaaaagagaaagcagtagaagaagaatgcaagaagcaggcagcagaacttaaagcccgctttccggacttggaagtgattcaaccggcaactgttaagcagcaaaagttggagaagccaaagcttgaaatgtgcatgatccgatggtttaaggattttgcgttagaacgccgtattgcgcacattgtcgcttgcgttgagtcaggaaattggcctgtggatagtaaatacagtgcctttgcaacctgcaagggggccactgatctaagcattgctcttcacgaatccattcctcacttgagcagtttggaacgtcgctccacaacacccgatgtcattaccataacaacggaccaaggtgtcacaaagcacttgcagacctcccacatgcagcaagttgccagctcggcgtccgctgcatccacttcctcgggagttccccaggtcacccaatcaaagccctcttcttccaacagtttacctggcttggatgctaaaagcatcaatgctgctgtggcagcggccgttgcggcagctgcagcaggtggaaatgccacctccctatcgtctctgcttcccggaatgtcactgagtgcagcaactggctcttcggccggtggagtgagcggattgagcgttccgagtgccgggtctggagtgggaaagaagcgcaagcgacacatcgccattgacgtggagacggaaagggctaagctccacgctctgcttaacagttctacaatggcgccgaaagactgggagagtgagattgcaaacatggaggccttgagtggctcctctggtcgtggtcgaggtggcaattcttctgcttcgagtggcatgcagccgcctccagctcatcaacatgcttcactctcgcgacaatcatctggacagttcagcaagccagctgtccccgcaatgaagactcctcctccctcaatgggtgcaccaatggacctttcatcaagcctgccgaaaatgaatatgactgagatgcttaagtcggcttccagttcgggagccatcgatttgagtgaggttcaggacttctctatgccttctaagaaatccagtgtacatgctgctttaagttccgcttttccctcgatgggaaacaagagcaaattggacgacacgcttaataaattgatgaagaaaaacaattgcaccattgaagagcctgttattggtaaggagaaaaagaggaagaagttggacgagatcgttctcggcctatcggctgctaaagagcaaaagaccttccctgacccatctctgccatcatcaaagaaaccgcagatccctccaagcgtatcggtgacgccagcaaaccttcaatcctcgtccaaccagcagtcaaatcagaaaccctttactatcactgttaccacagtgcctggaaaatccaagagcggctcgtccaacagcggatccggcacaggaggaagctcgtcggccagcggcggaggagccggcggcagcggcttgagcgccctgcagaatatggcaatgggaggtctgtcatccaaagacagtctcaatgccctgttggcacagacaatggccaccgaccctcagacgttcctcaaacaacagcaaaagatgatgcagttcctgccccccgctcaacggaaggcttatgaaaacatgctagccgagatggaacaggccatgaagatcagttcaaagttttcaacaaactcaccacacgacgtcaaggtcaacaagtggctttcagacatgacaagtccactgggtgaccagctgagcattgattacgtaggaggaggcggggcaagtggttcgggaagtggcaatagtcggcgctcgaaccgccagcagggaaactcacaacaatcctcaagtgcagcccaattgcaaaagcaacagcaacaacagcagcagcagcagcaacaacaacagcaacactcgatgcccgggccacagaatttgacaggagaggagcccgtaccagtgatcaataaacagacaggcaaacgcttgggaggcaataaagcgccgcagctaaagagacttatgcaatggcttacggagaaccccaattacgaagtggatccaaagtggctggagcagatgcaaaatcccatgtcaacaccgtcaccaaggcccgcatcaatggagagcggctacggctcctcggcagtgaaatcacatggtggtcgtccattatctaatttgagtagcacctcatcatcgtcccacacccaacagcaatcatctgcagctcaatcgcaagcgggagggaactcaggcagctcaaagaaaaattcccgccaacaaactgcggcatcagctgcactggatcaagctgccttacaatttggctccttagcgggtctgaatcccagtctgttagcaaatcttcctggactgggcgcatttgatcccaagaatcctcttgctgcatttgatcccaaaaatccgttgctatccatgtcttttggaggaatgcccggaatgggtaatattcctggactaggtaacctgaacaacatgaacctatttgccagtttggcaggaatgggaggattgggtaatcttgcagggatggacactcagtcgctggctgcgctcatggctgctgccgggccaactcttggcggattaactggtgcatccggaggagcgggctccggcaagagccaggcgcagtcgcaatcatccgccacttcgtcatcctcttcggctagtaaaaagaagcagcagcaacagcaacaacaggcacaaaatgaagctgctcaattggcagctgctatcagcgcaagcactggaggatctggcgcatcagggggaaagaacgcagctgcttctgcatcacaattggcggccggatttccattcctatttccgaatccatcattgctgtatccgcccatgggactaggtggcctgaatccgtattcccttggatctagtggacttggttccgcatacgatcagttggctcagcagtataacctgctaaatggagctacttcatcggcctcaaatacgagctccacgcagtctaagtcgcatcagtcgcaatcaaaatccagtcagtccaggaataccacagcatctgccaactcagcagcaagtctgatgaatgctatggccagcatgggcggtggcgctagcacagttaccacgccttcaacttcagcatcaggatccggacgtggcaggcaatcaagcagcagaaatcagtcccaaaccacacccacagcagcagacatggctcaactcagtagtctacttatgccaggagcggatccgcatcttctcgagtccttgagccgtatgagcaacatggatttggcgcaggcaacacgtctgatgagctccctgggaatgccgcctctttcaggaacgccgagctcttctggtggaggtaacacatctacaagcaagagaagcagccaagccgcaaatgaagctaacgttcaggccaaggaacagcaaaagtggttagaaagtttagcccgaggagctctgccaactgatttagccgcgcttcaagctttctcgcaaggcaaaatgccatcaacatccggatcaaatacgggaacatccacttcctctagtaagagctcgaaagcagctgcgacagcagcggcagctcaattaccacaaattcctggcatgtccagcgatttcccacaggcctttttagctgaaatggctgcacaggcaatggcggctgcggggggatcccttcctcttagtggtccaggttcattagctagtttggctggcttaactggtggctctgctggaggtggtggttcttctgcctcaggaagcactagccactcttcttcgaaacggcagcgtgaacaggatgcctttaagcaacagatggactattataccaagaccttaggtctgggatcaggaatctcgttgatacccacatcctcggcgggaggatcatctgcatcctctagtgcagcaaacgcagcagcagctgcgtatgctgcagctttggacgcagagcaacagcatcaacaacagcagaaggcgctatccaaacgagcacgtggggatttacaccccacaaaggaggaattggccgcccttgcggcaggcttaccccttaatcttggtgccagcatgagtagcatagaaaagagtctaagaggcggaagcagttccagtagcagctctacaccagcgcccatgactgcggaacaggataaagttacattgactccccttaatgcctctggaggcggatcggggtcctcttccagttcagcagctgctgcgggactggcagctaatctgcccagtcaaactacaataaccatagctcctcccattagcagtggagccagcactagcagcgagcgttccgaacgctccgagtcgcgcatttcgctaaccataacaaatgcagcggatgccgcgaaactaccgccgccctacgaagaagccgatgagctaattatacagcccatactcaaaaagcctaccgctgccaatccaggcagtagtcatggcggaagcgtggacgatctggatacagctgaaaatacttcagctgctaatctgagtggctcatcctccagttctgcagctgctgcggctgcagcggcggctgaagagaatcgacgttcctccaatcgcttgaagcgtccgaggtctggtaacgaacaaggatctggttccgtggaaggacaaccgcctgagaagcgacgggagttgcgatccactcgtcatacacgctcttcggcagatgccagtacgcttaatctttcaactggaagcgaatcgggagcggaggaacggaacgaatgagtattgcgcagatccgagcgccagcgctagcagaatgacacggcccatactaagggccggagaaaatcgcgtagaggagaagccaatccggccaatacatgcaagtcaccggagcagaaaatcaacaacagaaagatgatgagaaaccagctgcagatgcggatgcaaacgagatcgaggcgaaatttaaatgctaggttaactgttaccactagatcccttaagcttaaagttgtgtaaagtataagaaccatatataatctatatatagagattaggagccaatttggagaaaacggatttgggtttgtctcaacgccataaagttcgacactgctgcaactccgtctgaactggagggcagagcgccttacccatgacttactcaagtttcatctgctgcttatatggtgcttgataagtcaatagtgtcccttcctctggctgcttaattatttatataattacgaacataattaaaaagcgcttataatttaattgtaacaagagaaacaaagtgctgttgcacgacgaggattttccgtttaaattattgctaaaacgtataattgataagcgacagaaaaatgtttaaacaaaacactatccatgcataaaatgtagagacacatatacttgggtttctggcgctgtcctggcacatgcagtctctatacatatataatacctgtacataattcataatcttaaaatgactcgtattgcttaactgtttttaatatagtaaggcaccatgtattctcctcaaactaaaccattttccacacttccatccccaatatgttgtatactgaactctctattctttatgtgtgtccccgaaagctgcgtgtaattttgatcattttaattctgtaattagtaaatgtgaaaggatggaatgctaatggcgcaaatcaatctttcaagcgtatattttaaactcttgtatttgtaattcgtatgttttattatacacttgtgtgtcccatgaaccaccgacaccaacatgcaagtcctggcgcgtaactaacaggtgggaagtgtttattgaaaaatagaattttttaattaaatcaattttgttgtaattgagaagcccgagaatatgaatcttgcacgcttgatgagcagcaatgcaatatttaggtcattttgtataattattcagctgagtaaatgaattatggacaaatttgatccgcactttatgagaacaatttattttgagacgttaacaaggcacacaaaaaaaaagcaaaacaaacaaccacatatattgcatacttaatttgtaagtattactcgtaattaaaattattatataactgcagaacaacaaacaaaagcaacatcaaccagaagaagcaacaacagcaagaaacacccaagcatcaactattgatattgatgataaataaatatat

SEQ ID NO: 7050 - protein, 2151 aa, DROSOPHILA
MEVIKPMDFSSFSAFCEHLNKSSQIAATTATTIPPTINNGKGIYLEKMERQGKMELAAKERESQRLQLIPKKWNRREEYEFLRVLTGYGVDLHVSTPMASSNGSSLSPDWTKFKQMAHLERKSDETLTDYYKVFVAMCKRQAGLKLSESERGLEGIIEEIEKEHAKLILDRLEVLAKLREVARNPMLEERLKLCTKNADTPDWWEPGRHDKELITAVLKHGLYRSETFIFNDPNFSFGESEKRFIRELEAQIQRTIKLEAFNAEKAEKLAAAEKDAATEKAAATEKAAAEKAASVKNEVIDLDDELMTNESVIKKESPVTPIKEEIKSEESPEKHDTADNLEDKNSDAEESTKIKGKEDFNPETTEKEALDESTNLNKDKSSTETLVPEIEDSKPSEDKMEVEELPVAENGEKEGSPEKCSDAEDKKFSEEKPSSPAVPDGKVSEMEADEAAPNTEENCSGDSESPEKECEDKVVEKVEEEKGENSYEKAEEQKEETEKLEKSSIESEPSEKSETVLEPEVAVPKKSTGDQDILDLVAGPSDPDDDEVMKEKEKAVEEECKKQAAELKARFPDLEVIQPATVKQQKLEKPKLEMCMIRWFKDFALERRIAHIVACVESGNWPVDSKYSAFATCKGATDLSIALHESIPHLSSLERRSTTPDVITITTDQGVTKHLQTSHMQQVASSASAASTSSGVPQVTQSKPSSSNSLPGLDAKSINAAVAAAVAAAAAGGNATSLSSLLPGMSLSAATGSSAGGVSGLSVPSAGSGVGKKRKRHIAIDVETERAKLHALLNSSTMAPKDWESEIANMEALSGSSGRGRGGNSSASSGMQPPPAHQHASLSRQSSGQFSKPAVPAMKTPPPSMGAPMDLSSSLPKMNMTEMLKSASSSGAIDLSEVQDFSMPSKKSSVHAALSSAFPSMGNKSKLDDTLNKLMKKNNCTIEEPVIGKEKKRKKLDEIVLGLSAAKEQKTFPDPSLPSSKKPQIPPSVSVTPANLQSSSNQQSNQKPFTITVTTVPGKSKSGSSNSGSGTGGSSSASGGGAGGSGLSALQNMAMGGLSSKDSLNALLAQTMATDPQTFLKQQQKMMQFLPPAQRKAYENMLAEMEQAMKISSKFSTNSPHDVKVNKWLSDMTSPLGDQLSIDYVGGGGASGSGSGNSRRSNRQQGNSQQSSSAAQLQKQQQQQQQQQQQQQQHSMPGPQNLTGEEPVPVINKQTGKRLGGNKAPQLKRLMQWLTENPNYEVDPKWLEQMQNPMSTPSPRPASMESGYGSSAVKSHGGRPLSNLSSTSSSSHTQQQSSAAQSQAGGNSGSSKKNSRQQTAASAALDQAALQFGSLAGLNPSLLANLPGLGAFDPKNPLAAFDPKNPLLSMSFGGMPGMGNIPGLGNLNNMNLFASLAGMGGLGNLAGMDTQSLAALMAAAGPTLGGLTGASGGAGSGKSQAQSQSSATSSSSSASKKKQQQQQQQAQNEAAQLAAAISASTGGSGASGGKNAAASASQLAAGFPFLFPNPSLLYPPMGLGGLNPYSLGSSGLGSAYDQLAQQYNLLNGATSSASNTSSTQSKSHQSQSKSSQSRNTTASANSAASLMNAMASMGGGASTVTTPSTSASGSGRGRQSSSRNQSQTTPTAADMAQLSSLLMPGADPHLLESLSRMSNMDLAQATRLMSSLGMPPLSGTPSSSGGGNTSTSKRSSQAANEANVQAKEQQKWLESLARGALPTDLAALQAFSQGKMPSTSGSNTGTSTSSSKSSKAAATAAAAQLPQIPGMSSDFPQAFLAEMAAQAMAAAGGSLPLSGPGSLASLAGLTGGSAGGGGSSASGSTSHSSSKRQREQDAFKQQMDYYTKTLGLGSGISLIPTSSAGGSSASSSAANAAAAAYAAALDAEQQHQQQQKALSKRARGDLHPTKEELAALAAGLPLNLGASMSSIEKSLRGGSSSSSSSTPAPMTAEQDKVTLTPLNASGGGSGSSSSSAAAAGLAANLPSQTTITIAPPISSGASTSSERSERSESRISLTITNAADAAKLPPPYEEADELIIQPILKKPTAANPGSSHGGSVDDLDTAENTSAANLSGSSSSSAAAAAAAAAEENRRSSNRLKRPRSGNEQGSGSVEGQPPEKRRELRSTRHTRSSADASTLNLSTGSESGAEERNE

SEQ ID NO: 7051 - DNA, 5010 bp, DROSOPHILA
agcgtctcgatctgaaaaaggcgctctacaagcagttggacgccgtcgtcggacccaacaccatcctctccagctccaccagcacttttctgccctccctcttcagcgcggatctgaaaaacaaggccaatgtgagttgaattcttgagattagtgagccatagtatatctccaccttgagctgattacttggtaaaaagaatagttaatcgtaatacatacaaacagcttattgttttaagaaacattcttagctgcaattgctttaatttaaagctgcgccgtccttgtgcccaatttgattcgcatttatttggatttcgatgtgatcgccgcaatgactaagcccaattacgcttgatttcgtgaacaggttttggtctcgcatcccgtcaacccaccgtactacgtgcctctggtcgagatcgtgcctgcgccgtggacgaaaccggaatgggtgaagaagacccgtgccctgatggaggagattggccagaaaccagttacgctgtcgcgggagatcgagggcttcgccctcaaccgcatccagtatgccatcctgaacgagacatggcgtttggtcgaggccggcatcctgaatgtcaaggacatcgatagcgtgatgagcaatggactgggaccgcgctacgccttcctgggtcccctggagacggcccatctgaatgccgagggcatggccaactatttcgaacgctactcgaacaccatctatgcggttagcgagacaatgggaccgacaccgaaaatggagggccccgtcgccgtcgaggtggccaagcagctgggcgagatggtgccgctggatcagttggcccaacgccgcaactaccgcgacaactgcctcacccagttgagcattctcaagaacaagctcaaccagtaaactcattattatcttgctgctgcgtttttttttttttgttttttcttcattgttgtgatatgctagcgccacatacgttaaatatacggaaattgcttaactgataatctctttttattgaattattcctcgctggtctttcaagacagctgcgaaaagcgaaattaatagggagtgtgctttgcaagctactagttctaggtattacatcaatggacaaatccttaaaacgtaggatacttgtggtcaaacggcttcacctgcctcttaaatgctatttttattctcttctgatatgcttggcttactattaaatctcttctttaatcaactccacttcagtggaatttcaaaaacatagggaaatgagaaagggatttcaagcactatgagttcgcaaggtaacttagtgggttagtgagtagttaacaaagataaattaactaattagttcgttcagttcgagtggaaattaaatataaagtactggctccactgctaatccgtttcgaaacgaaaactaatttgctaacgtttagtatggagtgcagactgcatatcagttcgctttatcttgtgacgtcggccaaaaaaaaaaaaaaggaaaaacaaatggaacaaacaaaaatatatgggggagatagccaagccgttttcacattgtcggtttatctgcaaggttaaaaacttgacctcagacatcacattcgaattcactttcaggcgacattgcgccaccgcccacgggccaaggaagtgctcccccattccccattcctacgcaatgcacgctctctatcctctagccggaaccgctcttcttgcagaagctcggccccctaatgctgggcgtcgaataggaggtatttgacagggatcccgatcctgcggtcatggccattggcttcagggatctgcgctgctgggtgcgcatttgtggcagtggtgtgctcgtgcaggatatgttttgggcgggtttggtcctcgatgagatgggcgtttcgggtacacgcggatggaacggattcaggtaggtggaatcgttgcttgcggtcactttcataatgggaaccaccggcttgatgggcttcgtcgccttaacacttccactgggtttggacaccgattcgtttatggctggattcctcaagcggctgctcattagagtacgcctgttctcgtaggcctttgtggacggattacttggcgtggagaaggagttgctcctctggcgaaaggcagctgctgcacccatcggcccaacagtggctgtgttcttggtctccttgggcggcggaagattctccacctggcgatcggacttcaggacttcccggggcagcttagacttgtcctgaatggaaagcgacgacgatcgacggcgcattgagcccgccgcattggtctcacgtagaggcattggcttagtcttggccacgttgctcgttgtgtatgctacctgagtgctgctgtagttgctggggttcaccaacagtatgactgtcctgggatcaagtccctgctgttgttcatgatcactgatccccgtgtttgcgagtttgtgccgctccagcagttcgttaatctgttgagcgagtgtttcgtcgaccaactccgtcataaatggctcctttttggctactgacacgggcggtatcgaaggtatcgatggtattgatggtattgatggtagagatgaaagcaagtccttatcaaatgcatctagtcgcgattcgccatcaaacgtggctgttgaacagaccatggcatcgggaaagctttgaacgttactgcctggtacatcgatctcctcctcctgtatgtggttagcatccagggaacgctttgtctttgtgccctgaatttgagaattacaaaattgtattaggggttttttttttgctattttttttagtaagttataagacaatcaagcgatatgatatttgcagtgaaaatgaatagattgtttatatcacagaaattaaaatgaaatctatgcctttacaaataagggctatattgtaatgtaactacttacttgaagttcgagatcgaatgttccttggcgggtgtatgagtatagcgatggtatagttgattcggctttcctatcatccggacaagagccactgggtccgaagatgaccgcggcaatggattcaattgccgagtcaaacaaatgccacttcgacctctcgacgtgttcgtgtgccaagatcttcagctgttccaggagctggctcaaactcttgccatttgatcggttttcgattgttgtctgtggacttttctgaccctcctgaatcacgacatcaattttgtttacgtttccgtgattgtcttcggctattgccttggattctgcattgtttagcgcgtctaggatcggaatgcgtagcattttgaggtcttcctcgaaattgatactggtggacaggacgtcgtcgtcctcaataagcttcagtggtgactctgccgctagcatctgcaggttttcgttcagtattgttctttcaaactctgttttggatcgactatggggtggggtgttgatcacggatcgcgaggcattaagtttgaggagctgcttctggaatgagctgttcgagcgcttcttttgggttgtttcacctgatcctggtgcggacgcattcgctgtgtccgtctgcatgcaaaccggaggactctcgctctcaagatccggatactgtcgttcggcactggacaccttttccttgatctgcgacgtcaaggtcatgccctgaaatttggcacaattgagtttttagtgagctgtacgaatatgaatacaactggtagaccctttttgcagccaattgggtatcccagtggcatgcaacctaaccttaccttgatgcaagcttccttctccatcagatcgaagggatcgtagggcacctcaaagttcgtggccaccacagagtcctccggctcttcgtgcaacgcctccttgctgggctcatcccattcggtcaggtcaattagatttcggacatcacacatcttcgcatgaacacaaatatcaacaatttcaggatagaaactaatacaaaaaaacttcgaaacaacgccgtgtttggcgctactacgactgtatgggtaaaaagttatcgatatacatatgttacctgagccacggttttcacctgcagcttttatagtcagttcacacaggttcagtgtcgataacgatagcaacttttttacgtgatttaattattgctaaagtattttatatttttataaaatttttattatttataaaaaatccattttataaattttttaagttatgaaaataaaacaataagactatttggtacatacattttgtatccattaccggataatttaaatcataaaaataaagacatttattacgcaaaaaaaggaacatatttaaataattgtgttttaaaatcagatttataaaagatttaacgtacgacattcaaagccgaaataaatttcttgttttttgcgcaaaacaagcgactgagactttttccgagaaaaaatgttaaaattttaaatgttaaaatcttaaaaaatatttcttttaggaatgttaggacgcacctttcacactatttaattatatattcagcgcttttgatgattttgacaacccctttttagtgtaaactccatttcgacccatttgaataaatgaatttgacgtttgtttaaagattgtattttaatttacaattgtttccatatatccacatatatatttctaacaaaattgtataatttcgtgttctatataaacgcacagatgaactttttgctattatggtgctaacacatatgcaataaatatttttgagtaataatatgtacaaattgatacaacagaggagacttaaatgaattgggaaaaggaaaagtgcttaggaaatcgcagaagacgtctcatcgtccttcgcctgggattctgcaggtaccgcagcgtactcctggacattggtcgtgacgctcgtgtagcaggatccacatagcctaactgggttaaaaagcttttcgtttggcaacggcgcccaaaactccgagcagtcagcacaaaaaatttctccaca

SEQ ID NO: 7052 - DNA, 2717 bp, DROSOPHILA
cgccaaacacggcgttgtttcgaagtttttttgtattagtttctatcctgaaattgttgatatttgtgttcatgcgaagatgtgtgatgtccgaaatctaattgacctgaccgaatgggatgagcccagcaaggaggcgttgcacgaagagccggaggactctgtggtggccacgaactttgaggtgccctacgatcccttcgatctgatggagaaggaagcttgcatcaagggcatgaccttgacgtcgcagatcaaggaaaaggtgtccagtgccgaacgacagtatccggatcttgagagcgagagtcctccggtttgcatgcagacggacacagcgaatgcgtccgcaccaggatcaggtgaaacaacccaaaagaagcgctcgaacagctcattccagaagcagctcctcaaacttaatgcctcgcgatccgtgatcaacaccccaccccatagtcgatccaaaacagagtttgaaagaacaatactgaacgaaaacctgcagatgctagcggcagagtcaccactgaagcttattgaggacgacgacgtcctgtccaccagtatcaatttcgaggaagacctcaaaatgctacgcattccgatcctagacgcgctaaacaatgcagaatccaaggcaatagccgaagacaatcacggaaacgtaaacaaaattgatgtcgtgattcaggagggtcagaaaagtccacagacaacaatcgaaaaccgatcaaatggcaagagtttgagccagctcctggaacagctgaagatcttggcacacgaacacgtcgagaggtcgaagtggcatttgtttgactcggcaattgaatccattgccgcggtcatcttcggacccagtggctcttgtccggatgataggaaagccgaatcaactataccatcgctatactcatacacccgccaaggaacattcgatctcgaacttcaaggcacaaagacaaagcgttccctggatgctaaccacatacaggaggaggagatcgatgtaccaggcagtaacgttcaaagctttcccgatgccatggtctgttcaacagccacgtttgatggcgaatcgcgactagatgcatttgataaggacttgctttcatctctaccatcaataccatcaataccatcgataccttcgataccgcccgtgtcagtagccaaaaaggagccatttatgacggagttggtcgacgaaacactcgctcaacagattaacgaactgctggagcggcacaaactcgcaaacacggggatcagtgatcatgaacaacagcagggacttgatcccaggacagtcatactgttggtgaaccccagcaactacagcagcactcaggtagcatacacaacgagcaacgtggccaagactaagccaatgcctctacgtgagaccaatgcggcgggctcaatgcgccgtcgatcgtcgtcgctttccattcaggacaagtctaagctgccccgggaagtcctgaagtccgatcgccaggtggagaatcttccgccgcccaaggagaccaagaacacagccactgttgggccgatgggtgcagcagctgcctttcgccagaggagcaactccttctccacgccaagtaatccgtccacaaaggcctacgagaacaggcgtactctaatgagcagccgcttgaggaatccagccataaacgaatcggtgtccaaacccagtggaagtgttaaggcgacgaagcccatcaagccggtggttcccattatgaaagtgaccgcaagcaacgattccacctacctgaatccgttccatccgcgtgtacccgaaacgcccatctcatcgaggaccaaacccgcccaaaacatatcctgcacgagcacaccactgccacaaatgcgcacccagcagcgcagatccctgaagccaatggccatgaccgcaggatcgggatccctgtcaaatacctcctattcgacgcccagcattagggggccgagcttctgcaagaagagcggttccggctagaggatagagagcgtgcattgcgtaggaatggggaatgggggagcacttccttggcccgtgggcggtggcgcaatgtcgcctgaaagtgaattcgaatgtgatgtctgaggtcaagtttttaaccttgcagataaaccgacaatgtgaaaacggcttggctatctcccccatatatttttgtttgttccatttgtttttccttttttttttttttggccgacgtcacaagataaagcgaactgatatgcagtctgcactccatactaaacgttagcaaattagttttcgtttcgaaacggattagcagtggagccagtactttatatttaatttccactcgaactgaacgaactaattagttaatttatctttgttaactactcactaacccactaagttaccttgcgaactcatagtgcttgaaatccctttctcatttccctatgtttttgaaattccactgaagtggagttgattaaagaagagatttaatagtaagccaagcatatcagaagagaataaaaatagcatttaagaggcaggtgaagccgtttgaccacaagtatcctacgttttaaggatttgtccattgatgtaatacctagaactagtagcttgcaaagcacactccctattaatttcgcttttcgcagctgtcttgaaagaccagcgaggaataattcaataaaaagagattatcagttaa

SEQ ID NO: 7053 - protein, 643 aa, DROSOPHILA
MCDVRNLIDLTEWDEPSKEALHEEPEDSVVATNFEVPYDPFDLMEKEACIKGMTLTSQIKEKVSSAERQYPDLESESPPVCMQTDTANASAPGSGETTQKKRSNSSFQKQLLKLNASRSVINTPPHSRSKTEFERTILNENLQMLAAESPLKLIEDDDVLSTSINFEEDLKMLRIPILDALNNAESKAIAEDNHGNVNKIDVVIQEGQKSPQTTIENRSNGKSLSQLLEQLKILAHEHVERSKWHLFDSAIESIAAVIFGPSGSCPDDRKAESTIPSLYSYTRQGTFDLELQGTKTKRSLDANHIQEEEIDVPGSNVQSFPDAMVCSTATFDGESRLDAFDKDLLSSLPSIPSIPSIPSIPPVSVAKKEPFMTELVDETLAQQINELLERHKLANTGISDHEQQQGLDPRTVILLVNPSNYSSTQVAYTTSNVAKTKPMPLRETNAAGSMRRRSSSLSIQDKSKLPREVLKSDRQVENLPPPKETKNTATVGPMGAAAAFRQRSNSFSTPSNPSTKAYENRRTLMSSRLRNPAINESVSKPSGSVKATKPIKPVVPIMKVTASNDSTYLNPFHPRVPETPISSRTKPAQNISCTSTPLPQMRTQQRRSLKPMAMTAGSGSLSNTSYSTPSIRGPSFCKKSGSG

SEQ ID NO: 7054 - DNA, 4419 bp, DROSOPHILA
caaggtgatggtcttgccggtgagggttttcacgaagatctgcataatggcggcgtcactgaaagcaatataaaacataaatcagtaccaaatcgtacgatttcttagcgaacttgtgcgtcccaaagagcgggcaaagattggaggttaggtccgacttgctggcatgtttcgttcgacagaaacagctccaccggtcgacaagcaccagtgtccatctttttcatatcacaaatacgtcactaaacaacaatatgtttacattctgccacgttattgcgatttttcgtttatttttaatatatttaatggaaactcaccagaggaaacgtgcaaccaaatgctattcaaaagaaaaagggaaaagagagtgtggccgccgccgagcactgcaaatataccaaaatactattttttaaataccaaaacattctaaatggaactgtaaaaaatattcagacactcaaattaattaatgcaaaatatctttaccatttgaaccgagaccaactttacaatatcaacatatagtttttcgtgtttttttatagcccaacgctacctcactgatagctaagctaattcaaaattatattattatggcatgaaaatgctatttgcattgtatacaaataaattgaaatcaaaacttgtatatagaattatattttagataaggttcaaatattacatattacgcatatttttttttattgaaaaaccgcctaatcgatttaaattatatttttaatgaatttatgaaatattttttcagatattaaaccttttgaatttatacaaaaatattcaagttgctgtccattttactaagaacaataattgaatactaggttgtataagtataagtaagtaagtaagtataagtaagtaagggatatacatttaagccaacgatattctaaaaatgtgtattgctaaatatgtcacatataataaataaatttgtatttgacttagtgaaaaaagtatgtctttatagtgagaacaccgtgcttttccattctgcgtcaaatcgatagattctgaaaaatacccctttcgatatcgaagttctaatggctcgataggtcctcaacacttacctatcgatgacagtagcacaagttgtgcggaaaacgggaaactaagggaaaagcgtggaaaacccttgagaacagagcatgtcgaaagcaggcgaagatcagcccgcagcagagggtgcggtaagtatctgagaaacttaaacctttctcaaccccaatcacctgacaatagcgacctggttctcatcgttttttctaggtgattgcgggcaatggtaacgctgagctggcccaaaatgaaggccagaatgagcaacaacaacccccgccgaatcagcccacccgcatggagtccttctttgcgatgaccaagtccctcatcctgcgtgccctgatcatctactttgtgagctcctttttccgacgacctgcgcccgatgccgccagtcaaggcaaaagtgtcgctaatgcgggtcccaagatcacggcctggaattacttcgagaacggcacggactttgacctgcacgtgtggttgtcggagaatcccgatgtggttaacttccagcaaaaggcgaatctcctctggctacagaaggacctcacctatggcgattggacgtcgggcgtcaacggagatggcatttacacgcacagtttgaagcttaagaccagccagcatctgatgaacaatggcagtgtgtacctacatgcctttgtcacgcgtaccggcatgagtcccgatcccaaagccccgaattacgccaccaaaatgggccaccagcaacatcagctgaacaagttcaagaagttgcgtgtgaaccgcaactacaacttgctggccagcgagaaggagaagttggagcacgagctcaagcatgcgaatctcaaggataccatcgtgtctcactggcatcctaatctcacggtcaatctcgtagtggaccaaactaactgggccgagggatctgtgccgccgccactggatgactacgtaaagttcgtagacggcggtaagacctatctgcccatcctgttcgtcaacgactactggaatcttcagcgggagtatcaacccattaatgagaccactcccgaactggagctgcacctcactttccagccgctgggcatgttcaagtggcagctgtatgccgccaaacagatgaagaacaagtgggctggcaatatgctcggtgagctgatggccgccagccagccggaggagagtgacgaggatcaggactcgctgaaggagactctgctggacaccaatatctacctgctgggcatcacagtggccgtttccatactgcattcggtgttcgaactgctggccttcaagaacgacattcagttctggaacaatcgcaagtcgctcgaaggactgtctgtacgatcggtgttcttcggtgtcttccagtcactaatcatcctgctgtacgtgctggacaacgagaccaacttcatgattcgcatctcctgtttcgtgggactgggaatcgaggtgtggaagattcacaaggtcgtggatatcaactacgatcacgatcaaaagattctgggagtgctgccgagaatcagtttccaggacaagggctcctattcggagagctcgaccaaagactatgacaaactggccttcaagtacctgggctgggcatgcttcccgctcctggtggcctactttgtctactcgttgatctacaacgagcacaagggctggtactcatttgtgctcaacatgctgtacggctatctgctgacctttggcttcatcctgatgacgccgcagctattcatcaactacaagctaaagtcggtggcccacatgccgtggcgcatgatgacctacaagttcctcaacacctttatcgatgacatctttgcgtttgtgatcaaaatgcccacaatgtaccggttgggttgcttccgcgacgacatcatcttctttgtgttcctctaccagcgctggcagtatcgcgtcgatttgaagcgcgtgaatgagttcggcttctccggggagatggagcagcagcatgccgcccagaagctggagggcaagacagccaatggagccatcgaaggtccccaggctgcgccagcgatcaaaaagacagctgcacaaaagaagcaggattagaaggagtgcagagctgtgaccacagtatgcattagcattagaagacgcaataccatatactccactcccccaatatgtatgtaatcactatccagtatacatagtcaagtaatcccgatagaatcattcttagggctaattgtatgtacgtatgtttgtgtttttgttttcccctgccctccgcgcttctcgcagcgttggaagatctaataaattaagcgtgagatgatccatatgccactgctattatctaatctgcagcccgctgagtgggctagacaaatgggtagataagcttgcttatcagggcgcttgaaaatatgtacatatatactggccagatggcccagataattatcacctcattttggaaagatacaaggtttctaaatcaatggatagtggcaactaaattaacttatatatcggtttatcaatcgattttttaatttatattttctaaagcaacttgagtcccattgatggttttttcttgtcaaatgaacttcactcataattttctaaaataattaaatacaattgaatttaggtacaggtacgcaaagcgggtacatataagttttcacattatacagcactacccattggcaatttacagcactgaaaatggagcgcgccaaatttgaactgaactcaaaaataattcgttacaaacctaatatttagaaagcactaaatccaagaaaaatcttttttacatgaggaatttttgaacaagactgaaaattaagattattaagatgtaagaactaaagcatttattaagataaagtgattgagactggttctgtgaagtttaaactttttggaagtgagcactgcatagaatcacacccacgacaagcgacattggcatccactggcatcgaaagagccacaagaagccgcagttattgtgttgcgtcgtaggctcagctatttttattgctttgcctttgtggctctcggcctccaattgccaaagacagagccaccaaaccagagccaggacttggagctcggggagcatcgagcatggcgttgggagctgggctttgcgtgtttttgtaatatttctcaaaagataagaatgcgaccggaccgggctgctgccgaggtttctgctggcatttaggcagcgaccacgaccaagacgacattcataaagaaataaaatcggacaaaactcttgttatgctctttttactgcactaagtgacagttttacgaggc

SEQ ID NO: 7055 - DNA, 2277 bp, DROSOPHILA
tgagaacaccgtgcttttccattctgcgtcaaatcgatagattctgaaaaatacccctttcgatatcgaagttctaatggctcgataggtcctcaacacttacctatcgatgacagtagcacaagttgtgcggaaaacgggaaactaagggaaaagcgtggaaaacccttgagaacagagcatgtcgaaagcaggcgaagatcagcccgcagcagagggtgcggtgattgcgggcaatggtaacgctgagctggcccaaaatgaaggccagaatgagcaacaacaacccccgccgaatcagcccacccgcatggagtccttctttgcgatgaccaagtccctcatcctgcgtgccctgatcatctactttgtgagctcctttttccgacgacctgcgcccgatgccgccagtcaaggcaaaagtgtcgctaatgcgggtcccaagatcacggcctggaattacttcgagaacggcacggactttgacctgcacgtgtggttgtcggagaatcccgatgtggttaacttccagcaaaaggcgaatctcctctggctacagaaggacctcacctatggcgattggacgtcgggcgtcaacggagatggcatttacacgcacagtttgaagcttaagaccagccagcatctgatgaacaatggcagtgtgtacctacatgcctttgtcacgcgtaccggcatgagtcccgatcccaaagccccgaattacgccaccaaaatgggccaccagcaacatcagctgaacaagttcaagaagttgcgtgtgaaccgcaactacaacttgctggccagcgagaaggagaagttggagcacgagctcaagcatgcgaatctcaaggataccatcgtgtctcactggcatcctaatctcacggtcaatctcttcgtagacggcggtaagacctatctgcccatcctgttcgtcaacgactactggaatcttcagcgggagtatcaacccattaatgagaccactcccgaactggagctgcacctcactttccagccgctgggcatgttcaagtggcagctgtatgccgccaaacagatgaagaacaagtgggctggcaatatgctcggtgagctgatggccgccagccagccggaggagagtgacgaggatcaggactcgctgaaggagactctgctggacaccaatatctacctgctgggcatcacagtggccgtttccatactgcattcggtgttcgaactgctggccttcaagaacgacattcagttctggaacaatcgcaagtcgctcgaaggactgtctgtacgatcggtgttcttcggtgtcttccagtcactaatcatcctgctgtacgtgctggacaacgagaccaacttcatgattcgcatctcctgtttcgtgggactgggaatcgaggtgtggaagattcacaaggtcgtggatatcaactacgatcacgatcaaaagattctgggagtgctgccgagaatcagtttccaggacaagggctcctattcggagagctcgaccaaagactatgacaaactggccttcaagtacctgggctgggcatgcttcccgctcctggtggcctactttgtctactcgttgatctacaacgagcacaagggctggtactcatttgtgctcaacatgctgtacggctatctgctgacctttggcttcatcctgatgacgccgcagctattcatcaactacaagctaaagtcggtggcccacatgccgtggcgcatgatgacctacaagttcctcaacacctttatcgatgacatctttgcgtttgtgatcaaaatgcccacaatgtaccggttgggttgcttccgcgacgacatcatcttctttgtgttcctctaccagcgctggcagtatcgcgtcgatttgaagcgcgtgaatgagttcggcttctccggggagatggagcagcagcatgccgcccagaagctggagggcaagacagccaatggagccatcgaaggtccccaggctgcgccagcgatcaaaaagacagctgcacaaaagaagcaggattagaaggagtgcagagctgtgaccacagtatgcattagcattagaagacgcaataccatatactccactcccccaatatgtatgtaatcactatccagtatacatagtcaagtaatcccgatagaatcattcttagggctaattgtatgtacgtatgtttgtgtttttgttttcccctgccctccgcgcttctcgcagcgttggaagatctaataaattaagcgtgagatgatcca

SEQ ID NO: 7056 - protein, 620 aa, DROSOPHILA
MSKAGEDQPAAEGAVIAGNGNAELAQNEGQNEQQQPPPNQPTRMESFFAMTKSLILRALIIYFVSSFFRRPAPDAASQGKSVANAGPKITAWNYFENGTDFDLHVWLSENPDVVNFQQKANLLWLQKDLTYGDWTSGVNGDGIYTHSLKLKTSQHLMNNGSVYLHAFVTRTGMSPDPKAPNYATKMGHQQHQLNKFKKLRVNRNYNLLASEKEKLEHELKHANLKDTIVSHWHPNLTVNLFVDGGKTYLPILFVNDYWNLQREYQPINETTPELELHLTFQPLGMFKWQLYAAKQMKNKWAGNMLGELMAASQPEESDEDQDSLKETLLDTNIYLLGITVAVSILHSVFELLAFKNDIQFWNNRKSLEGLSVRSVFFGVFQSLIILLYVLDNETNFMIRISCFVGLGIEVWKIHKVVDINYDHDQKILGVLPRISFQDKGSYSESSTKDYDKLAFKYLGWACFPLLVAYFVYSLIYNEHKGWYSFVLNMLYGYLLTFGFILMTPQLFINYKLKSVAHMPWRMMTYKFLNTFIDDIFAFVIKMPTMYRLGCFRDDIIFFVFLYQRWQYRVDLKRVNEFGFSGEMEQQHAAQKLEGKTANGAIEGPQAAPAIKKTAAQKKQD

SEQ ID NO: 7057 - DNA, 2630 bp, DROSOPHILA
cggcgtctgcttgccgtccgattccgcatttacatcggcgccaaactgcagcagcaaatgggcgcaatccgcattgttccacttgcaggcggagtgcaatggcgtccatcccagctccgtgcgggcgttgggattggcatggtactgcagcagcaacttggccatatccacaaagttattataggcagctcggtgcagcggcgtgtatccgtcgttatccttggcgttcacggtgtctgcgtccagttttaggatttcccgcacctcgctgatgcggttctcgttcaccgcccacagaatcatgcgttcaatgctgcctatgatgatgtttaattaaactatttctctaaaatgtattctacttactttgtgggttcttgtcctcttcgatcagttcgtcggcatcgtcgtcccagccgctcacgaacattccgcgcggcactttggcgtggcgcagcttctccacctgtgatttttcatcatcggaatcgtagtcccccattttgtggtaatatattaataataagccggaatttaaacagctcaactttttgttttctatttctcaaagtgaccgttgcttagccgcttaagtacacttaaaaaaatactaaacacttaaaaatatactaaacgaagagtggagttttaaaaagaacagtacatttggtttttcaaataaaaaaaaaaaaactatttatataaataatggtaggaattataaaaaaattattcttttatttgaaaagtctgccatttaaaaaaaggctgtattatttataatattcatcaaaatcaaattaatcaaagattattaagccattaaatttgtgttgaatacataaatgatatacatcattttatatcatcatttatatattttatttttagctatatatgctttatatagttcatttcaatcaattaatgatttcatttatttacaaaaacaataatttttcgattacatttttctgttagcagtaaacggccactctagcacactatactagtaaatccgagaaaaacatctgcttccaagtttgtttgtttgtttgttccttgaaaccaggacgccatgtcgaatccgcaggaagaactactgccgcccagcgccgaggacgacgagctgaccctgccacgggccagcatcaacaagatcatcaaggagctggtgcccacggtgcgggtggccaacgagagtcgcgagctgatactcaactgctgctcagagttcattcatctgatcagttcggaggccaacgaggtgtgcaacatgcgcaacaagaagacgataaacgcagagcacgtcctggaggcgttggaacgcttgggttttcacgactacaaacaagaggcggaggccgttctgcacgactgcaaggaggtggcagccaagcgaaggcgccagagcacgcgcctagagaacctgggcattccggaggaggagctgctgcgccagcagcaggagctgttcgccaaggcacgcgaggagcaggcgcgcgaggagcagcagcagtggatgagcatgcaagcggcagcaatggtgcagcgaccaccgctggcagacggctccgttgccagcaagccaagtgaggatgacgatgacgatgacgacgacgactactagtaggaaatagtctttctatgagcttagtgtagatttaatcttaaaatatatgccataagttgaactttcaactattagctactcttcattacggatcatccgtttgtccttcactccagcagcctgggcaccgcatcctcaatctccgaaacgacttccttagatgtatcgtaactttaatctttaaaaatgcaagactattcgttattatatcagctggtaccagccagattttgtggctcctccgcctcattgtcatccttgccatttatttgcatctccaccaatcggggaaaagtttgtggtgcgtcgtatgtgcctggcacatattttcccaatatttcggtgtgttccttccagaactgcgaagatatcagatcctcgtgcagcggcaccacggcctgcctgctcttctcacccaatatcacgcgttttctcagcagaatcgttccctttctgtacattgccggcagattgttgtaatttatcccgaattcctggaagagcagctcatttttgtccgccgaaaaggtgccacggagtttcgcctcggcttgctggttcgtcaggcctttttccaaaacgagtttccaaaaggcggtattgtacaggttgttcacatgcacatcggcctgtcgccagctgagatagtcctttagattctgctccgaaggatacagaacaacgcgaccatcgaaacacggagcataggccaatggcagattcatccacttggaccattgcattacatagctcgaggagaacaagctggtgacgtaggtgagcagtttggcggatcgtcgcttgaacgctgccgtctctttgcgaaaaacaaaggagtactcatcactttgaccgtaggcgaggacaatatcccgaaactcctgcatcaccgccgtggcagcagcattcatcacattgagagctaaagcgaatatttaatgggattattaagaactataatgagtgttttttcttaccattttcatcgttgggcttt

SEQ ID NO: 7058 - DNA, 630 bp, DROSOPHILA
cacactatactagtaaatccgagaaaaacatctgcttccaagtttgtttgtttgtttgttccttgaaaccaggacgccatgtcgaatccgcaggaagaactactgccgcccagcgccgaggacgacgagctgaccctgccacgggccagcatcaacaagatcatcaaggagctggtgcccacggtgcgggtggccaacgagagtcgcgagctgatactcaactgctgctcagagttcattcatctgatcagttcggaggccaacgaggtgtgcaacatgcgcaacaagaagacgataaacgcagagcacgtcctggaggcgttggaacgcttgggttttcacgactacaaacaagaggcggaggccgttctgcacgactgcaaggaggtggcagccaagcgaaggcgccagagcacgcgcctagagaacctgggcattccggaggaggagctgctgcgccagcagcaggagctgttcgccaaggcacgcgaggagcaggcgcgcgaggagcagcagcagtggatgagcatgcaagcggcagcaatggtgcagcgaccaccgctggcagacggctccgttgccagcaagccaagtgaggatgacgatgacgatgacgacgacgactactag

SEQ ID NO: 7059 - protein, 183 aa, DROSOPHILA
MSNPQEELLPPSAEDDELTLPRASINKIIKELVPTVRVANESRELILNCCSEFIHLISSEANEVCNMRNKKTINAEHVLEALERLGFHDYKQEAEAVLHDCKEVAAKRRRQSTRLENLGIPEEELLRQQQELFAKAREEQAREEQQQWMSMQAAAMVQRPPLADGSVASKPSEDDDDDDDDDY

SEQ ID NO: 7060 - DNA, 2899 bp, DROSOPHILA
ccgagtaataaaaaaaagtatattattccttaaatcacctaaaaacaacgcgatgcccgtttttttttttttttttttttgttacctacggagaatttggccttgcaacgatccgatgatctgcaggagcaccagaacgattattgtatctttcattttgatatatttgtgccactagtattccatgttgacttccagtgccttcacccgacgacttcgatttgaaaccataggtggaacaacaactagaacttagttgtgcgcttaagtgcaaccggttttgttgaaagctctacttgtcatatttgcattttcaacttgagatattttcaattattcaatgaaaaaaatattttttgtatttaatgatttacgagctattttacagtttcaatccagttgcagtctcttgaaaatcgaaaatttccaaaatgtatattacaaatctagctgaaacctttcaataatctgtaagctttttatttatttcttactggagaaaaggttcatattcaatccaaaaaccatcgatttcccaaacagaacatcctcacttcgagtttcaaagtgaatgtaattcaaaaagctttcgaaatcccgaaatcatgtatgaaatctagacagattgagatttgttatgatttttattaaataccttctcatcgctttgcagttgagaatgaaaattagtggaggaatcagatccaagaacaattgcacaatttctaaacttgtattgccactcattcaattggctaataaactaacaatttataacaagtatgactcttatattacaattgcagttttcaaaggccaacaaacctggcaggaatgcgcataaatcgagaaccagttttcatatcatatacaatacatttgtcccctcaaactgatcacatacggagtataataaggtactcttagcacaacatttacgaatatcctactttatttttactagcaaatacgtttaagtcatcagtactgaaacttaagattactttgggtcttcagcggctaggaacagatcatcatagggtactttttcgaataaatcctcaaatagacttaaaaagacggtttcgaacaaacgcagaatacccggctccagttcgttccagaactccacccaattccggttgaacagattgttaactgcaatcgttaggtcttcattgtcgggaaagaagttgtctagccacataatccagctagaattagaaagaaaatattatagggtaatacaataagaatgagtatatttatatctagtaggctcaccggtccagccttatattaggaactagctcgtagatctttaaatatctcttgttgtttctgtactcgacgcgcactttcagcgtaagaacgaattgaaaattgaggaaatccgactccgacgttccctgagagtggatatcgacgaaccagagcatccgtcccttggccacatagtcgcccttgtaaaccagccggggaatcttgccgtgaatttcgatcttggtggtggtgggatccttgtcgaatcccctgatctccgtgatcgtggtgttctcgaagccatagttgatctgattgatcagattgaagtagtaccaggcacctcccacctgggaatcgttgaccagcagccaatcccgcacggacagcacattgaagggtttcagatcgacctcgggaatgccctttggaaaatctctcagcagtgcatttgccgactctaccaggcactttccgtcaccgaagtggcattttttcaccttggcagctgtggagaagatggtcttgtttagccggttcaatcaaggacatttgattcaaaaacccacgcaacttctggcactgcagtccaccgaacagctgaattgttataatcacgtaggccaggaaatgcatctgacagcgaaataaactcgaatactccacaagtaacgcttaagcactcagtagaccgatacactagcatagccgatgccaactactcggtgattaaatcggatttgttgtagtggcggaatatcataaggaaatctaagcagcgcccattatcataacgtgttcccaaacagcccatatagctatacactgactgaaaaaattaattactttaaaagtgtacagtttgtaatatactaaagtggatgtacaaatattctactcagtgtttaaatacatttaattaattgctctaatttgcacccgtttcgatctcaccgcttagaacgagatctcaactgaaaagcttccgattcctaagctttcaccacacctgagcaagattttcaatcgatcgcatttgcaacagatttcaagaaacattcagttttacaattacgaaatccggttcgagatggatccaatactcctcaaaattgttactaatacgttcgttaacgatcacggaaagatcactgttcttcattatgctgaatgcaactgaaaaccaaataaatacctataaaactgtgctgtgtaacaagaaaagattacttatatgccgatctatgataatacgaggactaagcatatcctttgttgtcgacgttaagaaaaaacttagcagcaaacccaacgtttttttatatcaagccgaaaaattaagatatggatctggatgtggtcatagtgatgttcccaataccatagaacctttgctcactcacattctaaggcaaggtgacgattccattgctaaagtgtatagccgtccagtggtttcctatagatccccgctttcctcacctttcaatcccagtagctgttgaaaatgtaaattcgttggatcacgtttacaagttctgtaaagtcttacgtaattcatcggcttaagctaggaaatccactattgcgagttatgccaagctgaattgcatttttttcaatggcaaatcttaaa

SEQ ID NO: 7061 - DNA, 768 bp, DROSOPHILA
atgcatttcctggcctacgtgattataacaattcagctgttcggtggactgcagtgccagaagttgcctgccaaggtgaaaaaatgccacttcggtgacggaaagtgcctggtagagtcggcaaatgcactgctgagagattttccaaagggcattcccgaggtcgatctgaaacccttcaatgtgctgtccgtgcgggattggctgctggtcaacgattcccaggtgggaggtgcctggtactacttcaatctgatcaatcagatcaactatggcttcgagaacaccacgatcacggagatcaggggattcgacaaggatcccaccaccaccaagatcgaaattcacggcaagattccccggctggtttacaagggcgactatgtggccaagggacggatgctctggttcgtcgatatccactctcagggaacgtcggagtcggatttcctcaattttcaattcgttcttacgctgaaagtgcgcgtcgagtacagaaacaacaagagatatttaaagatctacgagctagttcctaatataaggctggaccgctggattatgtggctagacaacttctttcccgacaatgaagacctaacgattgcagttaacaatctgttcaaccggaattgggtggagttctggaacgaactggagccgggtattctgcgtttgttcgaaaccgtctttttaagtctatttgaggatttattcgaaaaagtaccctatgatgatctgttcctagccgctgaagacccaaagtaa

SEQ ID NO: 7062 - protein, 255 aa, DROSOPHILA
MHFLAYVIITIQLFGGLQCQKLPAKVKKCHFGDGKCLVESANALLRDFPKGIPEVDLKPFNVLSVRDWLLVNDSQVGGAWYYFNLINQINYGFENTTITEIRGFDKDPTTTKIEIHGKIPRLVYKGDYVAKGRMLWFVDIHSQGTSESDFLNFQFVLTLKVRVEYRNNKRYLKIYELVPNIRLDRWIMWLDNFFPDNEDLTIAVNNLFNRNWVEFWNELEPGILRLFETVFLSLFEDLFEKVPYDDLFLAAEDPK

SEQ ID NO: 7063 - DNA, 10860 bp, DROSOPHILA
atgcgctgtgatctcgaagacggaatgccttacgttatctggatactttcaagcattgctgataagggagaggggtgaaatccgacgaaccactcacctggcgacgtatcagctccagattctgttggccctcggccatttggcgatcgatctccgcgaagtccctggtgctcctgttggcgcggaatgtgtcgcgtatttttcgggcagcgtacattctgaaatccggaatagattgctcatcactcgcggcggcctttcaatttcacaacacctacctgaagttgtacgagggcagcttctccgattcgcgcaggagattcctgtataacgtgatcgcctggcgacgggtcgacatcctggtcttgatcctggccgaatggaactgaatggcgggcgggctggtggattaaagtgctgtttaattgatgagtgctttgttttgaccctggtttcttgtttcggtgcggcaactgccaattgaccgcctgatgacataaaaattacatgcggaaagccggaaaatactgacttttccgctgcaaaataccagaaacagctgactgcattcactgtggtgtcacgtgcgtgagtcttagagatgacactgcgtcgtgcggaaatcatcgcaactgaataaaaaaactatttttgtgatactaaatattattgcaaaaagtaagaaataaattgagttcatagtgcagaaaaataatttattaagaatccgaaatatttagaggtaaatattaaaataaaaaccaaattaacctgctcccattatacaaaataagacaactgccgcattttttcaattttagttttaattctgtttgttttttccgcaagaacaatatattatgtactcgttgaaaacacaaaataaatatatatattttgttcccgaaattgtttctttcttgcacgcgcgcttgctttttaaatctgacttttgtagcctaaaaatgacatttttagtggttgtaaacgtacacatatatccatatacatatatatatttatttatcagtgttagttttataagtagagtttctttagcttacgtttaggcaataaaataactttatttcccacatctaatctagaattttcctctctaactctctctttacacatgtctatcgctctcgctctttctgctgcagcgtttttgctaagagcgcttgttttacaatcaataaaaaaaaggtttaatatataaagtatgaataggtaaaaaaaaaacacattcgaaataaacctaagacgcgtccgataaaatcgctgattaaagaatatttacatgggtgtgtgctttcgagggtaagccgacatttagctgctaatattgcttatgactatataacgtactcatattagtggggatttggatctttgtgttgttcggggtgtcgctttcgtttcgtcaatcttaatcattttctttagttaaaacgcagaccatgctcaggaattcgctatcactttgggttaatacaaacgcaaaaacagatcgcattgtatcctatcgctcttagctatatacttctatatatatatatatctatatatatatagctgactgaaactaggtgcattacaggctatacacatacatgtagtgattgttatatcaacacataaacaaattacataatcacaaacaacagaattttattttggtggcaggctttcggtgtggttaacgacaattgcgatggctcttcgattccgattcagatcccaggtccgattacctgtggctgctgtacgttttatagacccgcggcgccctcgtcgttcctgtggccgatgtggatgagggtgcggagccagagccgaccgtggtcgagcttgtagcagcatgcgacgcgtccgctcccacggccaagacttgcgccgtcgtttccagattcagaggcagggggttgtcgtgctcatccgagtgctcgtagatgtagtcgcgcttcttaaagttgtcgatgatgcgcttcgtggacttcatatgcgccacaaaggctgcctccaactatacaaatggtggagaacgttaacgagttagaaggttgtgcagtttgatggattaagggtaagatggattaagctatcgatctgaactgaaaatgtatgacatattatgagactcacgctggatgtaaggttcatgaatgtgtggtacttctccagcactccaataatctccttaaagctatttcctcgcagctggcggcgcaccaccgactcgtacaactcgttgtccgctatcagatttcccaccaggatggccgcataacttccctttagcgtgtgctccatgtggtggccggctcgttgcacaactgtcaaaaccgcccggcaattagcataggtcacagatcatcaaaccgctaaatactcacgattgttgactgtctcctccacttcttcttgtttcttctttcccttctcgttgctctcgaggaaggcgtccgtgttcttttccaccaatctgcgggcgtgaaacataatataaagcaatgcgacaatgtgactagaattgttaatgtgtcctacctagccagctcctcgcacttgtagaagtactcaagcagagcttgcagtgcactcacagatccctgcgctggtggattatccgctacgtactctgccggagcggcagcttgcattagagcagcccggttgggcacagtatgcatgcacaaattgattagcagtgtaagaacctggagaggtgggaatcagtgtttgaaattggttacttgtgaagcgaaaagatataaatctcacactcaccagtatgcttagctcaaagacacattggtcgggaatgtagttggccgagagcagcagcaatcggaagctcgtctccaccacatcgcccctttgacctagcagctcggctcccaacgatggctgcgcctcgttgaacgtgtgcgtcaggttgatcagtaccttgagcaccggcaccagcagctcgcgcatagccacacccggatgctccttgttgctgccaccaccatccgaaggatgcagcattatttgtcggctgcaaagacggtacagttggcaaagcgtctccactgcttttccctggccagaggtgagcatgtagcgctggttcgtctcattgtgctgcgtcacgttttcgaggactcgcagacaacgcgccaccgtttgcatgttatccagcagcgtcggctgccagtcaatctccgtgtcgcaggcaatcaccggtctgcagaagtccgagatggtcttgataatgtgctccaggccacccagcttgcgcagatcctctttaaaccactcgcccgcgcgcttggatgttagcgatagcagcgtttccattgccagcgtgcccacagtcagagaatcaacgttgagatgcgttcccttgccctgcgccttgatctcctcgcacaactcgcgcaccttctgcttgttgcggtcgtagcccgctctatccgggtgcccagtctccgtgctgccacccacgccgtccgcctccagaaggttgatcatcagctccaaggagtcgcgatccaggtccatgttgaggccctcctgggaaagaatgtacatgatggccgaggtgcacaggcctaggctgaggtccttgttggcgtcggataatgcctacagttaaatagtcagttaattaacaaagaggttgatacttttcctaaaacttttttttttgttattcactttgcaaataatcaataaactgtactgatttaaagtggaaaacattaccaagttgattaaagtacaactgcaatggtttaatagtttatacaggcttttaatacagaataacaaaataacaacacagctttcaaaacaaactggctattctggggacagctttgccgaaagctgatattttgaatttgataagattcaattgcataatcaaactatgcaaataccaagcgcccaaaggcggtttggagctcaatatatgtaagaattggggatctaacttaccttgaaaaatttggtgaccaccccatgggcacgcacgtgcatccggaaggcgggcatcatacacttggcggctagctgaagggcggagagacaccgtgttgccgggggattgtgcggctgaagtgcgtccaggatgtactcgacgtcgtcgtccatttcctggtactcgccgatctcctgaatttgatgggccgtcttaacgttacgcaccactggatagtagtccttagttttgcggtcgacccgaacggggccgccaccgcccgtcgctccacctccgcctgtcgttgcccctgttccaccagcggaagcaccagctgcactacgctctaggtcaagctctccggcaattggttccaaatccaggtcaaaggcatcggaactagtggaggtggcaggtactccctgttttcccgccagtcgcgagatctttccgagggccgggctatcgccgcgcaacgtggatgcgctgctgcacgcactggaggagccattgttgttcgacgacggactgtcaccgaaatcaccatcggacttgcccgccgctaaatgatgcagatgatccttcgccccagcgacgcccacgccagatgccgaggcattgctggcatcgctgttggttccaccgccattcgcttctagcgcagcatcccaactgtgcttgtacagatgtcgcttggccactgtagcctgttccgcttgatcggatggcaccagagcgcggcttttgaagatgctgcctttcttctttgagatgaccagcttgacagcgccccgctgttcgccagaggactcaggtggcgccgccgctgctgctcctcccgctccggcgttcgccgcgccctgtgtgtccagtgtcaatgttcgcttaaacttatccttaaacttgaaatcgcggggtgggggcgaggaggaggacccatcgtgctgcaacgaggagttgtttgagttgttcgacagttcatccggatcaggatccggatcatggtctggcgaatgttccctgtgatctgtgtgcggaatcttggcgggtgtgggctgctcctcctcagcatcaggagtttcctgctcttcgggcactggctcctgctgtagcacctgcgttacctgctggttctttcgtttccgaccatagcttcgtgccgctccacccgcgactccgccttctgctagtcggctggcctcggccttggctgacaaattggcggctattttattaatgttattgttaacgcttgccaaattattgttattggctcgggcagcagcattgcgacctctcctcggtggaagtgtggcctgttccagctgttcctcgttcgctggcaccgtcgtcatcgccgtttcgtccacttccatgtcgacttcctgctcggcctttctggagccccgggtgccccgcgtgtttcttttgcccgttggtggcgatatggcagccgtggtcgcatctgctcctttggccctacctcgggttctggtctccgtggcgggtggggttacatccacattgttattggcctttctgcccctgccacgcgtggccctcttcggctgttgctgttgatcctcctcctcggttggctccgggtccgtattgccatttagccgtggcacttcccctcgcagcacagccagtatgtcctcctgcagtggtgtctccggcactgcagatgctgctcccgttcccgctccgtcgatggtcatcatcatggactccagtcgtgactcaatgtccgaggggggagccaccagcgaggagtgctgactcgtctctagatcactggtgatcacactagatcccctgctgcgaatcacacaactatcctcctgcacagcctgcgctaacagttgcggcgtgctgttgcccttcgaggagatgctgcccagcaccgaggactgcgagtcgaagtcgtgatcggatcgagtggttggtgatatgaccgcggagcctcgctgcggatgcagctggtgcagttgatgtagatgagatggtgtatgctgtgcttgttgactattggcctcgctgagagccaaatgaggtgagggtgtcttgaattcggagttgatctcggcgggggtggctccagaagctggagcggcaccagatcccgcggcaagcagctgcttgtgcttgtgctttttgctcctcgacttcttttcactgcgggactcggctgctgctgcggctttggcgatggcgttgcggatcacgtccgtcttgatgatcagtttgagccgctccttcggcggtttgtccggggatatctttaccgtgcagtagttgatctccggcggttcctcctcctcgtcctcctcctcttcttcctcctcctcgtcctcgttgggttctagtgactgggacttgcgttcctcgaaagaatcgcctgctgatgctcctccaactgccgcagatgatccatcgacggaatctgctgctgtgggcggcctcagtggcttcactgtgatttttggcgtacttgcaggaactgtttcgtctccggaccgctccgctggctcctcctccgtgaccgaaagttgattcagttggttctggtgagcgggcgagctgctcggcggctcctcgctatccgtgctgaccaaccgcgaagtgccctggaaaacgaaagagtgcccatttagctaggttcttctactgggatccactatttcctacttttggctagctgatctggcaaatgaaaataagcacaactatgtcgcgttcccggtaattagcactccaagtgaaccgaaatgggcaagaaccgacagataaatgcggaacaaaaaacaaaacaccaacaactcgggagagcgactcgactccaattccgttggtttgccatgtaaaagcgcgcgtaatttaacactgcttcgcgcgctgcgctgccttccctttcccacacacagtgagcagggaatggtaggagaaagagagggaaacggagaaaggcgaagcattgttgagcaagagagaggtggccgggcgattaagtgcgaaagagatggcggagcgcgtgtgagagagagggagggcgatcgcatttggggtactcggcaaatagttaggagttggataactttttctctgagtgaaatgtaccgagaaacggagtggtgaaaatcaaaaaagaaggggcacccactagtgtggtggatatattaatttaaattactattaggtaggttactattaggaaatagagagaagtggaagcataatatttaggtctagagtttaaaataattcaaattccaggcaattcaaaactcaccttggagatgcgtagcacgataggaggatgttctggcgtgcgggaggcgctgggaggatttgacgcgctgcctgatgcggagggcagttgggacgaggtggacgcagatgcacttggcgctgacgtaggcgggggtaacgacggctccgatccagggctgccaaacgtggaactgatgaaggcttccgacgaagcggcggcaagtgttgccgtagccgccacttcagccggttggcgccccgctttgggaatgatcagatccttggtgggcgtgggatagcgctcgtcctcgtccacttcgcggtagttgacagccttgcgggcgcgtcccagtacccgcgaaggcggcgcctctggcttcagcttcttctcctccttcggcttcttctgcttctgcttgcccgaggcactggacggttgctccggctgctctgaggcgggatcgcttagcccatcgccatctcgatcggaggcgccgtagaacgcaccaggcgtcgagggcgtggaggctgacgttgttgctgccttctttttcggcgatttgcgcttccgctctgcggaactggcgcccttgcccggcttcagcttcactccgcccgcctcctgggcaccggaagtaggcgtgagaccaccagcacccgcacccgccgacgagaaatggtctcgcatgggtgatgcgccggctccacagtgcggtagctgctgaatgatctgagctatgacctccggcggagctgtattcctcgatttgaagaactttttcggcttcggcggctccggaaccgaaacggacaggtcgttgggatcgtgatcctgcgtggaggcgggactctgggagggactggcggctgctgcagcagccgccgctgccgcagccataggatggatggcgggcagggtgtaggtgcgcgtggaggtgaagcccatcttgccccacttgccaacggtgcccacggaacgggcgacagtgggccggttggtgttctccttctccttgcagagtgagtccagcggcaccacgatgttcttgccccagcgcgacatcttcgctagcggtggttcctttgctgcttctggtatcctctaactccgtgttgctgactctaatccttggtgatgtggtcactggaaatggagaaacattagttaaccggcttcttggctagcacacagcaaacgcatcgctcatcaaagtaaagttcggactttatcaacatgaattttactacaatacatacaaccattcggaaacagctgtacaattcgttatttaccatttcattatcctgcagagaaactaggtaacagtaaatcgatttaacatatgtgtatttgcaggcctatttggaccaagaaatgagcacatgctggggattatatcgaacctagttggatttggctgcccagatagggccagataagggcacggatgacaagaaacctagttttatagctagtaccaatccaaggattaggaatccaaaacccgaaagagaccctactctccctccgcggaggcagcgaaaaggtggttggaggattcgcaggacatggaccacaatgcaggccgtgctcgtcaatcattaactattaattcatgtttcgcactgcggacagttattgaattttactaaaagtgagcgatttgtttggctgggcagagagaagtgcagcaacagcaaaacacaacaaacgcgggcacgtaaggagtacgtcggtgcgagcgagagcactcgatagtgcgcgcacacacacgcacacaggcgatttccaattttcacacacacacgcaccgaaatcaaatcaagaccaatttccaaagcaaaggccgaaaaacaaacaatttgttgcactttactgtcgtaaaaatcgccaaacggaattcacaaaaatcaacaactcacctcaggcgaaacatttggctgctctctttgtttttgttgttatccgtttgctgcgtggatgcatgtggttgcgtgtgtgagtgagtgtggtcaaataaaaaaatctctgttgctgctgcagcgcatatgtatgcgactgcgtgcgtgtgcatatatataggtgtgtgtgtgcgtggaatgcaataaaacaaacgatgtttgcgtttgcttttgcttattggcgcaatttgatttgcacgaactgtgtgctcgatattttagcgattactcggggctcaagccaccatcactcttatcattttccgcctggccgctaactgcagcgtgttttttgcgtcgcaccacgggcttagtgcttttgccaccacttttactttacagcatcatcccagaagcagtagcagcagcaacaacaacacccacaaacacacacacaactaacaccaacacaaacaacaatacgattatactggccgttccgttcttcttcttgctgcgaatatttctttgatttcgcgattctccgctaaatcggcgccaatcgagagcgcgtagttgtgcaatttgcagggtaaacgaacgcgatcgcgaatttcaatttttgcaatggcgaaatgcgcgaaaaagtttaatttctctgtttttctacacgagagaagagaaacactattttagagctgggctaacgattcatgaaactatcgatatgccgtagacgatagcgtaggactcactatcgaaacgtgtggcgcaaaattaagcgaacagcattcgcgctatcgacattagtcctcccctaagccagtgtgaccatgaccttactgttcggccttcactcaaagcaaagactttgccgccaatcgttcacatttttgaatatattttaattgacaagcgtaaagatataatgcgatgttgtggttcagtagactcgctcccgcaccttgaacatcaagggttccttggtacgcagaataagttcggcgatcagcacgggtggttccgaggagtcgcccacaaagtcaacctcgtagtgccggagcacattggccacgatggccttgatctccagcatggcgaacttctggccaatgcagttgcgaggtccggccgagaacggaatgtacgcgtacggattcagcttctcggcggtggtgaccacatcgaaccgttccggcttgaagatattgggctcgctaaagagctcctcccgtctgcccaagtagagaggggagatgccgatattcgtgcccgccgggatgagctttccatctgcattggggaaaggcaagttaaaattgagtactttactcctctacgcactgtactcactgatctcgcagtcctcgagaaccttacgacccagcagcggtacagacggatacattcgaagggtctccttcacgcacaggtcgacgtagtgcagctggttcagcagctcatagctcaccggcgtgctcttgtcattgcccaccacggaccggatctcctcaaagcacttcttctgcgcctccgggtgggtggctatgttgtagaagaagaacatcagggccgaagaggtggtgtcgtggccctcgaacatgaaggtgtccacttcctcgcgaatgtccaagttgctcaggggccgttcgtcgacggtcgactgcagaaggatgtccaggaaggccatctttcgcttggcgcccacgtcc

SEQ ID NO: 7064 - DNA, 6751 bp, DROSOPHILA
aatcgttagcccagctctaaaatagtgtttctcttctctcgtgtagaaaaacagagaaattaaactttttcgcgcatttcgccattgcaaaaattgaaattcgcgatcgcgttcgtttaccctgcaaattgcacaactacgcgctctcgattggcgccgatttagcggagaatcgcgaaatcaaagaaatattcgcagcaagaagaagaacggaacggccagtataatcgtattgttgtttgtgttggtgttagttgtgtgtgtgtttgtgggtgttgttgttgctgctgctactgcttctgggatgatgctgtaaagtaaaagtggtggcaaaagcactaagcccgtggtgcgacgcaaaaaacacgctgcagttagcggccaggcggaaaatgataagagtgatggtggcttgagccccgagtaatcgctaaaatatcgagcacacagttcgtgcaaatcaaattgcgccaataagcaaaagcaaacgcaaacatcgtttgttttattgcattccacgcacacacacacctatatatatgcacacgcacgcagtcgcatacatatgcgctgcagcagcaacagagatttttttatttgaccacactcactcacacacgcaaccacatgcatccacgcagcaaacggataacaacaaaaacaaagagagcagccaaatgtttcgcctgagtgaccacatcaccaaggattagagtcagcaacacggagttagaggataccagaagcagcaaaggaaccaccgctagcgaagatgtcgcgctggggcaagaacatcgtggtgccgctggactcactctgcaaggagaaggagaacaccaaccggcccactgtcgcccgttccgtgggcaccgttggcaagtggggcaagatgggcttcacctccacgcgcacctacaccctgcccgccatccatcctatggctgcggcagcggcggctgctgcagcagccgccagtccctcccagagtcccgcctccacgcaggatcacgatcccaacgacctgtccgtttcggttccggagccgccgaagccgaaaaagttcttcaaatcgaggaatacagctccgccggaggtcatagctcagatcattcagcagctaccgcactgtggagccggcgcatcacccatgcgagaccatttctcgtcggcgggtgcgggtgctggtggtctcacgcctacttccggtgcccaggaggcgggcggagtgaagctgaagccgggcaagggcgccagttccgcagagcggaagcgcaaatcgccgaaaaagaaggcagcaacaacgtcagcctccacgccctcgacgcctggtgcgttctacggcgcctccgatcgagatggcgatgggctaagcgatcccgcctcagagcagccggagcaaccgtccagtgcctcgggcaagcagaagcagaagaagccgaaggaggagaagaagctgaagccagaggcgccgccttcgcgggtactgggacgcgcccgcaaggctgtcaactaccgcgaagtggacgaggacgagcgctatcccacgcccaccaaggatctgatcattcccaaagcggggcgccaaccggctgaagtggcggctacggcaacacttgccgccgcttcgtcggaagccttcatcagttccacgtttggcagccctggatcggagccgtcgttacccccgcctacgtcagcgccaagtgcatctgcgtccacctcgtcccaactgccctccgcatcaggcagcgcgtcaaatcctcccagcgcctcccgcacgccagaacatcctcctatcgtgctacgcatctccaagggcacttcgcggttggtcagcacggatagcgaggagccgccgagcagctcgcccgctcaccagaaccaactgaatcaactttcggtcacggaggaggagccagcggagcggtccggagacgaaacagttcctgcaagtacgccaaaaatcacagtgaagccactgaggccgcccacagcagcagattccgtcgatggatcatctgcggcagttggaggagcatcagcaggcgattctttcgaggaacgcaagtcccagtcactagaacccaacgaggacgaggaggaggaagaagaggaggaggacgaggaggaggaaccgccggagatcaactactgcacggtaaagatatccccggacaaaccgccgaaggagcggctcaaactgatcatcaagacggacgtgatccgcaacgccatcgccaaagccgcagcagcagccgagtcccgcagtgaaaagaagtcgaggagcaaaaagcacaagcacaagcagctgcttgccgcgggatctggtgccgctccagcttctggagccacccccgccgagatcaactccgaattcaagacaccctcacctcatttggctctcagcgaggccaatagtcaacaagcacagcatacaccatctcatctacatcaactgcaccagctgcatccgcagcgaggctccgcggtcatatcaccaaccactcgatccgatcacgacttcgactcgcagtcctcggtgctgggcagcatctcctcgaagggcaacagcacgccgcaactgttagcgcaggctgtgcaggaggatagttgtgtgattcgcagcaggggatctagtgtgatcaccagtgatctagagacgagtcagcactcctcgctggtggctcccccctcggacattgagtcacgactggagtccatgatgatgaccatcgacggagcgggaacgggagcagcatctgcagtgccggagacaccactgcaggaggacatactggctgtgctgcgaggggaagtgccacggctaaatggcaatacggacccggagccaaccgaggaggaggatcaacagcaacagccgaagagggccacgcgtggcaggggcagaaaggccaataacaatgtggatgtaaccccacccgccacggagaccagaacccgaggtagggccaaaggagcagatgcgaccacggctgccatatcgccaccaacgggcaaaagaaacacgcggggcacccggggctccagaaaggccgagcaggaagtcgacatggaagtggacgaaacggcgatgacgacggtgccagcgaacgaggaacagctggaacaggccacacttccaccgaggagaggtcgcaatgctgctgcccgagccaataacaataatttggcaagcgttaacaataacattaataaaatagccgccaatttgtcagccaaggccgaggccagccgactagcagaaggcggagtcgcgggtggagcggcacgaagctatggtcggaaacgaaagaaccagcaggtaacgcaggtgctacagcaggagccagtgcccgaagagcaggaaactcctgatgctgaggaggagcagcccacacccgccaagattccgcacacagatcacagggaacattcgccagaccatgatccggatcctgatccggatgaactgtcgaacaactcaaacaactcctcgttgcagcacgatgggtcctcctcctcgcccccaccccgcgatttcaagtttaaggataagtttaagcgaacattgacactggacacacagggcgcggcgaacgccggagcgggaggagcagcagcggcggcgccacctgagtcctctggcgaacagcggggcgctgtcaagctggtcatctcaaagaagaaaggcagcatcttcaaaagccgcgctctggtgccatccgatcaagcggaacaggctacagtggccaagcgacatctgtacaagcacagttgggatgctgcgctagaagcgaatggcggtggaaccaacagcgatgccagcaatgcctcggcatctggcgtgggcgtcgctggggcgaaggatcatctgcatcatttagcggcgggcaagtccgatggtgatttcggtgacagtccgtcgtcgaacaacaatggctcctccagtgcgtgcagcagcgcatccacgttgcgcggcgatagcccggccctcggaaagatctcgcgactggcgggaaaacagggagtacctgccacctccactagttccgatgcctttgacctggatttggaaccaattgccggagagcttgacctagagcgtagtgcagctggtgcttccgctggtggaacaggggcaacgacaggcggaggtggagcgacgggcggtggcggccccgttcgggtcgaccgcaaaactaaggactactatccagtggtgcgtaacgttaagacggcccatcaaattcaggagatcggcgagtaccaggaaatggacgacgacgtcgagtacatcctggacgcacttcagccgcacaatcccccggcaacacggtgtctctccgcccttcagctagccgccaagtgtatgatgcccgccttccggatgcacgtgcgtgcccatggggtggtcaccaaatttttcaaggcattatccgacgccaacaaggacctcagcctaggcctgtgcacctcggccatcatgtacattctttcccaggagggcctcaacatggacctggatcgcgactccttggagctgatgatcaaccttctggaggcggacggcgtgggtggcagcacggagactgggcacccggatagagcgggctacgaccgcaacaagcagaaggtgcgcgagttgtgcgaggagatcaaggcgcagggcaagggaacgcatctcaacgttgattctctgactgtgggcacgctggcaatggaaacgctgctatcgctaacatccaagcgcgcgggcgagtggtttaaagaggatctgcgcaagctgggtggcctggagcacattatcaagaccatctcggacttctgcagaccggtgattgcctgcgacacggagattgactggcagccgacgctgctggataacatgcaaacggtggcgcgttgtctgcgagtcctcgaaaacgtgacgcagcacaatgagacgaaccagcgctacatgctcacctctggccagggaaaagcagtggagacgctttgccaactgtaccgtctttgcagccgacaaataatgctgcatccttcggatggtggtggcagcaacaaggagcatccgggtgtggctatgcgcgagctgctggtgccggtgctcaaggtactgatcaacctgacgcacacgttcaacgaggcgcagccatcgttgggagccgagctgctaggtcaaaggggcgatgtggtggagacgagcttccgattgctgctgctctcggccaactacattcccgaccaatgtgtctttgagctaagcatactggttcttacactgctaatcaatttgtgcatgcatactgtgcccaaccgggctgctctaatgcaagctgccgctccggcagagtacgtagcggataatccaccagcgcagggatctgtgagtgcactgcaagctctgcttgagtacttctacaagtgcgaggagctggctagattggtggaaaagaacacggacgccttcctcgagagcaacgagaagggaaagaagaaacaagaagaagtggaggagacagtcaacaatcttgtgcaacgagccggccaccacatggagcacacgctaaagggaagttatgcggccatcctggtgggaaatctgatagcggacaacgagttgtacgagtcggtggtgcgccgccagctgcgaggaaatagctttaaggagattattggagtgctggagaagtaccacacattcatgaaccttacatccagcttggaggcagcctttgtggcgcatatgaagtccacgaagcgcatcatcgacaactttaagaagcgcgactacatctacgagcactcggatgagcacgacaaccccctgcctctgaatctggaaacgacggcgcaagtcttggccgtgggagcggacgcgtcgcatgctgctacaagctcgaccacggtcggctctggctccgcaccctcatccacatcggccacaggaacgacgagggcgccgcgggtctataaaacgtacagcagccacaggtaatcggacctgggatctgaatcggaatcgaagagccatcgcaattgtcgttaaccacaccgaaagcctgccaccaaaataaaattctgttgtttgtgattatgtaatttgtttatgtgttgatataacaatcactacatgtatgtgtatagcctgtaatgcacctagtttcagtcagctatatatatatagatatatatatatatagaagtatatagctaagagcgataggatacaatgcgatctgtttttgcgtttgtattaacccaaagtgatagcgaattcctgagcatggtctgcgttttaactaaagaaaatgattaagattgacgaaacgaaagcgacaccccgaacaacacaaagatccaaatccccactaatatgagtacgttatatagtcataagcaatattagcagctaaatgtcggcttaccctcgaaagcacacacccatgtaaatattctttaatcagcgattttatcggacgcgtcttaggtttatttcgaatgtgttttttttttacctattcatactttatatattaaaccttttttttattgattgtaaaacaagcgctcttagcaaaaacgctgcagcagaaagagcgagagcgatagacatgtgtaaagagagagttagagaggaaaattctagattagatgtgggaaataaagttattttattgcctaaacgtaagctaaagaaactctacttataaaactaacactgataaataaatatatatatgtatatgga

SEQ ID NO: 7065 - protein, 1741 aa, DROSOPHILA
MSRWGKNIVVPLDSLCKEKENTNRPTVARSVGTVGKWGKMGFTSTRTYTLPAIHPMAAAAAAAAAAASPSQSPASTQDHDPNDLSVSVPEPPKPKKFFKSRNTAPPEVIAQIIQQLPHCGAGASPMRDHFSSAGAGAGGLTPTSGAQEAGGVKLKPGKGASSAERKRKSPKKKAATTSASTPSTPGAFYGASDRDGDGLSDPASEQPEQPSSASGKQKQKKPKEEKKLKPEAPPSRVLGRARKAVNYREVDEDERYPTPTKDLIIPKAGRQPAEVAATATLAAASSEAFISSTFGSPGSEPSLPPPTSAPSASASTSSQLPSASGSASNPPSASRTPEHPPIVLRISKGTSRLVSTDSEEPPSSSPAHQNQLNQLSVTEEEPAERSGDETVPASTPKITVKPLRPPTAADSVDGSSAAVGGASAGDSFEERKSQSLEPNEDEEEEEEEEDEEEEPPEINYCTVKISPDKPPKERLKLIIKTDVIRNAIAKAAAAAESRSEKKSRSKKHKHKQLLAAGSGAAPASGATPAEINSEFKTPSPHLALSEANSQQAQHTPSHLHQLHQLHPQRGSAVISPTTRSDHDFDSQSSVLGSISSKGNSTPQLLAQAVQEDSCVIRSRGSSVITSDLETSQHSSLVAPPSDIESRLESMMMTIDGAGTGAASAVPETPLQEDILAVLRGEVPRLNGNTDPEPTEEEDQQQQPKRATRGRGRKANNNVDVTPPATETRTRGRAKGADATTAAISPPTGKRNTRGTRGSRKAEQEVDMEVDETAMTTVPANEEQLEQATLPPRRGRNAAARANNNNLASVNNNINKIAANLSAKAEASRLAEGGVAGGAARSYGRKRKNQQVTQVLQQEPVPEEQETPDAEEEQPTPAKIPHTDHREHSPDHDPDPDPDELSNNSNNSSLQHDGSSSSPPPRDFKFKDKFKRTLTLDTQGAANAGAGGAAAAAPPESSGEQRGAVKLVISKKKGSIFKSRALVPSDQAEQATVAKRHLYKHSWDAALEANGGGTNSDASNASASGVGVAGAKDHLHHLAAGKSDGDFGDSPSSNNNGSSSACSSASTLRGDSPALGKISRLAGKQGVPATSTSSDAFDLDLEPIAGELDLERSAAGASAGGTGATTGGGGATGGGGPVRVDRKTKDYYPVVRNVKTAHQIQEIGEYQEMDDDVEYILDALQPHNPPATRCLSALQLAAKCMMPAFRMHVRAHGVVTKFFKALSDANKDLSLGLCTSAIMYILSQEGLNMDLDRDSLELMINLLEADGVGGSTETGHPDRAGYDRNKQKVRELCEEIKAQGKGTHLNVDSLTVGTLAMETLLSLTSKRAGEWFKEDLRKLGGLEHIIKTISDFCRPVIACDTEIDWQPTLLDNMQTVARCLRVLENVTQHNETNQRYMLTSGQGKAVETLCQLYRLCSRQIMLHPSDGGGSNKEHPGVAMRELLVPVLKVLINLTHTFNEAQPSLGAELLGQRGDVVETSFRLLLLSANYIPDQCVFELSILVLTLLINLCMHTVPNRAALMQAAAPAEYVADNPPAQGSVSALQALLEYFYKCEELARLVEKNTDAFLESNEKGKKKQEEVEETVNNLVQRAGHHMEHTLKGSYAAILVGNLIADNELYESVVRRQLRGNSFKEIIGVLEKYHTFMNLTSSLEAAFVAHMKSTKRIIDNFKKRDYIYEHSDEHDNPLPLNLETTAQVLAVGADASHAATSSTTVGSGSAPSSTSATGTTRAPRVYKTYSSHR

SEQ ID NO: 7066 - DNA, 3602 bp, DROSOPHILA
aattcctggaagagcagctcatttttgtccgccgaaaaggtgccacggagtttcgcctcggcttgctggttcgtcaggcctttttccaaaacgagtttccaaaaggcggtattgtacaggttgttcacatgcacatcggcctgtcgccagctgagatagtcctttagattctgctccgaaggatacagaacaacgcgaccatcgaaacacggagcataggccaatggcagattcatccacttggaccattgcattacatagctcgaggagaacaagctggtgacgtaggtgagcagtttggcggatcgtcgcttgaacgctgccgtctctttgcgaaaaacaaaggagtactcatcactttgaccgtaggcgaggacaatatcccgaaactcctgcatcaccgccgtggcagcagcattcatcacattgagagctaaagcgaatatttaatgggattattaagaactataatgagtgttttttcttaccattttcatcgttgggcttttcaaaatcgtgcgtcttggagaacttgtggaactttttgccgtctattcgtatgactatccacacattaggcagtatgctgtcgtcctgctcaaaggatttaacgtactcgaatctgctgcaggccatgctgcgttttggaaaattccgggcaagggaataattcaataatttaacaaatttattcaaagttccaagcaaccgcatttaaaaagttaagaaatgcatgagttaccaacagctgattgatgttttccattaacagcactgttaactagtgcttgactagtgatggaacttttaaaatctgtttagctttaatcttaaaagtagctaatgaggatggtttagagaatattggtttataaaaaattaattaggaagaaaaataaatttaaatctaaaatgtatatttcttattctgaatactttccgcgcgaaataacatcgagtgccgatagcactcgtgcactcattcctaactgacccgataacttcgataggcaacgactgttggtcatccggcaaaacagaaaattaatagagactatgagtcttaattacgaacaaaacgcggcagacgagcagttcgcccgcgcacacaaagcagtcagcctgtcggacgacgaggagagcgagggccaagcggagaccacgtctgcaccaaatcaggagccgcatgttagtaaatcaccgagggagtactacgatgagcctggcgggaagggcaatggaagtggagcagatgatcaggatgagccggaaacggaggctgccagcggagcggccaacacacatgtggtggcacaccactacaacgagctgaaggaggcgggccgcaaggatcgtcagaagtcaaagatattcttcatgaggaactttaacaactggatcaagagccagctgatcaacgagtatatgtcgcagattaagcagaacaaacgcatgggtgatgctctcagagttctggacatgtgctgcggcaagggcggtgaccttctcaaatgggagaaggctgccatctcccacctcatctgcaccgacatcgctgaggtgtcggtggagcagtgccagcggcgatatcaggacatcctgcagcgatcggagaagtcgaaatttgcgaataagtttaccgcggagttttttgcctgcgactccacattagtgcgcctgcgggaacggtataaggatccttcgcttcagctgaatctcgtgtcctgtcagtttgcctttcactattgcttcgagtcaatggcgcaggcagattgcatgatgcggaatgcagccgagtgtctgaaacccggtggcttcttcatagccacaatgccggatgcctacgagatcatccgcaggctaagggcagccggtccagatgcccggcgtttcggtaacgatgtgtacagcattgaatttgactgcgaaacggatcctttgccgcttttcggagccaagtatcagtttcacttggagggcgttgtcgattgccccgagttcctagtgcattttcccacgctggtcaagctgggcagaaaatacggtctgcagctattgaagcgctccacatttgcggattactacaaggaaaatctgcaccacgggcggcatcttctgcagcgaatgtccggcttggagtcggtgcagccacagcgctgcgagaatgatgaagagttcgcccatgtgagtaactttcagggagcacagcgaagcaggtcggtgggaaccctctcgaaatccgaatgggaagcagcaagtgagtttactcagcatcgacttctgaattccattactaaatagcttcttatttcagctctttatttggtttgtgcctttaagaaatgcaaaaacacctgggacaccaatggcaaaccattgttcgaatttgacgactgattattgccaaaaacattcacgttatagactattattctgtacccgtggcttagcacttttaaagtttatactcgaaagcatgaacagattattaatttcagaaaagattagctccgtaggttacaattcgtaaaactaagggtatgtttgtttgtgttcataggtttcaattcaaattttattgtccagtctaggagatatttaacaaatttacgagaaagccaccaaccatcaagctacgaaatttcaatgtaaatcgagaatgtcattttgctaataaaaatttttaatttagaaaattttatttactattgagtccgtactatagttagaagagacgtatttataaatattacagaatatttcgtaagctaaataatgaaaactaataaaatgacttcaatggaaaaatcagtattatttacaattaaattccaaactactaaataactggttaacttttgaatggccctcgcttgagccgcctttcaatccgcctatttcgaaagctttgataagagggctttggccaagttcgaaactggaagtgagatgtcgaagaaagcttcgcaggacgaagctcgctggccgagagagagcgcacagctgttgctttcacagcgacggcgcctttgaaggacatcgggcaaaggttagtcctgacgtttacgttgccgggtcgtgcccgccagcgacccaacctgttcagctcagctctggagcgaccccaaccagtcggtggcgaaaagagaaagcgtgtcgtgccaggcgctcgatgcatcaatgaattattgtagctgaagtgtaaataaatatttaataacgggccgaaagtggggttggtgttggagatggtggtgctgccctggttcgctttttgatatgctgatgtgcgatggtgctggttggggtgccatgggggggcatggagaaaatagcggcataaattacaccattgattggtttcgaagcgactgcaaactttatattggcccaatcagttagctctttctttcattatcgcttagggctgagcactttggccgtcttccggcgcttttccttggcctcgtcctctggccaacttcttgtcagataattccattatttaaagtttcgctcataaaaaacaactttgggtgtaaagtttaaatttgttttgcacatactgacgcacaacactgaggacgacaggacaggcacgt

SEQ ID NO: 7067 - DNA, 1494 bp, DROSOPHILA
acttcgataggcaacgactgttggtcatccggcaaaacagaaaattaatagagactatgagtcttaattacgaacaaaacgcggcagacgagcagttcgcccgcgcacacaaagcagtcagcctgtcggacgacgaggagagcgagggccaagcggagaccacgtctgcaccaaatcaggagccgcatgttagtaaatcaccgagggagtactacgatgagcctggcgggaagggcaatggaagtggagcagatgatcaggatgagccggaaacggaggctgccagcggagcggccaacacacatgtggtggcacaccactacaacgagctgaaggaggcgggccgcaaggatcgtcagaagtcaaagatattcttcatgaggaactttaacaactggatcaagagccagctgatcaacgagtatatgtcgcagattaagcagaacaaacgcatgggtgatgctctcagagctgccatctcccacctcatctgcaccgacatcgctgaggtgtcggtggagcagtgccagcggcgatatcaggacatcctgcagcgatcggagaagtcgaaatttgcgaataagtttaccgcggagttttttgcctgcgactccacattagtgcgcctgcgggaacggtataaggatccttcgcttcagctgaatctcgtgtcctgtcagtttgcctttcactattgcttcgagtcaatggcgcaggcagattgcatgatgcggaatgcagccgagtgtctgaaacccggtggcttcttcatagccacaatgccggatgcctacgagatcatccgcaggctaagggcagccggtccagatgcccggcgtttcggtaacgatgtgtacagcattgaatttgactgcgaaacggatcctttgccgcttttcggagccaagtatcagtttcacttggagggcgttgtcgattgccccgagttcctagtgcattttcccacgctggtcaagctgggcagaaaatacggtctgcagctattgaagcgctccacatttgcggattactacaaggaaaatctgcaccacgggcggcatcttctgcagcgaatgtccggcttggagtcggtgcagccacagcgctgcgagaatgatgaagagttcgcccatgtgagtaactttcagggagcacagcgaagcaggtcggtgggaaccctctcgaaatccgaatgggaagcagcaactctttatttggtttgtgcctttaagaaatgcaaaaacacctgggacaccaatggcaaaccattgttcgaatttgacgactgattattgccaaaaacattcacgttatagactattattctgtacccgtggcttagcacttttaaagtttatactcgaaagcatgaacagattattaatttcagaaaagattagctccgtaggttacaattcgtaaaactaagggtatgtttgtttgtgttcataggtttcaattcaaattttattgtccagtctaggagatatttaa

SEQ ID NO: 7068 - protein, 410 aa, DROSOPHILA
MSLNYEQNAADEQFARAHKAVSLSDDEESEGQAETTSAPNQEPHVSKSPREYYDEPGGKGNGSGADDQDEPETEAASGAANTHVVAHHYNELKEAGRKDRQKSKIFFMRNFNNWIKSQLINEYMSQIKQNKRMGDALRAAISHLICTDIAEVSVEQCQRRYQDILQRSEKSKFANKFTAEFFACDSTLVRLRERYKDPSLQLNLVSCQFAFHYCFESMAQADCMMRNAAECLKPGGFFIATMPDAYEIIRRLRAAGPDARRFGNDVYSIEFDCETDPLPLFGAKYQFHLEGVVDCPEFLVHFPTLVKLGRKYGLQLLKRSTFADYYKENLHHGRHLLQRMSGLESVQPQRCENDEEFAHVSNFQGAQRSRSVGTLSKSEWEAATLYLVCAFKKCKNTWDTNGKPLFEFDD

SEQ ID NO: 7069 - DNA, 4355 bp, DROSOPHILA
agcgcgaagatttcggcgtagtgaagatcaaccgtccgccgggtcatgaagtcacctcgccgggccaggacaatacggatgccatgtccaccgtgtcctccggcggcggcggcctcaccgatcagggctactacgatctaaagttctatcacaataagttgtggtgaagtcgaagtcacaaaccagaaggcacgcaatatttgctaacatcttttgtacgtgtggcataagcataattaaacaaaaatctaatctagtctgtaagattgtattgtctaatcaaaataacacaccaaacggttcctgtacttcagttcgatgatttcgttgtgagcttcttctccgacttttgttgatttgttcatttgttacaagccacgcacaccgaagagcatccgtaaactaaactagagcctcacaattaaacgttaacaatagcaaattgaaatatacgtagattaattgccgccggtactgagctagataattttacaacacatactcgtctttggttgaaaagatcctttattaataatttcgctttgtactgtgaatttgcaatagcccttaatgttatccagcccgtgtgtatcttccaattacagaaaacgagaatatttcgaacaaatctatgccgagtacatgctatagggatagcgccagttggccagaatgcatcttcataaccatacttaaaatttcttaaacattgtctaacatttagttgatagaacaaaacccccaaaatgcaaatagatattaaagatgaagatatacaaataaagcacaaaattttgtcgactctatttgccaagtgaaagagactggctttccattttatctgcaatacaattatgtacgtttacacacacacatgaaatggaaatctacgggctgatctgtggtgctgaaatcagttaggtagcgctatcgttggtgctgctgctgctgctgttgatgcttaactattgctggacgtgggcccctcctccgtctgcccttacatgtagataaagttgaatctgcagtgaggaagcgtatgtatatgtaagtggggcggcaatctataaacttcgatatgcgttacgaacttacctgcagagggcctgcggcagagatgagataatgggtccatatccttgcgagttgtcgtatagctcgaataatggcgcagcaacaagcttataatttttgggtacagcaaatagtgctagattacggaaaacgatagagacagaattcatgtatgtagagatatcaacgaacattgaaattcacaggatatatcatctagggatattacaatcggttgtacaatttacatattaagaatcatttcgcagccgtatgatataaagagtcgtatgcgtttcgttttacattcatagttggttacgttagactaattaattggattcgctgcgacttgcaaagcatgaccggcactttgctggcccagcgatgtctcctaatatcagttatgaacataatttcaatttagagcaacattatacatgataagtgcggttcgaattgtgcgctgaaatgcttcagctggtggacaacatcagttcatttcagcgcacagcgaatgcgtaagggccaaaaaaggtataaacagtatttgcttgtgtttacataaacgagtgcttaatttaaggagcgacttgcgacctgactgcccagcatgcgtgcaaatctgcaaaacacgcgagatttgggcacatgactgcgacagccagcaacgttacaatgctcttctgctgcctgcccgatggattggattgctttcgataaatacacaacaaccttaagatgaacgacacatgacacttcacaaaagtaagaatagaagctaggaaataaataaaatatgtaaatagaaggataacattgctgcgctcagtctcacaagtatgtcgacatatttacaaaattaagtacaagaacaatctttgaatttcgaatgataaaaatcgggaaataacaaaatatgccaacactcagtcctgagcaaaaatacaatttgaatttgattttcgacatgttgtacaattggactagaatcaaaactaactaaggagtcgcctgcgccagcttttgcgatctgtttgtttcttttctgtttgatctgttctgtttgctcgatttgttgttctatggcattgcactcttgagattagagttgggtagatacgacacacacggcgctaatggaactgctcagggtacatcgtaactggcgttcccgtccgtatctaaacagcattgaaaagatatgacatgaggtttgttagcgtattcggtttttggcaaacaaaaacaatctataggttatataaagtacatggagagatggatattctggatacacggtgtgctcgttatacctacgcgtagggacttacaaaacgccctgcggatatttacccttttcatgtagctggacgaggaaaagccgcttgtgctccttgggcttggtgatgtgcggcggaatgtatggatattgcggtggctcaaagttcggccgccaccagttcccaatcgtgtcctcaacaatccactcctgctttacgccgtcctgacgacccagcgtctacgaaataataaaagtagtgatagttaagatcaaataacaatatttaactatggcgccacgtttgacttacctcggatagcaatctcttgaggccctcgacctcatcctcgccggcgtttagctcgccaccgggcaatttgaagaacgtggtgcccagctgcaggagcaagacatgtggcagtccgtgctcgtggaccagaagcactccctcgacggagcgccgcattccgatccggtcgaattcctcgcgcatccgctggaatcgggatggcaccgacggatccttctcaaagagcggctccttggtgccgaatgtgtagttcgtaagggggtatctgaaacaatcgatcgatctatgatgtgcgtctatgaatgaaatgtgttgtacccacaagttgatggtgcgattgatggttagcgcctggttggtgtacttctgggtaccgttgttattgctgctggctgcatccgcttggccttggcttccgcggcgcggccaaccggagcccgatttgtttgagacttgcgaggacgccattttgttatacacacacccctgtgggaaaatttgcgggacaagctggccgactttctaccaaatcctttggttgtgcgttggaaacttgtattccaataatattataatccttaactgtttatttacaagttatactataaatgtaaacccgttttaagccgcttaattacacttttctgtccagcgcttgtgcaaaaaaattaaccggctggacgagggctgcacgtgaattgattgatgatgagcagaactggttcgttgaactagattatggaattaatcgatttcgtactttgtgtgaaataaacttgtaatgaccttttgcttaatatttattaaagatttattcaattttttgttttatttttaaatgcagttttaaattattgtttgtttacatatgtaacgacagccctggtgtttcttgtctaatggcaacgctctgaaattgcgcagcaaccccatctggccacactgacccattagttttttgtttatgttgggttgtcggaaaaatcggctgttttccgtgtgtccgtctgccatgaaaagctgctaaaaagctaaatataaaaatcagcgcagcacacacgttccgctgcctgcattgtttgcccattctaatgggaaattatgtgagtgcgagtcaggaaaacgcatcgtgtgtgtatatatacatatatacataagtatgtaactgcgcccgtttgtttgtgtgtgtttttgtgtgcatggtgcaatggaaaagtgattattataaatgaaaatcagtgaaatgtgtaagtgtggcaccgcaaacgctttgaacttttccattttcatgttttcaccttgtcttctcttctcttcttcacccacctcccccgtagtcaaccaactcccacttgtgcgtgtgtaggaaggcagaagggtgttttgcattcgtgtgcgtgccagataaaaagactttgaatttctggaggatattagtgtcaactgtgtggggtataatacgccgtaggccctaatatgcaggcaagtccattaattacgccaaaggtcacaggttaggcacgcagccaggatccaaggagcaataataatgttgtatgaaggcgacctgtaagcgagagcgagagagctggtgttttggtgtgagtgcgtggtagaacaaagaggacgaaaaacacggctaacgaattcgccgcacgacacactcgccgcatggcgaattcaaac

SEQ ID NO: 7070 - DNA, 932 bp, DROSOPHILA
cctcgtccagccggttaatttttttgcacaagcgctggacagaaaagtgtaattaagcggcttaaaacgggtttacatttatagtataacttgtaaataaacagttaaggattataatattattggaatacaagtttccaacgcacaaccaaaggatttggtagaaagtcggccagcttgtcccgcaaattttcccacaggggtgtgtgtataacaaaatggcgtcctcgcaagtctcaaacaaatcgggctccggttggccgcgccgcggaagccaaggccaagcggatgcagccagcagcaataacaacggtacccagaagtacaccaaccaggcgctaaccatcaatcgcaccatcaacttatacccccttacgaactacacattcggcaccaaggagccgctctttgagaaggatccgtcggtgccatcccgattccagcggatgcgcgaggaattcgaccggatcggaatgcggcgctccgtcgagggagtgcttctggtccacgagcacggactgccacatgtcttgctcctgcagctgggcaccacgttcttcaaattgcccggtggcgagctaaacgccggcgaggatgaggtcgagggcctcaagagattgctatccgagacgctgggtcgtcaggacggcgtaaagcaggagtggattgttgaggacacgattgggaactggtggcggccgaactttgagccaccgcaatatccatacattccgccgcacatcaccaagcccaaggagcacaagcggcttttcctcgtccagctacatgaaaaggcactatttgctgtacccaaaaattataagcttgttgctgcgccattattcgagctatacgacaactcgcaaggatatggacccattatctcatctctgccgcaggccctctgcagattcaactttatctacatgtaa

SEQ ID NO: 7071 - protein, 237 aa, DROSOPHILA
MASSQVSNKSGSGWPRRGSQGQADAASSNNNGTQKYTNQALTINRTINLYPLTNYTFGTKEPLFEKDPSVPSRFQRMREEFDRIGMRRSVEGVLLVHEHGLPHVLLLQLGTTFFKLPGGELNAGEDEVEGLKRLLSETLGRQDGVKQEWIVEDTIGNWWRPNFEPPQYPYIPPHITKPKEHKRLFLVQLHEKALFAVPKNYKLVAAPLFELYDNSQGYGPIISSLPQALCRFNFIYM

SEQ ID NO: 7072 - DNA, 7136 bp, DROSOPHILA
tgccgcttccgaaaacggtgaacaccttgtcgttttcggggacgtcagtcttctccgtaaccagctggtgcatcctatagatcatgcccggaataacgtggctgacctctggattatagttgtcgtggggaccgaatatgttgcacggaatgaccgaggtgtacacccggccatatttatcgtggtaggcgtggttctgcacgtctatcagtcgctttgcgtaggagtaaccataattggaggggtgcggcggcccattgtgcaccatggtctcatctatggggtagctggttttgtccggaaaaatgcatgtggacaggcaggacaccaccttcacgcatccctgctcgtgtgccgtttgcaggacattgtcgttaatgagcaggttgttgcgctaaaagtggattcgcatgaaatgggttttggaatcatctgtgagaccaggagctcaccaagaagtccaggttgttgttcatgttgtggaacaggcctccgaccattgcagccagatggatgacatgcgtgggcttctctcgggcgaagagtgcctgcgtggcggccagatttctgtggagagaatttgtttacggatacgttcaattgaatttcttcatgacttacgtcaaatctgcatctttagagcccgcaaaaaaccattgctcgtcctctggggactgctccttgatcacagcctccagggccttgcccaccagcccagttccgcctgtaaccagaactttcttcatgatttttgtgcgattccacaaatcaagtcaattagtttctaaagtaattttcgactcaatgcgaccagctgctttaaatgccggctaatcagtcagtgctgcctgcctggcgtttttaatctaatcctttagctatttcttgttatcagaaaaagccacttttagattctttactaagccccatttggtcacactgtgcccaggtagtttttgtttatgcggtgtcggatatgcgaaaaataatttaaatggatatggaaacgcaagttatagacaccgttaacgagtttctggtaatagtgaaaccctgcgtctccaaaaaatcacccactcatccacgctctccatttcgcagaaggtcgactcccttgacgaggcgttcgttagcgtcattgtattcaagccaaacaccgagcaagaacgagctacccgcttcgccaatgatttgggtaggtaaatgcgtctgctggaactcgaaaattgttaaaaactatctgtttcagttaccgcctttgggaacgtggcgcaggagaaccgggagcaggtgcttcggctctacctgttgcgtgccgccggtgcctccggatatcacatcaaagtgctgatggcggcactggtgaagctggtggacgcacacgtgatcaccgccaggatgctgtgcgacaaggtgctgatgtgcgagaaactggacttcgagcacaggaccttctggatcgagagcttccggctgatcaagcgtgtgatcgtccaggtggactacaagggtgtgcgcgagatcatgaaggtatgccgcgacaaggcacaatggtttccgctgaacgtcaacgttacctacatgccacagctactggccgttgaggatatcctgcgattcatctttgatcgcaacaattgcctgctgcccgcctactttattgccaacgagattatgcgtccgtttccttaccactggaaactcaaccggctgatgaccgactttgtcgaagagttccgcaccacggcacaaatggtttcgatcattggacatgccagcatgcttcccatcgtagagcatttcggctatgccgatcacatgatgaactcctggcgactggaccacaataccctgaagtttaactttaagggtagcctgccctacgagccagagctgctcgaagagcagaagcccctactccgctacgttttggagcagccgtactcaagggaaatggtctctcaaatgctgaacctgcaaaagcatcagaagcagcgctacaatgccctggaagagcagttggttaatctcatagtgcaggccatggagatgacggaggcgaatgatgccactgcgggaagtggctttaactcctcagacgagcagatcacgccctacgagtggatgtggctgcatctctcttcgcaactaatttactttgtgctctttcagttcgtaagctttatgcacatagtgttggcgctccacgaaaaggtaggtccatggtggatgaaattaatatttcttgtaattaactacttttcacctatagctttccaagttggagcttcgcaagggtcgcgatcaacttatgtggattctgttgcagtttatatccggaagcatacagaaaaatcctgtaagatcctgttctccacctgattgatcttatttttaatcgcttttaattttagatcaccaatttcctgcctgtgttcagattgtttgacctactatatcccgagctagagcctcttaagctgccagatatcaataaatcctcgatggttcgccatatggcacccatttgcgtttggattcacctgatgaagaaggcacgagtggaaaacatgaacatcaccagaccattgccaattgcactgaaaaaccactacgagtaatacctctaacttcctttggtgtttagatactaactgcttaattcccagctttctgcagcacctagtcacggctaacaccatgatgaacatgacgctaggaaacgacttccgcataattctcatctgcaatgcatactcaacgaatcaggagtacttcgggcgtcccatgggtctactgctggatgccctaaatggcacttcaaaatctccaaacggtggccaaatcccagccgtaactttttcggtcacggttctggacagcttgacggtgcacagtaagatgtcgttaatccacagcttcgtaactcagatgttaaaacaggcccaaagcaagggtcaagttccagcggctgcactactggaaacttatgccagacttctggtttatacagaaatcgagtcgctcggtataaagggattcctgagtaagtacagcctgttgaagtgattaaacaatatgtttatggttttttttcctcctaaaggccaactgatgccaacagtgtttaagaaccatgcgtgggccatgctgcacaccttaatggagatgttttcgtaccggctgcaccatgttcctactcactaccgggtccaattgctgtctctccttcattctctgtcctccgtgccgcagacaaacaagatgcagctcaatctctggttagttatacgtttatcgagtatagacttctttctaagttcttccctttgtatagttttgaatctactgcactgcgtctgatcaccagcattggatccgccgagtttcagccgcagttttcgcgttactttaacgacaaatctcccggagcagtggcgtctaatgagagcgaagagctaaacagagtacttattcttacgctagctcgatccatgcacgtacatggtggcggcgatgaaatgcagggatggtgcaaggacttcctttccaacatcattcagcacacgccgcactcgtggcccatgcattccctagcctgctttccgcccgccttaaacgagtactttacgcagaacaaccaacctccggagaacaagcagcagttgaagaaggccgtggaagaggaatatcgaacctggacgtcgatgaccaacgagaatgacataattgcgcacttcttgcgtccaactacgaatcctttattcctttgccttctgttcaaaataatttgggagacggagaacataagcccagtggcttacaagtgcgtaacattatgatttaaacacaatcattttttctgaccatacctttttttttagaattttggagggtataagcgcgagagccttgtccactcatctgcgtaaattttgtgactacttggtggctgaggtagctagctcatcggatggccgcgactttattcacaagtgcgtcgacaccattaacaacatgatttggaagttcaacgttgtgaccatcgatagggttgtgctttgcctggctctgcgaacgcacgagggtaacgaggctcaagtctgctttctcataattcagctgctcttgctgaaagccagcgagctgagaaatcgtgttcaggagttctgcaaggacaataatcctgatcactggaagcagagcaactggtaagttggacacttgattttgttaagagcacaaaggcatagttgttattatttctcaggcaggacaaacacttgtcattccatcaaaagtatccagagaagttcgcgttggacgagtcagcttcacagattccgctgcccgtgtacttcagcaatgtctgtctgcgattccttcccgttctggatgtggtagtgcacagatttatcgaacttaccattacaaatgtccaccagatattgggcttcattttggatcatctgagcatactctacaagtttcacggtatgttaaaagtggctttcgagaatttcataactttaaattaccctttaaattgcagatcgacctataacatatctgtacaacaccctccattattatgagcgaatcttacgagaccgccctgcgctaaagaagaaacttgtaagatttgttatgaatattatattcccttcttctaatacactgtgttgttccaggttggcgctatcaccagcgcctttagcgagattcggccgcccaactggagtgttagtgagccgtacaaggtgtatttgcaaagccaagactcgctgtggacccccgaattgagctactatatgagtttgatcaggagacttgcagacagtaagctaggatttgggaaaatactatgatgtgttcatatattcatgcgtaaccccttttattttgcagcaattagtgggaagaatgtattttactccaccgattggcgttttaacgagttcccgaatgcgccaacccatgcgctctatgtgacatgcgtggagctgctgggtctgccggtggcaccgccactggtggccagcaatctcatcgatgttatagtaagcggatatgcggttattccgcaaaaggacattcacagctacattaatgctgtgggcattgttctggctgccttgcctgagccctactggagcggcatatacgatcgcctacaggatatgctcaacacacccaatatgctgaactggacctacagattcaatgctttcgagttgtttaacttcaagacagtgcgtgaggcgatgctagaaaagacctacgccgtggtgttggcagtagctcactcagtgttccatcacatgggcgcctttaagctggcggcaatgaccaggtacctcaaggagaagctaaagccgtgcgtgcgaaccgaacaacaattgctgtatttgtgccacgtttttggccccttcctgcaacgaatagagttggaaaaaccgaacgctgtggctggcatagccgtgttgctttacgaaattcttgagatcgtggacaagcatcatggtccgaagcctctgcagtacatggaccagatctgcgatttcctgtaagcaaatccacaaaatcgcatgaaagggtactaaacaaatgtgtttgtatcatttcagctatcacattaagtatatacatgtgggtaatatcattaagaacgaatcggaagccatcattaagcggctacggcccctgctgcaaatgcgcctgaggttcataacccaccttaacttggaggatattcacactgaaaagatgtaagggccatttaattcaaactctacttcggtttaaacataacttttccaatttcagcaacgacaataccagcaataatgcaataaccagccaaacgcagtctccaatgcaaacacagcatcagcagcagccgcagcaaccacatcagcaacaacagcagcaacaacaacagcaacagcagcagcagcagcagcaacagcagcaacaacagatgcagcagcaacaaatcaacgcagtacaaacaaccagcgttcccttgggcagcggtggcaacctacagcagcagcagcaaatcaaccagcagcaacaaatgtatatgcagcacatgcagcagcatcagcacatgcaaaacatgcgccacaattagactttgtgggactcccaagtcagttcaagctgacataacgacataagcctaatttatagtagtattatcttatattttatcgcttattgcattattcattttccattgaatgtgtaaacagttctcagatatgtttaagttagatactaagggaactttttgtaagtcacagctgtcggcccaagtcctccctccagctttacaatcaaaagcttgacttaataagcccagcttaaagctcttcgtagataacctgtagttggtgatcttgtccacctcgagcgccgttctcagttgtgatcgcagagcactgcgatgtatgcgcttccgggaatccagattctgttgctgattgcttcagtcagcgtggtgaccgagtactgcgacaatggaacgggcgagtgcaaggagctgacgccctccgactgtccagtgatattctacaaccagcacctgatcggagccgaagtcaagtactgcgacgagttcaacgacattgtctgctgtcccataccgctggatcaccagaatctgaagccagccgaacagacgaggccttttgagaagcgtgaggagtgactgcaacaattcccttcgattgatggaatttgaatattcgttttttttttttagagtgcaagcaatacaacgaggtcagatccgcctgccagtccacgcccttcatcgtgggcggcacaaaggcatccggtaaagagtttcccttcatggccctaatcggcactcatcggcccaacaagtccaagtcggacatcaattgggattgtggtggatccgtggtgcatcccaaattcgtactgactgcggcgcattgcctggagacggatgagtaagtattctctgggattctcttgagtgatactccttccatatgtgtacttttaattgtcagatcgaaggccgagcgactggacccaaactttgattcgcccaaatttgtagttcgcctgggggagctggactacaacagcaccaccgatga

SEQ ID NO: 7073 - DNA, 4320 bp, DROSOPHILA
atggaaacgcaagttatagacaccgttaacgagtttctgaaggtcgactcccttgacgaggcgttcgttagcgtcattgtattcaagccaaacaccgagcaagaacgagctacccgcttcgccaatgatttggttaccgcctttgggaacgtggcgcaggagaaccgggagcaggtgcttcggctctacctgttgcgtgccgccggtgcctccggatatcacatcaaagtgctgatggcggcactggtgaagctggtggacgcacacgtgatcaccgccaggatgctgtgcgacaaggtgctgatgtgcgagaaactggacttcgagcacaggaccttctggatcgagagcttccggctgatcaagcgtgtgatcgtccaggtggactacaagggtgtgcgcgagatcatgaaggtatgccgcgacaaggcacaatggtttccgctgaacgtcaacgttacctacatgccacagctactggccgttgaggatatcctgcgattcatctttgatcgcaacaattgcctgctgcccgcctactttattgccaacgagattatgcgtccgtttccttaccactggaaactcaaccggctgatgaccgactttgtcgaagagttccgcaccacggcacaaatggtttcgatcattggacatgccagcatgcttcccatcgtagagcatttcggctatgccgatcacatgatgaactcctggcgactggaccacaataccctgaagtttaactttaagggtagcctgccctacgagccagagctgctcgaagagcagaagcccctactccgctacgttttggagcagccgtactcaagggaaatggtctctcaaatgctgaacctgcaaaagcatcagaagcagcgctacaatgccctggaagagcagttggttaatctcatagtgcaggccatggagatgacggaggcgaatgatgccactgcgggaagtggctttaactcctcagacgagcagatcacgccctacgagtggatgtggctgcatctctcttcgcaactaatttactttgtgctctttcagttcgtaagctttatgcacatagtgttggcgctccacgaaaagctttccaagttggagcttcgcaagggtcgcgatcaacttatgtggattctgttgcagtttatatccggaagcatacagaaaaatcctatcaccaatttcctgcctgtgttcagattgtttgacctactatatcccgagctagagcctcttaagctgccagatatcaataaatcctcgatggttcgccatatggcacccatttgcgtttggattcacctgatgaagaaggcacgagtggaaaacatgaacatcaccagaccattgccaattgcactgaaaaaccactacgactttctgcagcacctagtcacggctaacaccatgatgaacatgacgctaggaaacgacttccgcataattctcatctgcaatgcatactcaacgaatcaggagtacttcgggcgtcccatgggtctactgctggatgccctaaatggcacttcaaaatctccaaacggtggccaaatcccagccgtaactttttcggtcacggttctggacagcttgacggtgcacagtaagatgtcgttaatccacagcttcgtaactcagatgttaaaacaggcccaaagcaagggtcaagttccagcggctgcactactggaaacttatgccagacttctggtttatacagaaatcgagtcgctcggtataaagggattcctgagccaactgatgccaacagtgtttaagaaccatgcgtgggccatgctgcacaccttaatggagatgttttcgtaccggctgcaccatgttcctactcactaccgggtccaattgctgtctctccttcattctctgtcctccgtgccgcagacaaacaagatgcagctcaatctctgttttgaatctactgcactgcgtctgatcaccagcattggatccgccgagtttcagccgcagttttcgcgttactttaacgacaaatctcccggagcagtggcgtctaatgagagcgaagagctaaacagagtacttattcttacgctagctcgatccatgcacgtacatggtggcggcgatgaaatgcagggatggtgcaaggacttcctttccaacatcattcagcacacgccgcactcgtggcccatgcattccctagcctgctttccgcccgccttaaacgagtactttacgcagaacaaccaacctccggagaacaagcagcagttgaagaaggccgtggaagaggaatatcgaacctggacgtcgatgaccaacgagaatgacataattgcgcacttcttgcgtccaactacgaatcctttattcctttgccttctgttcaaaataatttgggagacggagaacataagcccagtggcttacaaaattttggagggtataagcgcgagagccttgtccactcatctgcgtaaattttgtgactacttggtggctgaggtagctagctcatcggatggccgcgactttattcacaagtgcgtcgacaccattaacaacatgatttggaagttcaacgttgtgaccatcgatagggttgtgctttgcctggctctgcgaacgcacgagggtaacgaggctcaagtctgctttctcataattcagctgctcttgctgaaagccagcgagctgagaaatcgtgttcaggagttctgcaaggacaataatcctgatcactggaagcagagcaactggcaggacaaacacttgtcattccatcaaaagtatccagagaagttcgcgttggacgagtcagcttcacagattccgctgcccgtgtacttcagcaatgtctgtctgcgattccttcccgttctggatgtggtagtgcacagatttatcgaacttaccattacaaatgtccaccagatattgggcttcattttggatcatctgagcatactctacaagtttcacgatcgacctataacatatctgtacaacaccctccattattatgagcgaatcttacgagaccgccctgcgctaaagaagaaacttgttggcgctatcaccagcgcctttagcgagattcggccgcccaactggagtgttagtgagccgtacaaggtgtatttgcaaagccaagactcgctgtggacccccgaattgagctactatatgagtttgatcaggagacttgcagacacaattagtgggaagaatgtattttactccaccgattggcgttttaacgagttcccgaatgcgccaacccatgcgctctatgtgacatgcgtggagctgctgggtctgccggtggcaccgccactggtggccagcaatctcatcgatgttatagtaagcggatatgcggttattccgcaaaaggacattcacagctacattaatgctgtgggcattgttctggctgccttgcctgagccctactggagcggcatatacgatcgcctacaggatatgctcaacacacccaatatgctgaactggacctacagattcaatgctttcgagttgtttaacttcaagacagtgcgtgaggcgatgctagaaaagacctacgccgtggtgttggcagtagctcactcagtgttccatcacatgggcgcctttaagctggcggcaatgaccaggtacctcaaggagaagctaaagccgtgcgtgcgaaccgaacaacaattgctgtatttgtgccacgtttttggccccttcctgcaacgaatagagttggaaaaaccgaacgctgtggctggcatagccgtgttgctttacgaaattcttgagatcgtggacaagcatcatggtccgaagcctctgcagtacatggaccagatctgcgatttcctctatcacattaagtatatacatgtgggtaatatcattaagaacgaatcggaagccatcattaagcggctacggcccctgctgcaaatgcgcctgaggttcataacccaccttaacttggaggatattcacactgaaaagatcaacgacaataccagcaataatgcaataaccagccaaacgcagtctccaatgcaaacacagcatcagcagcagccgcagcaaccacatcagcaacaacagcagcaacaacaacagcaacagcagcagcagcagcagcaacagcagcaacaacagatgcagcagcaacaaatcaacgcagtacaaacaaccagcgttcccttgggcagcggtggcaacctacagcagcagcagcaaatcaaccagcagcaacaaatgtatatgcagcacatgcagcagcatcagcacatgcaaaacatgcgccacaattag

SEQ ID NO: 7074 - protein, 1439 aa, DROSOPHILA
METQVIDTVNEFLKVDSLDEAFVSVIVFKPNTEQERATRFANDLVTAFGNVAQENREQVLRLYLLRAAGASGYHIKVLMAALVKLVDAHVITARMLCDKVLMCEKLDFEHRTFWIESFRLIKRVIVQVDYKGVREIMKVCRDKAQWFPLNVNVTYMPQLLAVEDILRFIFDRNNCLLPAYFIANEIMRPFPYHWKLNRLMTDFVEEFRTTAQMVSIIGHASMLPIVEHFGYADHMMNSWRLDHNTLKFNFKGSLPYEPELLEEQKPLLRYVLEQPYSREMVSQMLNLQKHQKQRYNALEEQLVNLIVQAMEMTEANDATAGSGFNSSDEQITPYEWMWLHLSSQLIYFVLFQFVSFMHIVLALHEKLSKLELRKGRDQLMWILLQFISGSIQKNPITNFLPVFRLFDLLYPELEPLKLPDINKSSMVRHMAPICVWIHLMKKARVENMNITRPLPIALKNHYDFLQHLVTANTMMNMTLGNDFRIILICNAYSTNQEYFGRPMGLLLDALNGTSKSPNGGQIPAVTFSVTVLDSLTVHSKMSLIHSFVTQMLKQAQSKGQVPAAALLETYARLLVYTEIESLGIKGFLSQLMPTVFKNHAWAMLHTLMEMFSYRLHHVPTHYRVQLLSLLHSLSSVPQTNKMQLNLCFESTALRLITSIGSAEFQPQFSRYFNDKSPGAVASNESEELNRVLILTLARSMHVHGGGDEMQGWCKDFLSNIIQHTPHSWPMHSLACFPPALNEYFTQNNQPPENKQQLKKAVEEEYRTWTSMTNENDIIAHFLRPTTNPLFLCLLFKIIWETENISPVAYKILEGISARALSTHLRKFCDYLVAEVASSSDGRDFIHKCVDTINNMIWKFNVVTIDRVVLCLALRTHEGNEAQVCFLIIQLLLLKASELRNRVQEFCKDNNPDHWKQSNWQDKHLSFHQKYPEKFALDESASQIPLPVYFSNVCLRFLPVLDVVVHRFIELTITNVHQILGFILDHLSILYKFHDRPITYLYNTLHYYERILRDRPALKKKLVGAITSAFSEIRPPNWSVSEPYKVYLQSQDSLWTPELSYYMSLIRRLADTISGKNVFYSTDWRFNEFPNAPTHALYVTCVELLGLPVAPPLVASNLIDVIVSGYAVIPQKDIHSYINAVGIVLAALPEPYWSGIYDRLQDMLNTPNMLNWTYRFNAFELFNFKTVREAMLEKTYAVVLAVAHSVFHHMGAFKLAAMTRYLKEKLKPCVRTEQQLLYLCHVFGPFLQRIELEKPNAVAGIAVLLYEILEIVDKHHGPKPLQYMDQICDFLYHIKYIHVGNIIKNESEAIIKRLRPLLQMRLRFITHLNLEDIHTEKINDNTSNNAITSQTQSPMQTQHQQQPQQPHQQQQQQQQQQQQQQQQQQQQQQMQQQQINAVQTTSVPLGSGGNLQQQQQINQQQQMYMQHMQQHQHMQNMRHN

SEQ ID NO: 7075 - DNA, 6724 bp, DROSOPHILA
ggtaatgtacatttcccatggaatggaggccattgggattgagatcggggatactcggagatgggagaagagagatccggtcatgtcgtccacaatagaaactgcagaacgcagtgaatacacgctgatattttagactatttaaaaaaaaaaaagagtgaggcacaagtgcgggctgttctcggggatcacaggagcagtgcgtccaggagaccaacccgggctaacaggattacaactgcttgaatcgtagctcattttaagcccactatggattgcatccgctggtgtaccatgtataataatcgtgcacgaaatactcgcttgtaaacacactacacacacacacgtcttttataaataatacccgcaactattaaaactatatcagataatccaactaacgctgatcggaaaggccaactattgtatctgcatatagctattaccaacctatcacttggagtccttcacgcccggatcggggtcaggggtcatgggtcaggaataaataaacatacatagattttgaaaatactctgaacacgtctcgccttcagcgctcgtttaattgttagccataagaacaataaataataataaaaattctcagtagtacataaaagtctgcaatcgcattggccatttcgctcgattctatatatattatatatatatagatatatataaagatattgtcatgggtttaagccgcagaggggattttctagcctcagaaagaaagctatagttccagaaacaatttgttatacggaaagtttaaaaaaaagagtatattatcgaagttctcgctgatttagaaagttattcgaaactaagaaatctttcgagcgaaactggctttttgattggcagatcagcatcatcaacatcagctgcatcatcgtcgtcgtcgtcatcatcatccttaaccagtatataaaatcttaggattacaaaaaaagaatgtgtagttagaaattcagtggagtgcgggtttttagcagctcagtatgctcttgatccagtcgtgcagatgcacctcgatcacgttcacctgcccgtagttcttcaaatggaactgattgaacgcggtggtcagatggatgacggccgaaacgaagtcgctcagccggagcgtgccatccttgcgaatgtaccgctggatcaggcagttcatgatgtccgtgctcagctgaaaaccgatgtcgcagagggcgtcgcgcagtcgctccgcacgcaatatgcccgccttctccttggtgtacatcttgaagacgccctgccaggacttcaggttgaccatgaaggtcttgaactgctggaacgtgatgcgaccactgccgctccggtcctgcagagcgatcacctggcgacagatgtcgatgttggcgcaacccttgatataatcattgggcaggcacgcctccaggagctcgtgcagctcgaagcagttaatggtcttgttctcatccgccagttgcatgtacacgggctcatattggcacacactcttgaccttcggcccgccgcaccgttcggcatctgtgctcttgagtgccggaaatggatccagcagtatcatggtctgcgtctccaggcaggagagtcggaaggatccggtgcccaggatgcggaccgtgaaatgtgcctcctccgccggctcataggtggtcggtatgaggacgtagtgacccgcctccaggtgcgtatgatagctaacgtgccgcgtattcccatagtccgagttcagatagctcacatggttcttgaagaagtccttctgcaggcactcgctgagcatatactcgccatcccatgtgtacatcgtaaagccaatgaccttcggctccacggccgtgtgctgattgagggcaattaccagatcctgctcatcctgcacggatatcagtagctgggggttgatatggaacgactcgtgattgcgacaaccaccggcggtgacgcctcgcttccactggccctggtgcattttcatcttccagtgcagcggacgactctttagcatctcctcgtcgttggacgtctccgtgtccaggtacaccacctccatggtgctaaaaatctccacaaagtcgcagaacgacagccaaaactcgccgggaccaagttgccggatgagacgcgctcgctccacctgcgagacacgctcccacgtcttggacatcggtgaccagtcgccgaggaagtgcgtcttctcgccgaacggcttgctcgagaacgtgtccttcaggcacaccagctgcaccgagtcacccatcagggtcttcaccttgtccaggctggagagtctgtaagtttcaatggcaaatggtcgttgcagtagtaaagacattagaaggtaatagatcgatggatgtcctacctgtagttaacgttcaccagaatcccattgggcatgcgctcggcgagattcttcttggccacggttgcgctcttgtccgccaagcaggtgacaatgcaggtggtggtgagtagctccttcagcgtctgtggcctgatgttgtccgacaggatgggcatttgccggaccacgccgcccaggagatcagtgagtccgtcggaacgagtgccgtacttgagggcctcgtaggagccgtgcaacttggcaatggccttctccagcagggcggcccaaaagcaattggatgcctgcggctgcatgaacgccagccgtccattgatggtgggcagacggtcgtcgaccagtacctccacccactcgccgcaccaccacaaacggaaacgaaagacgccgtgagcactggccagtgtctgatcggcgggcaccacgcgatagaagagattcctcagggaactcaacagtcccaggcaggagaccagccagcgatcgcccattttgccaggcaccacatcgaactccgccgattcgttgaggaacactggtgccgccgaactgttggcagccaccgcaccggagccactatccgccaaatccatgatacgcttccattggaaggtgaacggcggtgtctggtagtagaagaccgaagactggaccgcggggaaatcggggtcttcccacagcacgttcttcgatctgcaatcgctcagtatgcgctcgtatttggatgccatcttctgggcttcgatatcctttgcatcacttccgctttcgagttgctatcctgatgcctgctagtcgtagtcccactgcgatttgccttggtctccgcccctcgtagccgaagtgaaagttaaccagctgcatgaaatatacaatgccaactagcttagccaactctagcttcgatcccgaaccggttccgttcggttcatctgcgggaaccgttttaattgcgccccaaactccatcgcagccaccgactccgccaactggttccagatgcgccagttcagatacgcgactccatcatcttggcgcgttgcgcatgcgcatctggaatgatcgattcaattatgatgcatttgctgatcaatatttgggaactagttgaacagaaaggcattgcatttgaaaaatatttagtaagcgcttcaaattaagtacacgggattaacacataaatatgacatctttttaatgacacttaaatacaaacatagatgtatgtacatatatatgtatgtgcgactatattgtgtcacattcaattcatatagttcacatttatattatatatatctatatatatcctttagttgatgttccgctacaaagaaaagttctaactaaatttaaaacctaactatcagttaatcgatggtcaaatatcgatagaaaatctagaaatgaaatcaaatttgcatatacatatgtgtgtatgtatgtatgtatatatcctctaataaaaacacaatgcatattagatattagattagatctgaaaccagcttaagccaattgaaaatcaaaggcgcatcacaagtgggcataacaacgtttattgcaaatatacaaaatgctactaattatgctagaattttaaaaataagtacgcacagtatttggatggcagtacgtgtagtagattattaacagaacaattccgacaatatacaaggcaatgatggctgtggcaagatacaagggaatgtacaaagcgcaggcgatgatattttgcaacaaacagaatgtgagatagaaggcgtacttatatttggttggtgcatccttgacgggcgtaaaaataaatagatagacaacgccaaagcacaggcagtacgaatagttcatggggcgggattttgcgatcattggcgagtccacaaagaacacaatggtgccgtaaaagcaagccagtgtcgcgcagatgatcagcgtttcgatgggaaaaatactggccacatacgcgatgcaaagcgttctcgaaactacgaaataaaagcgaataactaaaagcttaatatacacattctaagcaacacagctaactaactactactaaccagtgaggcagagcaggaagagaaattgcagaaatcgtcccttcgccgcaatatcatgtttgtccagttgggccaggcgattggagtgattgtacgcctggatgcaccacgctatgttgccgaagtagacgatcagggcgatgtggcggtagtctgggaaaagaaatttgaatgggtaaatggcatccatcgactttccattccgagtttcactttcgttggctacaatcaatgagttaggctaaacgcctaaactgactttgatttgcgaaagtgaacgtcagaatttggtgtttataagcttaaattacttatgcattagttatcttaattaaggcagagagagagagagattgaaatatggcactaatgtagtattaatatcgtattacatgtgaactccaatgtcgattgcaaaagaattgccagctgtagtattttctgcggtgctgattccaaaaacgagtcgaatagacgaacgaaactaacattgcactcctccgtcatgagtttttggtaatatctgtaagataagaattcagatattcgttataaacattctaaagtgctcacttatgatgaaaagagaagataaactaaacggcagtactaccatttagggcattaagctactattaactagttttatacactgacactagcattactcactcgatctccgcctgcttgtcatcccgctccttggccaacgagtatttgaacgcatagtttaggacatagacatcgcggaagagatatgagatcacagcatttgagtacacccctcgctccaggatgcgtttttcgccggcatgagcgctcttcaagctgaaattcaaatacaaatttatcgtttagctgtagatttcgggggaagtacacgctatcgcgatatgtcacatacgtatgtatatatatgaccgatgtgaccaccatgggcaccagaatggagccaatggtccaggcgcagtatccgtaggactcctccatccagtacacgtacgccaggctccagttgatgcaaatcgagacgaagcgccacagaatggacaccacagtgagcagcatgcttagtttcgagatcggccccatcataagggcgtccacttcggttctttgctccgcggaggccatgtctcctccgcctccttattgcacatgtgccaccctagccacacacaaatatccaaggcctcgacctccaaactactctcgccttcaacttgctgacactggttttcgactaaaaaaaaaaacaaaacactgaagattagaataaagactgaattctacgagaacttgttcatttgaactagagatagatcgatcgtacgcttttatcggcggaaagccgatagtgagctgttgcatcgaaagcgtcatcgacgaagtgccatctctagccgacgggtgggatagaatctccaattgggatttccatccagtgatttcctaattaaattaattttttccaattgcccaaaggcataggcatatttcgcaaaacgaacaaatatgtttgcttgaagcgcatagaatcacaaacaaaagtgcaaatctcagagcttaaaaaccagagcaaaggagaataacggaagaggaggcaagcaaaaagacaaagaggagtgcaaaaaatacagcaaacatcatgcacaggacatatgtaagccatgcgatatacgccatttggctggttatattcgccactgccggcataatggcccagctagacctggatcagatccagacccagctgcccgaccagctgaggaagtcaaactttagcgtgaacgacgccaaggagctatttcgcaacaaatgcatcgaggtggccggcgaggaggcgggcgtcgaggcatacggcgagatcgagtccggattcatggtgctaaccgagtgcctcaatggcattgtcaactacacggcaatgcagcaggagatacaggaagcgtcgcccaagggcgaactggatgtggtcttcaacaagtactgcagccggcgttcgaatgccgtcgagtgtgtggatgcgttcacggccaaactggtgccctgtctggtgcaggaggagcgcgagggccaggatgtcattaagcagatcatccagagtctgctcaactttgtgtgccacaaggatggcgatcagatagccctgttcattgccgaaaagggacccgaatgcattgagtcccagaaggacaacattcagcagtgcgtgaacagcacgttctccgagtacctgaacgtgtcggatctgcaggacaaccgcatcagg

SEQ ID NO: 7076 - DNA, 3270 bp, DROSOPHILA
aatcttcagtgttttgtttttttttttagtcgaaaaccagtgtcagcaagttgaaggcgagagtagtttggaggtcgaggccttggatatttgtgtgtggctagggtggcacatgtgcaataaggaggcggaggagacatggcctccgcggagcaaagaaccgaagtggacgcccttatgatggggccgatctcgaaactaagcatgctgctcactgtggtgtccattctgtggcgcttcgtctcgatttgcatcaactggagcctggcgtacgtgtactggatggaggagtcctacggatactgcgcctggaccattggctccattctggtgcccatggtggtcacatcggtcatatatatacataccttgaagagcgctcatgccggcgaaaaacgcatcctggagcgaggggtgtactcaaatgctgtgatctcatatctcttccgcgatgtctatgtcctaaactatgcgttcaaatactcgttggccaaggagcgggatgacaagcaggcggagatcgaatattaccaaaaactcatgacggaggagtgcaatgttagtttcgttcgtctattcgactcgtttttggaatcagcaccgcagaaaatactacagctggcaattcttttgcaatcgacattggagttcacatactaccgccacatcgccctgatcgtctacttcggcaacatagcgtggtgcatccaggcgtacaatcactccaatcgcctggcccaactggacaaacatgatattgcggcgaagggacgatttctgcaatttctcttcctgctctgcctcactgtttcgagaacgctttgcatcgcgtatgtggccagtatttttcccatcgaaacgctgatcatctgcgcgacactggcttgcttttacggcaccattgtgttctttgtggactcgccaatgatcgcaaaatcccgccccatgaactattcgtactgcctgtgctttggcgttgtctatctatttatttttacgcccgtcaaggatgcaccaaccaaatataagtacgccttctatctcacattctgtttgttgcaaaatatcatcgcctgcgctttgtacattcccttgtatcttgccacagccatcattgccttgtatattgtcggaattgttctgttaataatctactacacgtactgccatccaaatactcaactcgaaagcggaagtgatgcaaaggatatcgaagcccagaagatggcatccaaatacgagcgcatactgagcgattgcagatcgaagaacgtgctgtgggaagaccccgatttccccgcggtccagtcttcggtcttctactaccagacaccgccgttcaccttccaatggaagcgtatcatggatttggcggatagtggctccggtgcggtggctgccaacagttcggcggcaccagtgttcctcaacgaatcggcggagttcgatgtggtgcctggcaaaatgggcgatcgctggctggtctcctgcctgggactgttgagttccctgaggaatctcttctatcgcgtggtgcccgccgatcagacactggccagtgctcacggcgtctttcgtttccgtttgtggtggtgcggcgagtgggtggaggtactggtcgacgaccgtctgcccaccatcaatggacggctggcgttcatgcagccgcaggcatccaattgcttttgggccgccctgctggagaaggccattgccaagttgcacggctcctacgaggccctcaagtacggcactcgttccgacggactcactgatctcctgggcggcgtggtccggcaaatgcccatcctgtcggacaacatcaggccacagacgctgaaggagctactcaccaccacctgcattgtcacctgcttggcggacaagagcgcaaccgtggccaagaagaatctcgccgagcgcatgcccaatgggattctggtgaacgttaactacagactctccagcctggacaaggtgaagaccctgatgggtgactcggtgcagctggtgtgcctgaaggacacgttctcgagcaagccgttcggcgagaagacgcacttcctcggcgactggtcaccgatgtccaagacgtgggagcgtgtctcgcaggtggagcgagcgcgtctcatccggcaacttggtcccggcgagttttggctgtcgttctgcgactttgtggagatttttagcaccatggaggtggtgtacctggacacggagacgtccaacgacgaggagatgctaaagagtcgtccgctgcactggaagatgaaaatgcaccagggccagtggaagcgaggcgtcaccgccggtggttgtcgcaatcacgagtcgttccatatcaacccccagctactgatatccgtgcaggatgagcaggatctggtaattgccctcaatcagcacacggccgtggagccgaaggtcattggctttacgatgtacacatgggatggcgagtatatgctcagcgagtgcctgcagaaggacttcttcaagaaccatgtgagctatctgaactcggactatgggaatacgcggcacgttagctatcatacgcacctggaggcgggtcactacgtcctcataccgaccacctatgagccggcggaggaggcacatttcacggtccgcatcctgggcaccggatccttccgactctcctgcctggagacgcagaccatgatactgctggatccatttccggcactcaagagcacagatgccgaacggtgcggcgggccgaaggtcaagagtgtgtgccaatatgagcccgtgtacatgcaactggcggatgagaacaagaccattaactgcttcgagctgcacgagctcctggaggcgtgcctgcccaatgattatatcaagggttgcgccaacatcgacatctgtcgccaggtgatcgctctgcaggaccggagcggcagtggtcgcatcacgttccagcagttcaagaccttcatggtcaacctgaagtcctggcagggcgtcttcaagatgtacaccaaggagaaggcgggcatattgcgtgcggagcgactgcgcgacgccctctgcgacatcggttttcagctgagcacggacatcatgaactgcctgatccagcggtacattcgcaaggatggcacgctccggctgagcgacttcgtttcggccgtcatccatctgaccaccgcgttcaatcagttccatttgaagaactacgggcaggtgaacgtgatcgaggtgcatctgcacgactggatcaagagcatactgagctgctaa

SEQ ID NO: 7077 - protein, 1043 aa, DROSOPHILA
MASAEQRTEVDALMMGPISKLSMLLTVVSILWRFVSICINWSLAYVYWMEESYGYCAWTIGSILVPMVVTSVIYIHTLKSAHAGEKRILERGVYSNAVISYLFRDVYVLNYAFKYSLAKERDDKQAEIEYYQKLMTEECNVSFVRLFDSFLESAPQKILQLAILLQSTLEFTYYRHIALIVYFGNIAWCIQAYNHSNRLAQLDKHDIAAKGRFLQFLFLLCLTVSRTLCIAYVASIFPIETLIICATLACFYGTIVFFVDSPMIAKSRPMNYSYCLCFGVVYLFIFTPVKDAPTKYKYAFYLTFCLLQNIIACALYIPLYLATAIIALYIVGIVLLIIYYTYCHPNTQLESGSDAKDIEAQKMASKYERILSDCRSKNVLWEDPDFPAVQSSVFYYQTPPFTFQWKRIMDLADSGSGAVAANSSAAPVFLNESAEFDVVPGKMGDRWLVSCLGLLSSLRNLFYRVVPADQTLASAHGVFRFRLWWCGEWVEVLVDDRLPTINGRLAFMQPQASNCFWAALLEKAIAKLHGSYEALKYGTRSDGLTDLLGGVVRQMPILSDNIRPQTLKELLTTTCIVTCLADKSATVAKKNLAERMPNGILVNVNYRLSSLDKVKTLMGDSVQLVCLKDTFSSKPFGEKTHFLGDWSPMSKTWERVSQVERARLIRQLGPGEFWLSFCDFVEIFSTMEVVYLDTETSNDEEMLKSRPLHWKMKMHQGQWKRGVTAGGCRNHESFHINPQLLISVQDEQDLVIALNQHTAVEPKVIGFTMYTWDGEYMLSECLQKDFFKNHVSYLNSDYGNTRHVSYHTHLEAGHYVLIPTTYEPAEEAHFTVRILGTGSFRLSCLETQTMILLDPFPALKSTDAERCGGPKVKSVCQYEPVYMQLADENKTINCFELHELLEACLPNDYIKGCANIDICRQVIALQDRSGSGRITFQQFKTFMVNLKSWQGVFKMYTKEKAGILRAERLRDALCDIGFQLSTDIMNCLIQRYIRKDGTLRLSDFVSAVIHLTTAFNQFHLKNYGQVNVIEVHLHDWIKSILSC

SEQ ID NO: 7078 - DNA, 5313 bp, DROSOPHILA
ttatgagcttgactagtagcagaatgatattgctttttttacacatacctgtattcaaaacgttcctgcacgtgcctactgttacaactattattcgcgccgggttatcgatgatttctgcgagctgccgtatcgatggcatggggtaagtggattataaggtatgtctctatgtttttacaaaaatcgcttgctgtatctaaacaattgcgctaaatgagcaaatttaagaaaacttttaactgaattagagacaaaattgccgtatcgatggcatggggtaagtggattataaggtatgtctctatgtttttacaaaaatcgcttgctgtatctaaacaattgcgctaaatgagcaaatttattaaaacttttaactgaattagagacaaaatattgccgtatcgatggcatggggtaagtggattataaggtatgtctctatgtttttacaaacatcgcttgctgaatctaaacaattgcgctaaatgagcaaatttattaaaacttttaactgaattagagacaaaatattgccgtatcgatggcatgtggtaagtggattataaggtatgtctctatgtttttacaaaaatcgcttgctgtatctaaacaattgcgctaaatgagcaaatttaagaaaacttttaactgaatttgagacaaaattgccgtatcgatggcatggggtaagtggattttaaggtatgtctctatgtttttacaaaaatcgcttgctgtatctaaacaattgcgctaaatgagcaaatttaataaaacttttaactgaattagagacaaaatattgccgtatcgatggcatggggtaagtggattataaggtatgtctctatgtttttacaaaaatcgcttgctgtatctaaacaattgcgctaaatgagcaaatttaataaaacttttaactgaattagagacaaaaaaaaaagttttcatatatattaaccttttgttctctaaccatatcgcggtagtctggcagccctgtcacaaccggtaccgataaccacgaccagctgattgaaccggcatatttgcgaaattaaatccttagcgattgtatttaattatggccgattcgtgcgcggaaaatgccgccaaagggacggaaaatgagcggccgaaggaagtggaggccagcgccgacaccgtcccacaggtggaggagggcgtagaggagtatttgaagcgtaagaacatggtcctcctcgactacgaaaagcaaatgtttctcgatttggtcgaggccgatggtctgctggtttgcgccaagtaagtcgtgtgtgctattcctatagtccagtctaacccagatattgaaataccataggggcctgagctacgaccgcgttgtaatcagcatcctcaaggcctacagcgattccggcaatcttgtgcttgtgatcaacagttctgactgggaggagcagtattacaagtccaaaatcgaacccaaatatgtccacgaagtggccagcacggccaccgaaaggtaagcgctcgcaattcctaaaaaatatacatataaaacttcgcccgtttgattgattgactattctgatagagagcgcgtttatctggaaggcgggctgcagttcattagcacgcgcatcctggtggtggatctgctgaagcagcgaatccccatcgagctgataagcggaatcattgtcctgcgggcgcacaccataattgagagttgccaggaggcgttcgccttgcgattgttccgtcagaagaataaaaccggattcgtgaaggctttctccagcagcccggaggccttcaccattggctactcacatgtggagcggaccatgcgcaatctgttcgtaaagcatttgtatatctggccccgttttcatgagagcgtgcgcaccgtcctgcagccatggaagatacaatcaatcgagatgcatgttccaattagccagaacataacgtccattcaatcacacattctggagataatgaactttctcgtgcaggaaatcaagcggataaatcgtactgtcgatatggaggccgttaccgtggagaactgtgtgaccaaatcattccacaagatcctgcaggcgcaactggattgcatctggcatcagcttaattctcaaacaaagttgatagtagcagatcttaagattctgcgcagcttaatgatgtacgtatacaacttgcacttccttttgatttgatatttgatattggctaattttgatagctccaccatgtaccacgatgctgtgagcgcatatgcctttatgaaacgctaccggagcacggagtacgcgttgagcaactcaggatggactttactggacgccgccgaacagatctttaaactatccaggcagcgtgttttcaatggccagcagggtaggcaaatcccaataaacattaagcattggccctctaaatgatatgtattaattgtatagagttcgaaccggaaccctgtcccaaatggcaaactcttacggatttgcttaccaaggaaatacccggcgatatgcggcggagtaggcgatcggaacaacaaccgaaagtgctgatcctctgccaggatgcacggacgtgtcatcagttgaaacagtatctcacgcaaggtgggccacgttttctactccagcaggcattgcaacatgaagtgccggtgggcaaactcagtgacaattacgccaaagagagccaaactcgttcagctccgccaaagaatgtttcatccaataaggagctgcgtagggaagaggtttctggttctcagccacctttagctggtatggatgaattggcccagcttttgagcgaatcggaaacagagggtcagcacttcgaagagagttacatgctcaccatgacgcagcctgtggaagtcgggccagcagcgatagacattaaacccgatccggatgtgtctattttcgagacaataccggaactagaacaatttgatgtcactgcggccctggcctctgtgccacatcagccatacatttgcttgcagaccttcaaaacggagagggagggctccatggcactggagcacatgctggagcaactgcagccgcactatgttgtcatgtacaacatgaatgtgacagccattcggcaattggaggttttcgaggccagacgtcgcctgccgcctgcagatcgcatgaaggtgtatttcctgatccatgcacgcacagtggaggagcaagcctatctgaccagtttgcgtcgagaaaaggcagccttcgagttcattatcgacactaaaagtgtaaggttttcaaagtatgttttcctttaacttggtatcaatatttttgtcgctaccatccaacagaaaatggtgattccaaagtaccaggatggaaagaccgatgaagcgtttttgttattaaagacttacgatgatgagccgacggacgagaatgccaagagtcgccaagcgggtgggcaagctccgcaggcgaccaaagagacgccaaaagtgattgtggatatgcgtgagtttcgctcagatctgccctgtttgattcacaagcgtggtctggaagtgctgcccttgaccattacgattggcgattatatactcacaccggatatttgtgtggagcgaaagtccatttctgatttgattgggtctctgaattcgggcagattgtacaaccaatgcgtgcaaatgcagcggcattatgcaaagcccatccttttgattgagttcgatcagaataagccctttcacctgcagggcaaatttatgttatcgcagcagaccagcatggccaatgcagatattgtgcagaaactgcaacttcttacgttacattttcccaagctgcgactcatttggtcacccagtccgtatgccactgcccagctattcgaggagctgaagctgggtaaaccggaaccggatcctcaaacggcggccgccttgggcagcgacgagccaacggcgggtgagcaattgcatttcaacagcggcatctacgatttcctgctacgtctgcccggcgttcatacgcgcaatatacatggcctactccggaagggcggcagcctgcggcaattgttgctgcgcagccagaaggaactggaggagctgctgcagtcgcaggagagcgccaagctgctgtacgatatcctgcatgtggcccatttgccggagaaggacgaggttaccggctcgacggcgctgctggcggctagcaagcaatttggcgccggatcgcacaatcgcttcaggatggcggcagccgcatcgcgaaggggtcgccgatgatgctctccagcaaggatggaccttaaaagtattatgtatgctcagcttacatgcattaccgcctcgcctcttcccattgattatgacataattaattacaaatttatgtaataatactttccagaaacgggcgacagaacaaccagaactctctccggctctgaagagttgagcacacagacagcgcacaattatggaaatttttttaaacgttgcaattaagtcgacttgggaatgggttgcggatgcagctgcagatgagggtgagtgactgactgtctggtcgccagacaacgttgacaatcgggaaactggcgctgaccgctggggatgcgcacacactgcagccagtgcctgggccactgccatcggggatgagcgcttaaaaatcaattttcaataaatttttaattgccccccgcactggccccgtctgttggcacaactccgccaccattcccgcaggaccttccatatgacagaacgaacacctgcagcgttgaaaagcagctataaacagaattttgtatccaccagcagaggcgttccagtgaaatctatgaaagaaactcgtgtcaatgtccccacaagtaaatattaagaaatacattttcatgatgctaacatatatgattattgatgggctgcgccacggccgctgcacatgcaaatccatcgccgttacagcgcaagtggttggttgccaataagcgtggtaattggccatcatcagttgcgagctttacaatttacactcaacctttttttttaatggctccttgtttcgcttgaatttaatccaatttataactagattgcaggacatcaaaagggcagtgttatcccaatgcgtctggttacccagcttcatgtttgccctcgctttttgttgcgcctcattgggcaaagcgcgcttagagcgtgtttctgattgttggcattatctccggatccggttgccacgtcctccggaatgaggcgggaatttcggctcgcacatacacaaactaacttcatgcttc

SEQ ID NO: 7079 - DNA, 2995 bp, DROSOPHILA
ccctgtcacaaccggtaccgataaccacgaccagctgattgaaccggcatatttgcgaaattaaatccttagcgattgtatttaattatggccgattcgtgcgcggaaaatgccgccaaagggacggaaaatgagcggccgaaggaagtggaggccagcgccgacaccgtcccacaggtggaggagggcgtagaggagtatttgaagcgtaagaacatggtcctcctcgactacgaaaagcaaatgtttctcgatttggtcgaggccgatggtctgctggtttgcgccaagggcctgagctacgaccgcgttgtaatcagcatcctcaaggcctacagcgattccggcaatcttgtgcttgtgatcaacagttctgactgggaggagcagtattacaagtccaaaatcgaacccaaatatgtccacgaagtggccagcacggccaccgaaagagagcgcgtttatctggaaggcgggctgcagttcattagcacgcgcatcctggtggtggatctgctgaagcagcgaatccccatcgagctgataagcggaatcattgtcctgcgggcgcacaccataattgagagttgccaggaggcgttcgccttgcgattgttccgtcagaagaataaaaccggattcgtgaaggctttctccagcagcccggaggccttcaccattggctactcacatgtggagcggaccatgcgcaatctgttcgtaaagcatttgtatatctggccccgttttcatgagagcgtgcgcaccgtcctgcagccatggaagatacaatcaatcgagatgcatgttccaattagccagaacataacgtccattcaatcacacattctggagataatgaactttctcgtgcaggaaatcaagcggataaatcgtactgtcgatatggaggccgttaccgtggagaactgtgtgaccaaatcattccacaagatcctgcaggcgcaactggattgcatctggcatcagcttaattctcaaacaaagttgatagtagcagatcttaagattctgcgcagcttaatgatctccaccatgtaccacgatgctgtgagcgcatatgcctttatgaaacgctaccggagcacggagtacgcgttgagcaactcaggatggactttactggacgccgccgaacagatctttaaactatccaggcagcgtgttttcaatggccagcaggagttcgaaccggaaccctgtcccaaatggcaaactcttacggatttgcttaccaaggaaatacccggcgatatgcggcggagtaggcgatcggaacaacaaccgaaagtgctgatcctctgccaggatgcacggacgtgtcatcagttgaaacagtatctcacgcaaggtgggccacgttttctactccagcaggcattgcaacatgaagtgccggtgggcaaactcagtgacaattacgccaaagagagccaaactcgttcagctccgccaaagaatgtttcatccaataaggagctgcgtagggaagaggtttctggttctcagccacctttagctggtatggatgaattggcccagcttttgagcgaatcggaaacagagggtcagcacttcgaagagagttacatgctcaccatgacgcagcctgtggaagtcgggccagcagcgatagacattaaacccgatccggatgtgtctattttcgagacaataccggaactagaacaatttgatgtcactgcggccctggcctctgtgccacatcagccatacatttgcttgcagaccttcaaaacggagagggagggctccatggcactggagcacatgctggagcaactgcagccgcactatgttgtcatgtacaacatgaatgtgacagccattcggcaattggaggttttcgaggccagacgtcgcctgccgcctgcagatcgcatgaaggtgtatttcctgatccatgcacgcacagtggaggagcaagcctatctgaccagtttgcgtcgagaaaaggcagccttcgagttcattatcgacactaaaagtaaaatggtgattccaaagtaccaggatggaaagaccgatgaagcgtttttgttattaaagacttacgatgatgagccgacggacgagaatgccaagagtcgccaagcgggtgggcaagctccgcaggcgaccaaagagacgccaaaagtgattgtggatatgcgtgagtttcgctcagatctgccctgtttgattcacaagcgtggtctggaagtgctgcccttgaccattacgattggcgattatatactcacaccggatatttgtgtggagcgaaagtccatttctgatttgattgggtctctgaattcgggcagattgtacaaccaatgcgtgcaaatgcagcggcattatgcaaagcccatccttttgattgagttcgatcagaataagccctttcacctgcagggcaaatttatgttatcgcagcagaccagcatggccaatgcagatattgtgcagaaactgcaacttcttacgttacattttcccaagctgcgactcatttggtcacccagtccgtatgccactgcccagctattcgaggagctgaagctgggtaaaccggaaccggatcctcaaacggcggccgccttgggcagcgacgagccaacggcgggtgagcaattgcatttcaacagcggcatctacgatttcctgctacgtctgcccggcgttcatacgcgcaatatacatggcctactccggaagggcggcagcctgcggcaattgttgctgcgcagccagaaggaactggaggagctgctgcagtcgcaggagagcgccaagctgctgtacgatatcctgcatgtggcccatttgccggagaaggacgaggttaccggctcgacggcgctgctggcggctagcaagcaatttggcgccggatcgcacaatcgcttcaggatggcggcagccgcatcgcgaaggggtcgccgatgatgctctccagcaaggatggacc

SEQ ID NO: 7080 - protein, 961 aa, DROSOPHILA
MADSCAENAAKGTENERPKEVEASADTVPQVEEGVEEYLKRKNMVLLDYEKQMFLDLVEADGLLVCAKGLSYDRVVISILKAYSDSGNLVLVINSSDWEEQYYKSKIEPKYVHEVASTATERERVYLEGGLQFISTRILVVDLLKQRIPIELISGIIVLRAHTIIESCQEAFALRLFRQKNKTGFVKAFSSSPEAFTIGYSHVERTMRNLFVKHLYIWPRFHESVRTVLQPWKIQSIEMHVPISQNITSIQSHILEIMNFLVQEIKRINRTVDMEAVTVENCVTKSFHKILQAQLDCIWHQLNSQTKLIVADLKILRSLMISTMYHDAVSAYAFMKRYRSTEYALSNSGWTLLDAAEQIFKLSRQRVFNGQQEFEPEPCPKWQTLTDLLTKEIPGDMRRSRRSEQQPKVLILCQDARTCHQLKQYLTQGGPRFLLQQALQHEVPVGKLSDNYAKESQTRSAPPKNVSSNKELRREEVSGSQPPLAGMDELAQLLSESETEGQHFEESYMLTMTQPVEVGPAAIDIKPDPDVSIFETIPELEQFDVTAALASVPHQPYICLQTFKTEREGSMALEHMLEQLQPHYVVMYNMNVTAIRQLEVFEARRRLPPADRMKVYFLIHARTVEEQAYLTSLRREKAAFEFIIDTKSKMVIPKYQDGKTDEAFLLLKTYDDEPTDENAKSRQAGGQAPQATKETPKVIVDMREFRSDLPCLIHKRGLEVLPLTITIGDYILTPDICVERKSISDLIGSLNSGRLYNQCVQMQRHYAKPILLIEFDQNKPFHLQGKFMLSQQTSMANADIVQKLQLLTLHFPKLRLIWSPSPYATAQLFEELKLGKPEPDPQTAAALGSDEPTAGEQLHFNSGIYDFLLRLPGVHTRNIHGLLRKGGSLRQLLLRSQKELEELLQSQESAKLLYDILHVAHLPEKDEVTGSTALLAASKQFGAGSHNRFRMAAAASRRGRR

SEQ ID NO: 7081 - DNA, 4074 bp, DROSOPHILA
ttgtaacaattatcaacaattaaaaagtctacgtttcttgtttggtcgcgaacagttggtggaactccgagggggtcttgaagtaatcaaccagaagcattgaggagcggttgcccagtttgtacataatgtggctccagggatttaaaaaattcttgtattcagctatttgaccgcgttcaaaatagtgttttacagttccaatgggtagttgggacccatagacagccacgtatctaaaaataaagtaagttactacttataaatgtcatgtactaccgtacaaagttacttttccgagctcttgtatattctcagtggatatttggcgacaaaagctcgaatcgccaggtttataagcagaaatccacccacaaagtagtacagatctgattcctgggacaccagaatggctatgtccattttctggaccatatccaggtagtttatggttgtggcatagtgataggcggccaccgcagcaagtacagtggtcgtggcagtggatatattcttcgtccaggtcacgtagctctcgataggggcccggtaaatcagtttatagttatctggtagcctgtcgccaaagaggagcttccgttccacttcgccggaggatgcattccgccatttgcggagcacgctgctggtgctaaatgagaaggtgcagagtgattcaatcggataggtcaatggataggtcttactgtaagagctggaaattcggtttagctagtattggccgtaaataaaccaatttaacacttcgtaagagggccgcacacattttgtgttttattatgctgtctttgaaaacaatctggcaacgtgatcagctgtgctgcaatcagcggcactacccgatggttgtcaaagaagaaggtctggcaacgtatgtgcttgaggaatgcaccgaagaataatcagctgtgcctcgaagttgccggatcaccaggtcgcagcagctatgagttttgcgtcagactcgaataatgattagaagccgactccttccggaaacattcattaggtaaacaacacagctatagaacagacttttccagtttccacaactttagctaggaacacgttccacatttttccacatttttgataccttaacaaaatggattcaaaacgcgcggcccttgaatccggcgacggtccggacgccaagcgccttgataccaccgatgatcaagacaaagaagcgtcggggggcgacggcagtcaggttatgctggccaaacacgtagcaccctacacgggccacggatgtactccaccgatggagtcctatttgttcgaaccgactcccgccgggagtcaacttctgccgtggaaaactagcgttgatttggacaacgacgccgagctggagaagcccaccagtgacaagaaacgtaagttgatggtacgctcacatcctagtactcttatacaacaatttcattcagccgacactgccaagttgtcccgtcgggagctggccaaaatgcgccgtgaacacacattaagggccctcgccctggaacgcgagttgaccaacaaaccggggcagacacccgcttccgaagtgttgctcgtccgctttcctgatcccgagattactgctcccatgctggcaggactgtccaaggatattcgggatgtggtcttgcccattagcgtggctccacgatactgtctagtgcatctaaaggccggtgccgatgtggaggccaccatctgcgacataaacagggtgcgcttcggtacggggcaccttcgggcggagcttaagccgttctccgatgaggagcaggccgagttcattgatccctgttctctgtatgtgggcaacataccgttcaacatgaccacatcggccataaaggcctatttcgccaacgccatgcgcgtggacatcggagtgctgaagcgcgagaagcgcgctcgctacgcctttgtgcgttacgcctcacctgaccagaccatggaagcgttcaaggagctggtcgactcaccgctgaacagccgcactctcacagtccgctatcggcgactccggaagcgcgccgggatgccaatggtgcagtgcgccacctcctttcaggcgctgcaatccccaaatggagacgacgacaacactgactgcaaggtcatatctccaccgccgttagagtctatcataattagcgacagcgataactgctcagattccagtggcaacggcaaggaagacggcaagcgcaagaagaagataaatgaacaggaaagagagattgaaaagctcaagcgtcaaatggccgagtacggcgctattataaaaagtttgcaatttagacagaacagcttagaaggtctgtgttgatctgttttgaatatatactgagcttacaaaaactacttttccattcgcagatacatttatacctgaccttacacccaaagtagagccgagcgtgaatcccacaggttgtttactaggatccaatgcggtgcacctaatgcgtgacattaagaaagagtgcgactatttgggcatccctgatcccgtaccggctaccaagccgacaacacaagctcaagatgacagccagaagaaagccaaaagtatactaatacccaaattgagttctttgacttactctcctcctcttctcttgcttaggatcgtgttttggccgcttgtttacgggtcctttcagacgaggcactagtgcgatgaagactgctgacgagtacgagaaggatgacagacttgaggagctctatgctcaactggaacgcgatcctgatccttaatctgtcatgctacagtgtaccaaattactcgtcgtagacgaattagaataatagtttagtttattttttattggacttctgtttctttatttgttgtatcttcgttttcgtttttgttcagtttctcttatttcagcgtacatttatggtatataatattaataataatacataataatacgtaagttaaataatatttcggttttaaatattaaacccgaaaaaatatcgtttaatggactgtcttaaatatcacttatataataatcatatgtactcgatgatgattttcatattagtttatatatggtcaagtcacgtatcgttttgtaaacttaaaacacttgagtttgcgaaattgtagcacagctggaggagcatgcggagctcctttcccatgtgccgacattaacaattatatctaaactaaattacgttcaatgctcagtattttatttttgtttggttctctccaattccttgcatatggctcgttaaatttaatatcgcaatttgtcattaccaaaacagcaaaactacgtagagaacttctggtttgatatgacttttgatcgttttgtgatttgaatgcggaatgttataaactatttcattatatttaaggctgattttatttacacaacaacaaaagtatttgataaggcacctgtgtcacatgctgatcgctcaatttacaattgatattctgttcgatttcaatttgtatgttttcattattcttttttggatttcctctcatcgtattcgatatgatgtgcgtaacatttgaatttcaagcacttcggtgtccaacgtgcagtaaaattttggaaactttactcgagtggctagcgttgatcctaaggttcacaaatgcactgcccgtaggtcgctggtatctcttagctcttttagctaacgatgagcttggagacgaggcacatcaggatggtggtgatcacagtgctcacggcggagctgctcgtcagcttggactgggacatggctccgtttccggttcgctcggccacttccggaactattggttcgtcgttggactggtgatcgcccacggctaagggaaacagggatttaaaaagtcgagttagtggcgtttcttgtcaagctgttcaggcttaggatgttctgtgcagaaacggcttagatctaagctaaatacgatttggtattggatattgtattttaaaggcgtgacttggtatgggggctgggggcaaagaaactaaaaaacggatcagaacgtaggtataacttaagtaacttagg

SEQ ID NO: 7082 - DNA, 1901 bp, DROSOPHILA
aagccgactccttccggaaacattcattaggtaaacaacacagctatagaacagacttttccagtttccacaactttagctaggaacacgttccacatttttccacatttttgataccttaacaaaatggattcaaaacgcgcggcccttgaatccggcgacggtccggacgccaagcgccttgataccaccgatgatcaagacaaagaagcgtcggggggcgacggcagtcaggttatgctggccaaacacgtagcaccctacacgggccacggatgtactccaccgatggagtcctatttgttcgaaccgactcccgccgggagtcaacttctgccgtggaaaactagcgttgatttggacaacgacgccgagctggagaagcccaccagtgacaagaaacccgacactgccaagttgtcccgtcgggagctggccaaaatgcgccgtgaacacacattaagggccctcgccctggaacgcgagttgaccaacaaaccggggcagacacccgcttccgaagtgttgctcgtccgctttcctgatcccgagattactgctcccatgctggcaggactgtccaaggatattcgggatgtggtcttgcccattagcgtggctccacgatactgtctagtgcatctaaaggccggtgccgatgtggaggccaccatctgcgacataaacagggtgcgcttcggtacggggcaccttcgggcggagcttaagccgttctccgatgaggagcaggccgagttcattgatccctgttctctgtatgtgggcaacataccgttcaacatgaccacatcggccataaaggcctatttcgccaacgccatgcgcgtggacatcggagtgctgaagcgcgagaagcgcgctcgctacgcctttgtgcgttacgcctcacctgaccagaccatggaagcgttcaaggagctggtcgactcaccgctgaacagccgcactctcacagtccgctatcggcgactccggaagcgcgccgggatgccaatggtgcagtgcgccacctcctttcaggcgctgcaatccccaaatggagacgacgacaacactgactgcaaggtcatatctccaccgccgttagagtctatcataattagcgacagcgataactgctcagattccagtggcaacggcaaggaagacggcaagcgcaagaagaagataaatgaacaggaaagagagattgaaaagctcaagcgtcaaatggccgagtacggcgctattataaaaagtttgcaatttagacagaacagcttagaagatacatttatacctgaccttacacccaaagtagagccgagcgtgaatcccacaggttgtttactaggatccaatgcggtgcacctaatgcgtgacattaagaaagagtgcgactatttgggcatccctgatcccgtaccggctaccaagccgacaacacaagctcaagatgacagccagaagaaagccaaaagatcgtgttttggccgcttgtttacgggtcctttcagacgaggcactagtgcgatgaagactgctgacgagtacgagaaggatgacagacttgaggagctctatgctcaactggaacgcgatcctgatccttaatctgtcatgctacagtgtaccaaattactcgtcgtagacgaattagaataatagtttagtttattttttattggacttctgtttctttatttgttgtatcttcgttttcgtttttgttcagtttctcttatttcagcgtacatttatggtatataatattaataataatacataataatacgtaagttaaataatatttcggttttaaatattaaacccgaaaaaatatcgtttaatggactgtcttaaatatcacttatataataatcatatgtactcgatgatga

SEQ ID NO: 7083 - protein, 495 aa, DROSOPHILA
MDSKRAALESGDGPDAKRLDTTDDQDKEASGGDGSQVMLAKHVAPYTGHGCTPPMESYLFEPTPAGSQLLPWKTSVDLDNDAELEKPTSDKKPDTAKLSRRELAKMRREHTLRALALERELTNKPGQTPASEVLLVRFPDPEITAPMLAGLSKDIRDVVLPISVAPRYCLVHLKAGADVEATICDINRVRFGTGHLRAELKPFSDEEQAEFIDPCSLYVGNIPFNMTTSAIKAYFANAMRVDIGVLKREKRARYAFVRYASPDQTMEAFKELVDSPLNSRTLTVRYRRLRKRAGMPMVQCATSFQALQSPNGDDDNTDCKVISPPPLESIIISDSDNCSDSSGNGKEDGKRKKKINEQEREIEKLKRQMAEYGAIIKSLQFRQNSLEDTFIPDLTPKVEPSVNPTGCLLGSNAVHLMRDIKKECDYLGIPDPVPATKPTTQAQDDSQKKAKRSCFGRLFTGPFRRGTSAMKTADEYEKDDRLEELYAQLERDPDP

SEQ ID NO: 7084 - DNA, 4453 bp, DROSOPHILA
tgtacttgtgtacgattcggcccaaaaagttctgtgcttttgatggtgtatttggcactaatcgttttccttgctaagcgattctctctgactcggcaattattcaaaatctatgactgagtggattaattaattaaaatagcgtagcaatgtaggcaggaggcagcaaatgcattttatttctccaatcttgtttccacgctcatcatttccgccagctaaactggcgtatttgattcagatttctttaagtgctaagatggaaatgatttgttttgcgatcttaatgattttaatcaataaaattgtacgggcttgtatgcgaacggaggcttcatctccatcgaggaaataaggatactccagccacactgctctgcactttcaagtccttcgacgcaactcaatttgttctgggtggagtgccacaatgttgtactggcaaacgtggtaagtcctggctgccaattccaccgatccccgcctgaattacttgcttggcttcttggccagcagtcacttttgacgccagtggcaggacatcggaaaacggaatggaacgaaacggagaacagaagtcctcgtcccagctcaaggatgcattgataagtgacagcggtttatggaaattgatggagaggaattcatgtaattgacaagtgaaacgaaattgcatacaaattgcttaaacctaggaacttgcaatctaaaataaattaacttttaattaaaccaaagaagaaggacacaacaaacaaaacaaaaacaaaaaaaaaacaaaaaaacaaaataggaaaatggaaaatagtagcaaacgaaactcaactttaatagccgtgcagattgcattgattaacttgagttgaaaatgaaggtttctggcgaaggacgctttttccgcgttagcaatcaacgaagctaagaaataagttaaatacactatgtacagcggtggaatggaaccaaactggaatcctctggcggttcagtccaaaggagctcacttgagagcagccttgttcttcagcggcaggaatgcggccataaagcacccggctgtgcaacaagaaacagggataagaatcgatttgggctaagacttcgataaacttacccagcatgaatgcactgatcatgaggaacggcggcacacagcccagtcccatcaaagccgggaagaaaatgttgcccaacagagaccccagacggccgaacatcatttccagcgagacaatcatcgtcctaaagagattgtaaaccagttatttccagaatcacattgccgaagtgatcaaaaacgcacctgagtgaggtgggaaagaggctgactgaggcgctgatcactgatgtggccgatatgctgcccatggtcacaaaaagcgaagcaagtgcgaccgtggatgctgctgagctggaccagtacatcccaatggaacagccggccgctatgaggagtccactggctaaagtttatggaaggttacaaatccattcatttgttccaccgattggtattggcagtacttactcattataagcttgacgccaaccaagtttaccaggaacccagccagcatgtatgccacaaagccagcaccggccacaatcagattgttggtgtaggtggagggtgttataattacatggcactcgaccgtgggatcattccgagttactgcctccagctggctttgggtgcgattaacactgtactccaagatgttgcagatgctcgtcgattgtgattctccgctcatcaagttttcgtactcgttgatggatgcaaacagttgtggcagccacaatcgcatggtgttttgtctaataacgatacaacatatattaatccaaaataatatcacagtattacttcatgatcaaggccctatatcgctgcaatataaacgaatcttcgttgtatttagtaaacttaccccaagagcacgcaaaagttgaggagatacacccaaagggataggcccaagtagggtttggtgaaaaggggacgaagctgcgtgaagcccgaacgcagggagctctttttcgagtcctgattctctggatcctgaacttcgacgcactccgtcggaagtttaagctcagtcggaattgtttcatccttcgcgtgcttttttaccggaacaattacttcattggccagcaatttgatctgttttagaatacatgcattgatgattaaatatttcgtcatagttgagtatacatactggaaacgagtccttgggttttctcgagttcaggtgatacatgaacttgaaggcatccagggcttcccggttgcgccccttggacatgagaaacttgggactctccgggaagaaaaagaaaagcacaaagctcagaagactgggaagtgcggtgacggcgacgaaaaactgccaggatgtcactgaaagggttcgatgttgcaattagaaaagttatttgatctatcgattaactagggccttgatttaatacttaaatcttaaattgcttaagatcacttgcttctgttatcacagcttcttgttatcaacttgctacactactgctatactcgtatttgctctcaataaaatcttttaagctgtatctgtatttaggtagcgttagtggcgcgtggagttcatatattttttgatgattgttcccaagggggatggggcctccggcattatcatctgctatcttcatatcactcctcacaaccactgataataagacaataacacagccaaacacgtaacataccctcgggacttacacgacaaagtccagatctgaatgttccacgtctcgggcaatatcagcatggccagtcccggtagcgttagcgttgcaattgagaacatgatgcccaccatcatcatgatacgctgtcgatgcttccgtccatggagttccgtcaaataggtcataagaacggcaaaggggccactcatactgcattaatagcacagatgctgcagtaggctcatttgcaactgggaagaggttagttacttaccaaaagcctccaaggtatttaaaaaccatcagttggatcctactttgactgagtgctccgcccaaaacgcatatcgtatcggcggcatagcccacaatcaggaggtttcttctgcccttgatgtcggccaagtagccccaaagcaccgccgaactgatcatgcccgcataggtaatggcattcaggatgcccttgtccaggaggctcagcttaagatcacactcggcgctgggcaggatgtaggacatcgtggaggtctcgtagacggtgcccatggccgctggcacggcggccaccagcaggaggatgttgaacattccaaagccagcggcatcgatggctgcctcgaaatcagctgccgcctctttttggggaggatccccaatttggtgctcggcagtcttgtgaggcttgggatcgccggattcactgggctcgctcatcgtgcgtattgtttgggtcgcctctgctaactgaagctgggccgttgggcggatacgttatatcttccagacggcgctggggcctcaaatcatctttgtttgcctatagtcgagggaaaacaaagcgatgcttatgccaattgcgctaatctagcgactaaggatcaccctacttgggatgctgcaggtggtagtagtgtgggattctctgagaatgagaatgagctctggtatgaacgctccacgtttgtttaactaaagaattttcgcggtggtgaccccgcgaactaaccctttaatccattaactttcttccattctcggacaggcatgaaaacaattaaacgcctccctgtttactcagcggtttatgggcccccatcatccgcatcatcaacggtatctggccccttcacgtatatgtgatcactctgcctgcgactgtccatgtgaatgggaggctttattgccaccgtgattcggtttactgatttgtagactccctgtaatgtacgcttgtcgcaggggtatattatttcgttggaaagattgtttttaaaaaagaaaggtgaaagtatctgaccagttttcagcacctagcactgttagcacaacttcgatataaaaggggggcaatacccccccaggccgaaggctccgtttattaaaatttactctgtgttacattcgacatatttttaatggtaatccacagtcggcatccgtaggtgtcgtcttcgcacctgttctgattacggctcctatgacgacacggcagcgcctcgctgatttacgtgggctccccgtttccatttccattttccagttttgccggcttggcaaccgttgcgtcgtcatcgggctaaactaattgcgatgattacgggttatgagttggtttccctgaaaacttttcgggattacgattactcatgtaggggcttagtgctgtggtctggttcggtcggggctgctctgctctgctcctggcgtgtgctgc

SEQ ID NO: 7085 - DNA, 1677 bp, DROSOPHILA
atgagcgagcccagtgaatccggcgatcccaagcctcacaagactgccgagcaccaaattggggatcctccccaaaaagaggcggcagctgatttcgaggcagccatcgatgccgctggctttggaatgttcaacatcctcctgctggtggccgccgtgccagcggccatgggcaccgtctacgagacctccacgatgtcctacatcctgcccagcgccgagtgtgatcttaagctgagcctcctggacaagggcatcctgaatgccattacctatgcgggcatgatcagttcggcggtgctttggggctacttggccgacatcaagggcagaagaaacctcctgattgtgggctatgccgccgatacgatatgcgttttgggcggagcactcagtcaaagtaggatccaactgatggtttttaaataccttggaggcttttgtatgagtggcccctttgccgttcttatgacctatttgacggaactccatggacggaagcatcgacagcgtatcatgatgatggtgggcatcatgttctcaattgcaacgctaacgctaccgggactggccatgctgatattgcccgagacgtggaacattcagatctggactttgtcgttgacatcctggcagtttttcgtcgccgtcaccgcacttcccagtcttctgagctttgtgcttttctttttcttcccggagagtcccaagtttctcatgtccaaggggcgcaaccgggaagccctggatgccttcaagttcatgtatcacctgaactcgagaaaacccaaggactcgtttccaatcaaattgctggccaatgaagtaattgttccggtaaaaaagcacgcgaaggatgaaacaattccgactgagcttaaacttccgacggagtgcgtcgaagttcaggatccagagaatcaggactcgaaaaagagctccctgcgttcgggcttcacgcagcttcgtccccttttcaccaaaccctacttgggcctatccctttgggtgtatctcctcaacttttgcgtgctcttgggacaaaacaccatgcgattgtggctgccacaactgtttgcatccatcaacgagtacgaaaacttgatgagcggagaatcacaatcgacgagcatctgcaacatcttggagtacagtgttaatcgcacccaaagccagctggaggcagtaactcggaatgatcccacggtcgagtgccatgtaattataacaccctccacctacaccaacaatctgattgtggccggtgctggctttgtggcatacatgctggctgggttcctggtaaacttggttggcgtcaagcttataatgaccagtggactcctcatagcggccggctgttccattgggatgtactggtccagctcagcagcatccacggtcgcacttgcttcgctttttgtgaccatgggcagcatatcggccacatcagtgatcagcgcctcagtcagcctctttcccacctcactcaggacgatgattgtctcgctggaaatgatgttcggccgtctggggtctctgttgggcaacattttcttcccggctttgatgggactgggctgtgtgccgccgttcctcatgatcagtgcattcatgctggccgggtgctttatggccgcattcctgccgctgaagaacaaggctgctctcaagtga

SEQ ID NO: 7086 - protein, 558 aa, DROSOPHILA
MSEPSESGDPKPHKTAEHQIGDPPQKEAAADFEAAIDAAGFGMFNILLLVAAVPAAMGTVYETSTMSYILPSAECDLKLSLLDKGILNAITYAGMISSAVLWGYLADIKGRRNLLIVGYAADTICVLGGALSQSRIQLMVFKYLGGFCMSGPFAVLMTYLTELHGRKHRQRIMMMVGIMFSIATLTLPGLAMLILPETWNIQIWTLSLTSWQFFVAVTALPSLLSFVLFFFFPESPKFLMSKGRNREALDAFKFMYHLNSRKPKDSFPIKLLANEVIVPVKKHAKDETIPTELKLPTECVEVQDPENQDSKKSSLRSGFTQLRPLFTKPYLGLSLWVYLLNFCVLLGQNTMRLWLPQLFASINEYENLMSGESQSTSICNILEYSVNRTQSQLEAVTRNDPTVECHVIITPSTYTNNLIVAGAGFVAYMLAGFLVNLVGVKLIMTSGLLIAAGCSIGMYWSSSAASTVALASLFVTMGSISATSVISASVSLFPTSLRTMIVSLEMMFGRLGSLLGNIFFPALMGLGCVPPFLMISAFMLAGCFMAAFLPLKNKAALK

SEQ ID NO: 7087 - DNA, 2927 bp, DROSOPHILA
tatccatccgagagcagatatttcagcagcagcaacgacaacgaaactcaatttgcgccggccaaacgatgcgttgagcatataaaatgcaaagcggaagcgacgttcatggatagattacacaactacttacaaatgtgcgtttaagcacccaacacccaccacctaccacccacagccagccatatttcccatttccaacgcttttcctgcgtgtctgcaactgttgcatattgcagtgcgtgcgctgcctttattgtcccgatgttaatggaaacacctgctggcggcggagaagtcagccccggagtccgtgaacgagtgccagtcattgtcaggggaaatctggccgggattgcggggtgaggttgactgtggagctggtggtgtacagccgcccttaagctgcgtcatcatctccatgccggatgacagtagacggaccgagaatggcatcttttgggagcgctttcaggtaatgccgccgagagatccattttacaaagtgcagccagtaaaagtgtttctgtgtcagctgttgatggtgcccagatgccctgctaatgtaaacgtgccacgagggacacaaattataattatgttgaactctgatacggcattaatggaagctcccatgcattgatccaccattgtattgattgctatccaatataccttataagccccattgcagccgtattactataatttatattgatattttaccttcatgctttataatattaaagttgctttgacttttcagcatttttacgtttttaattagaacagctagcacgtattgaaattggaataccaccactacgttttagtttattgatgttagcttagaaactcataaaaagcggagaaaatgaaacaacatgtgcgtaaaaaaatgaaccctagggaagttctagaacagcaactaccctacgaaaaaccaaggcaatcgtaacgagtttatgtcccaccgatatagttccaaccctccaggttaatgagccccgagtgggggagcggttcaattgaattgtgtgccgtaagttggacaaacccaattaaaatttcgactgcccgtttttccggcgataaagaaagaatagtgctggccaccccatttacaatcccctttgcacaggtgttgcacaattccactcgttcccgggcactcgaaagtgcactttgtactcactcaaaatttactccagtctggcgcgttccactttcacacgttcctcgtggactcaacgtgcgccttggcatatgcaacgcattcagtcgcttgtgggaggcagttgcattcgattgccagcactttcatcagcggaaaagccagagagcagctaatagccggacaaagagtgagaaagcgagagcggagagggagaggcagaacacattcgctggttggtcttggtcttggtaccactcattcgacacattttccttcagttttccctcggcagcgataccagccgtcgcttactttttcgttattctgttattgctggcctttgtttattagtgcgtgtcttcgctgcgagcggttttcgtaattgaaacgagagcgacataattaaattaaaatatactcgcacacagtagcgcactagcatcgatagacgggccaactaatcacattaccagccatcagacatcaagccaccagccatcaggccatcgtcagtcggaaaccgaaacgcagacccgcaacacaagactcacagttcgcattgcatactttttggcgcgcatcgaaataaacacaccaatacgtacatcaatacaacacaacaacaacaaacacattcaggctcgattgctgcgtgagtgtgagtgtgcctgtgtctgtgcgagagtgccttctaaagtcgcccatcctgcgaagcgacaaaattcatcaactcttgtgtctggtgagttgacataaaagacaatagaattgctggcaataaaaggcaaagcttgaagctaacaagaaaattccgggaaaagtgcctcgggctggtgaatgttttggcaatgttggtgtgaaaatgtcagactagatcgtgacctttaagcttctgatcattaaaggggttacatattttctgtgaatatgcttttaaaaatgataactggtgcgaataataatctgcaaaagtttttggtccaaatgttttgtaatataaagaaaacttgatgaaatcatgaatatttaataatcatccaatattctatagtgtactttaaaataacgtaaaaacgtaaaatgcgattacacaaaaataataacattattctcattttatattcagaatttaatctcatcattgacctacgccataaacacttttatatcaacttgtacaagatattttttgtggctgttttccacttgagtggttttaagtatctggaatgagagtccctttcatcgtagttattaatgcgataaatttcacagaaatgctatggtcatcgaatgtcgtgagcaattttataatttggtaaagtaatgggatttttcgaaattatgtcatgctagtaatgatagtaatgctactcgtatagttcagaaaagaagcttctagcaaagtggacgtaatgactccattaaaaaaagttctctattaagagaatggaatattcaaactttgtgatgggccatttaaccaaacatccgggatgtttgtgttaacacacaaaagttggtcatattactgatgaggaaaatatataacgtttaatggtcaacgttaatggcttttctttcgcacacattaaatgcacgatcttacttaacgaataataggattatgatgcagaagaaggaggatatattaaccagaaaatttccttatcgatgtgaaacaagtgaaccgaaatttgcattcatccgtggcccactgaatgcaatcacttagtcgacaccacccata

SEQ ID NO: 7088 - DNA, 758 bp, DROSOPHILA
atgagccccgagtgggggagcggttcaattgaattgtgtgcctctggcgcgttccactttcacacgttcctcgtggactcaacgtgcgccttggcatatgcaacgcattcagtcgcttgtgggaggcagttgcattcgattgccagcactttcatcagcggaaaagccagagagcagctaatagccggacaaagagtgagaaagcgagagcggagagggagaggcagaacacattcgctggttggtcttggtcttggtaccactcattcgacacattttccttcagttttccctcggcagcgataccagccgtcgcttactttttcgttattctgttattgctggcctttgtttattagtgcgtgtcttcgctgcgagcggttttcgtaattgaaacgagagcgacataattaaattaaaatatactcgcacacagtagcgcactagcatcgatagacgggccaactaatcacattaccagccatcagacatcaagccaccagccatcaggccatcgtcagtcggaaaccgaaacgcagacccgcaacacaagactcacagttcgcattgcatactttttggcgcgcatcgaaataaacacaccaatacgtacatcaatacaacacaacaacaacaaacacattcaggctcgattgctgcgtgagtgtgagtgtgcctgtgtctgtgcgagagtgccttctaaagtcgcccatcctgcgaagcgacaaaattcatcaactcttgtgtctggtgagttg

SEQ ID NO: 7089 - protein, 129 aa, DROSOPHILA
MSPEWGSGSIELCASGAFHFHTFLVDSTCALAYATHSVACGRQLHSIASTFISGKAREQLIAGQRVRKRERRGRGRTHSLVGLGLGTTHSTHFPSVFPRQRYQPSLTFSLFCYCWPLFISACLRCERFS

SEQ ID NO: 7090 - DNA, 4836 bp, DROSOPHILA
cattgcccccggcgagtccagcattgacctcaagatgagtgctctggctggcacggatgccagcaaggtggaggaagatttcaccatggcgcgtttgtttatcagcaagatgaagacggaggccaagaacattgcccagcgatgctccaacatggaaacacagcaggctgactccaacaagaagatctccgaatatgagaaagatctgggcgagtaccggctactcatttcgcagcacgaggcacgcatgaagtcgctgcaggagtcgatgcgggaggcagagaacaagaagcgcacgctcgaggaacaaatcgattcgctgcgcgaggaatgcgccaagctcaaggccgccgagcacgtttccgccgttaacgccgaggagaaacagcgggctgaggagctgcgctccatgttcgattctcagatggacgagctacgcgaagcccacacccggcaggtgtccgagctccgggatgagattgccgccaagcagcacgaaatggacgagatgaaggatgtccatcaaaagctgctcttggcgcaccaacagatgacggccgactacgagaaggtgcgccaggaggatgccgagaagtccagcgagcttcagaacatcatcctcaccaacgagcgtcgggagcaagcgcgcaaagacctcaagggcctggaggacacggtggccaaggagttgcagacgctacacaacctgcgaaaacttttcgttcaggatctacaggtaaagtttaagcaatcctatctattattgctacgtacagatcttaaaatgtatttcccttgtgccaacagcaacgaatccgaaagaatgtcgtaaacgaggagagcgaggaggacggtggatcactcgcgcagaaacagaagatttccttcttggagaacaacctcgaccagctgaccaaggtgcacaagcaattggtgcgggacaacgccgatctgcggtgcgagctgcccaagctggagaagcgtctacgctgtaccatggagcgggtgaaagctctggagacagcgctcaaggaggcgaaggagggcgcaatgcgggatcgcaagcgctaccaatacgaggtggaccgcatcaaggaggcggtgcgacagaagcatctgggcagacgtggcccacaggcacagatcgccaagccgatccggtccggccagggtgcaatcgccattcgtggtggtggcgccgttggaggaccatccccgctggcccaggttaatcctgtcaactcgtagatccaatcaccacctgtcgccgcccagttcagctccgctttaaactaaactaaatggattacgttatacatacttaacataactgataattgccttcgcttagatgagatgtgtcgcgatcatgtgcagcgctttaaatatacatacatataatttaattaaataaatgaaaggaaaccggaaattaactaaattttacaaaccgaaaataataaaacccacagatatgtaaggacatctatatacgttaagagtatttataaacttttcaaacataaacctaaataaaagtcgcagacaaattaaggtctctttagtttgattcttattgcagttcaaaaaaattatgccgattatttggctattggttgttattacatcgtctgctgttacaatcgcatgttgtaacctgtcccgcgtgtgttatggtgctcccaatcgtctggagaattgaccacctgccattcgtaccacactttggttgcatccacgcatcgccaaaactggatggatatagtctgtccctccctcagagttcttggacgctgagtagtaaaaatatatattaatgtagcagttatcaaaggctaactaatcacatcacacgtaccgttgcgaagaacatggggaaccaggagaacatgccaggcgtatgggtcagaggattgatgcttaggcagatgtccttgtacaaatgggtatcaaagtatccgccgattccgtgcagcacgcaatctttattgactttaaatgaaaccgtcttgcagcgagtattgtcaatattttccgctcgattaggatgtacgaattcaaacagagcctgcggctcgtcaatatggtaaatattctttagcagcgacacatagccgtagtcgaaggcaggataggttggtaacaattggcagacattttggtgcagcactgctgacatcagtggattaatgtaggaggtggatttgtagggtatactgattccatccggtttgagcagcttcagtgctccatcaaggcactcgggcgaaagttcattatcgccaaaggaaccaagtaactccgaaaccatgatgtcagccagctctggaggggaaaagtcccgcatgtcctttgaaaaaatgtgaacatctgaaagatttgttgcggattaagactggattaaagcaaggtgtttttttttttcttattcttacccttatcggcccaaagcgttttaaccatgttggagagggtgcggatggcattgggattcttttctatgatgtagaggcgaactttgcgcttcgttaactcggcagcattgaaaacagctctcgctaaaggacctcgtcctccacccagtagcattacaactgtctgtaggtttgaacatacaaatgttaatatatatcttataggtggagaagagcaccataccagtttcgttttagcctccgcagcgcttactcgatccaacagggccgcttgtacggcatcctgatagagtttgtatttgacaggatcagtttcgaatacctcataggtataggtgtccagattatcgcaaagaggctgcagtggaatttccagcatgttttcatagctaatgaaacaatttaacaatttgtattggataattgacgaatctaatgcgttctactaacctgtttagcatgtgcttatcgcagttatcattaattagcttatttacgtaatccgcgtactggcacaaagccttatcgttgggatttgtggagatgatgatgttggcccgtaccgagatgaagtgcccgacgatgagctgccactccttcttcagcacacagtagttggagcggtttctgacgaacagggaagacggaatgatgattgcctcgattggttcgcccaaccagcgacgcactgtttccttgctgggtcgatcagcatcgtttagctctatcacaaccttcactttggtgctgtgtttggtgaccatgcgcaggttattccaccagttccacgggtcattcgattccgcttcagccacctcctcggcggtggcatcctttcggtgctcgaatgtggccagttctggattggtgatgggcacttggatgaaccagttccctgaaggaaaatcatctaacaaacaatttgagaatccgcttcggtatctagatgcttaccctttgttttggccagcacaatggaggccagattctcgttttccggaccgcgcagccgtaccatcaggttgcccacattttgcaggtgctccgcccaggccacgtccctcatgaatacctcctttgcgtgttcgcgcagcttgtcattcggcgagtccacattcacgtcggacatggtaaatatcaccttggaattccagtcgctgccgctcaaaattgtggccggatatgtgggatccgattcgtgtggttcgaagggcaacatattggcgttgatagaggtggaaaccacattatagttgttcgcgaaggccttctcgattaacttgggtatgctattaacaccctcctggtgcagacagacgtagtaattcatctttcaatccgcacaccgcctcttcaaaaagtccaaaaaatgcggtgaccggcagcagtgtgaccgtctgcggcggcaattcaaatggaacgattggtgtgaacgcaaggtaattgccgaaaaatcacacattttagccaatgttgttgacaatttttgtgtcgtttgccaatttttgtgttttcccgactttgtaagataagcaatagctttcgggccttaaatagcatgtaattgtgattgttcatggctaaccgcgatgtattctcaaagatcctgccaaatgtcaagttgggcacccgctacgacgaggatgggcgtgaagttcaggtgagtgcatcccatccagccgggaatccccagctcaatttgatttccattgcaggtggagcgtcgcgaggactcggatgccacggccaaggagcaggacaccttcgacatactggtggcagccggatattatcgtgcccgcatcaagggcttatccgcattcgataaggttgtgggcggtatgacttggtgcatcgaatgctgcgactacgatgtggacgtggaccttctgttccatgagagtctgtccattggacagaagatgtaatgtatatcattgatggcttaagcgcatatcatcatttatatatccttatatctacagtgccttggtggagaagatcgtagccgtcctgattgacatgaagtgcccacacagcctggaaccccatcaagtgcagggtctggaattcttggccatacatcccgtcatccagtggctagttaagacctctgtgagtagtcggaataacgtacaccttgtacgatttaatggaaactccttattaaggtggaaaaccgagcggagcgtgggcagcgcttgaagagatttgccatcggccagtttcataatcactatcagtacaaaagcgacaaggacaatctcactaaaatacgcctggcctccacaaacattaaggctatacaggatctgtacggccccaggaggcagtacgaacgccaagaagctcctgatgatgatgatgatgtgtccagggtgcgtcttactcttttagaata

SEQ ID NO: 7091 - DNA, 2526 bp, DROSOPHILA
gcagacggtcacactgctgccggtcaccgcattttttggactttttgaagaggcggtgtgcggattgaaagatgaattactacgtctgtctgcaccaggagggtgttaatagcatacccaagttaatcgagaaggccttcgcgaacaactataatgtggtttccacctctatcaacgccaatatgttgcccttcgaaccacacgaatcggatcccacatatccggccacaattttgagcggcagcgactggaattccaaggtgatatttaccatgtccgacgtgaatgtggactcgccgaatgacaagctgcgcgaacacgcaaaggaggtattcatgagggacgtggcctgggcggagcacctgcaaaatgtgggcaacctgatggtacggctgcgcggtccggaaaacgagaatctggcctccattgtgctggccaaaacaaaggggaactggttcatccaagtgcccatcaccaatccagaactggccacattcgagcaccgaaaggatgccaccgccgaggaggtggctgaagcggaatcgaatgacccgtggaactggtggaataacctgcgcatggtcaccaaacacagcaccaaagtgaaggttgtgatagagctaaacgatgctgatcgacccagcaaggaaacagtgcgtcgctggttgggcgaaccaatcgaggcaatcatcattccgtcttccctgttcgtcagaaaccgctccaactactgtgtgctgaagaaggagtggcagctcatcgtcgggcacttcatctcggtacgggccaacatcatcatctccacaaatcccaacgataaggctttgtgccagtacgcggattacgtaaataagctaattaatgataactgcgataagcacatgctaaacagctatgaaaacatgctggaaattccactgcagcctctttgcgataatctggacacctatacctatgaggtattcgaaactgatcctgtcaaatacaaactctatcaggatgccgtacaagcggccctgttggatcgagtaagcgctgcggaggctaaaacgaaactgacagttgtaatgctactgggtggaggacgaggtcctttagcgagagctgttttcaatgctgccgagttaacgaagcgcaaagttcgcctctacatcatagaaaagaatcccaatgccatccgcaccctctccaacatggttaaaacgctttgggccgataaggatgttcacattttttcaaaggacatgcgggacttttcccctccagagctggctgacatcatggtttcggagttacttggttcctttggcgataatgaactttcgcccgagtgccttgatggagcactgaagctgctcaaaccggatggaatcagtataccctacaaatccacctcctacattaatccactgatgtcagcagtgctgcaccaaaatgtctgccaattgttaccaacctatcctgccttcgactacggctatgtgtcgctgctaaagaatatttaccatattgacgagccgcaggctctgtttgaattcgtacatcctaatcgagcggaaaatattgacaatactcgctgcaagacggtttcatttaaagtcaataaagattgcgtgctgcacggaatcggcggatactttgatacccatttgtacaaggacatctgcctaagcatcaatcctctgacccatacgcctggcatgttctcctggttccccatgttcttcgcaacgcgtccaagaactctgagggagggacagactatatccatccagttttggcgatgcgtggatgcaaccaaagtgtggtacgaatggcaggtggtcaattctccagacgattgggagcaccataacacacgcgggacaggttacaacatgcgattgtaacagcagacgatgtaataacaaccaatagccaaataatcggcataatttttttgaactgcaataagaatcaaactaaagagaccttaatttgtctgcgacttttatttaggtttatgtttgaaaagtttataaatactcttaacgtatatagatgtccttacatatctgtgggttttattattttcggtttgtaaaatttagttaatttccggtttcctttcatttatttaattaaattatatgtatgtatatttaaagcgctgcacatgatcgcgacacatctcatctaagcgaaggcaattatcagttatgttaagtatgtataacgtaatccatttagtttagtttaaagcggagctgaactgggcggcgacaggtggtgattggatctacgagttgacaggattaacctgggccagcggggatggtcctccaacggcgccaccaccacgaatggcgattgcaccctggccggaccggatcggcttggcgatctgtgcctgtgggccacgtctgcccagatgcttctgtcgcaccgcctccttgatgcggtccacctcgtattggtagcgcttgcgatcccgcattgcgccctccttcgcctccttgagcgctgtctccagagctttcacccgct

SEQ ID NO: 7092 - protein, 605 aa, DROSOPHILA
MNYYVCLHQEGVNSIPKLIEKAFANNYNVVSTSINANMLPFEPHESDPTYPATILSGSDWNSKVIFTMSDVNVDSPNDKLREHAKEVFMRDVAWAEHLQNVGNLMVRLRGPENENLASIVLAKTKGNWFIQVPITNPELATFEHRKDATAEEVAEAESNDPWNWWNNLRMVTKHSTKVKVVIELNDADRPSKETVRRWLGEPIEAIIIPSSLFVRNRSNYCVLKKEWQLIVGHFISVRANIIISTNPNDKALCQYADYVNKLINDNCDKHMLNSYENMLEIPLQPLCDNLDTYTYEVFETDPVKYKLYQDAVQAALLDRVSAAEAKTKLTVVMLLGGGRGPLARAVFNAAELTKRKVRLYIIEKNPNAIRTLSNMVKTLWADKDVHIFSKDMRDFSPPELADIMVSELLGSFGDNELSPECLDGALKLLKPDGISIPYKSTSYINPLMSAVLHQNVCQLLPTYPAFDYGYVSLLKNIYHIDEPQALFEFVHPNRAENIDNTRCKTVSFKVNKDCVLHGIGGYFDTHLYKDICLSINPLTHTPGMFSWFPMFFATRPRTLREGQTISIQFWRCVDATKVWYEWQVVNSPDDWEHHNTRGTGYNMRL

SEQ ID NO: 7093 - DNA, 19401 bp, DROSOPHILA
ccggtcgtttgatcgataactctacaggcaggtcacgttgtcgtggaccagcttgttgttgctgctgggttttttgagtttgaattattcatgtatttatgcagtcactaaaaagtttgctcctcatcgctgaccgctgtcaattggttcacgtaccgctcaatactgagatgctcgcgatgcttcgaaaatcgttcaaaatttcgtcagcatttccgaacagactcggcacacgcttatcgcaatctgagagctctatagagcgggagagtcaggttgtcgcagtacaaataagacgaaataaaaatataaaagaaaaaaaaaaaagaaagcagggcaaaaaatatgaaaattatttgtttcagtttgcgatggccacgagttcactccactcagcagtgtctatgaattttctttgatgctgcttccccccagatacagatacgtatgtatattacgcttgttatttatggatacgcgacgcattggatttagcatttccattaagatttttggaattttcagacttatcagctgccgactacgcaggcagcgttaagtcgcattcgccacgaaaaaacattatcaattggtggtatggtggtttccacggggtattacctaccgaatgtaaacaattgcatggtaaacaaattaagtcaaggcaaaaacaataaagttctgttttacctatctgcattacgagtatcaatataccacaatgaatccccattccagtcaaaataagttcggtatttcttttaggttttatgctagtgcgcctaaggcaagtctacttaggaggtgttttattatgaaaacggtgcactctaataaataaatcgaaagtcaaacttggagtctacgataaaacttggtacattggtctagcttatgactattattgttctacgttgtgaactagaaaagaactacgaaatcgtttgaactaaattaagttagataactaagttaagttaagcattaagcagttagccatttaggtttgcaagagcagcgctacgccggccaggatccatttgcctggcttgtctttggtcttcagattcaagttggacacataggtggtggggcctcgggtgcgggtcttgtagaccgggcactcgtacatgttcctcagatcttgcttatcttgggtgattgcctgcggtacatagacgaggttaaattgaatcggattcgcattcagtgtagtagaataatggagtggaatctagttttcgaatttatgccaacatgcgccagcaatgagacgccacagatccgccctcgattcgccgatttgcggattttagcatttgcccgatttgcatttccaactcacccgaatgttgatcaccggcatggatgggtagagctccttgaggcgcgactccatgatgataccctgctgtatgtcccacctggcgccctccatgaagatcccatgcacgcagcagccgtcgcgcggtgccgtcctgcaatttacaagatcatctcagatgccgcgactataatcgtagctatagatagccacaggtctagcccagagccaactaaagggggcgggtgtcgatgctaatctccatgcagagatgcatattaattccgacgacggcgcgacggatctccattgttctcccaccagcgtcgccatgtgaaacgtggctggcggggcgccacttaataagcaatcatctcatcagccgttcagcccatcagctcatcagcccaatcagtcgttgggtaaatagacaattgtaatttgcggtctattaataagtctcacatatttatataccagtgctggtttaaaattagctcttatgaaatagcactgtgcctatttttagacacactcgctggccattggccgcagctggattttttccagcttggaggcatgattacatgtcacaacattacattcattatgcgattgggattgagctctgagcaaataaggtcgagcggaccattagattatgtttggggaataaaatttttgagctaattcatagatttagtgatttcgtttcacactaaaatgtttagggtttaaacaaacagaaacaactcaaagttgggtcaccttttaagaaatataaagattttttctgggccctagaattccaaagatttatctctttgataaaatggcaatgttcgtgcttttcttagaatctgcgactattgcgaatttgagattgctcatgatagtgtaaacattcccgggaaggggtcacctcaagagtcaattgagaattggcgtggcaatggcagcggcactcacgtaaattcctccttttgttttttggtcacgtcacactggaggcacatcttgtccagcggcaggtcgtttctacgggcggtgctctgcatgatcgccgtgagcagggattggggattaaagaacccagccagccagacgcaagagggtagctatggaaacgggaattttagggcatatgttgagccaagtttgcattacgattcactcactacaaaatcagtggaccatgtctccagttcgcgcagacgcaggcacagatcgatgaaccagttgttgagacccaagagcgaaggatacgcacgttgcgtccaaatgggcggcacttgatccaaaaacagtgaattctccagcacctccatgtccgatgtaatggtcaattcaccctttaagcccaagtccaactccttcaggctgcgcttcatctcgctggtgaggaagttcatccgctcgcactcctgaaaggccactatcacatacggcgtgcgctcctccaccttgttcataatctcgaccatgttgaactcctcgggcagcttctcgataatttcatcgacgatctgtttgaccttgtcctcgcgggtcaccgttgcccctcctccggcgccagcatcccgtggctgcatctcgaacaccgtgcgaaagatgttctccgcacgggtggttaggaaccctatctccgcattgggatgtagtccgtacaagtacggtgactccgccggcatcatttcgtccacgtacgtatggtatccctggtagtccgtatttggcggagctggaaatgagggcgccagaaagagctcgccatccaccaaatccggctgcatgtactcctccaagtaggtgatgcacagccttcggtcccagtcgtccgtaatatgacccccgtacataatctcgccgaacaggtagcgcagatcctcccacggtaccttggcattcgcctccaggtaattatacagcaccgacacactgatgttgagatcacccacgttgaatggatagatcttgttccacccctggggaccaaacttccgacgctcggcgaccacagcatggaaatagcagagggagaagagaatggctttgaactctgcctccttgcctgacatctcgagtgtttcctgggtgaagttatccaaagccttgtggagattagccaacattccggttggaggctcgttggtgatcttaattgatgattccaaaatgccctgaaaacaattgtaaaaaattataattagtttaaaagaaatagactgactacccactaaaaagtatgttcaagaataacaatcagtaccaacttagaagaaatggacatacctgcggtatgatgtgggcagaaggcgtcgaggctggctctgcactcaggaacatgcgatagtccggatgtgagtcctcggcgtagtactcgagcttcttctccagcaccggcagccatttcctaaccagatggatgttctgcagcaccacccagtggccatgcttggccgccgtgtccatggcggcctccgctatggcttcctggccctgtcccaaagacacgttatggaaattacccagatccatgctgaagcccatttgtttgcccagcgcctccacgtccttgagtggatttacacctggcgagaggatgaagaatatgggggtggagggacttgcttcctcgtacgatttcgcgaactccatggcgcggctttctacatattttgatccaagtttctcctcaatgaagtcgctgtttcgaaagtaggttaatcattatatagccggaataaagtattactagaaggtacgtacgctaaagcgtatgtcatgcgatctggccttaaggccctgatcatgcaaagtctttgtagagccgttttgttcttccactcctgcgggaatttctccttttccggcagctccgattcgaccagcttcttccaacgcttcgaggaggtctcgatgtcgcggtccaagttcctgaattcatctttggacgctagactgcatattccgccccacgattgattggtcagaaagtcaacaggacttgtcacatgtggcttgatcgggaagcggagcaagaagtccagttccgccgatgtaacctcctcgttcataagaagaatctgattgtaaatcgaaagaagttattaaaataatcgctactggaatgactaaacgattggtcttacctgaaatgtcatttgcgaggcgaagatgagcttgtcgcattcgaaaagaccacgcgaagtgtactgaaacaccgaatacgttatacaatcaatcagattggagacacgcaaatccaaagtatcgccaggttcagccttggctatggccttttggaacactacactaaaagcctgccaatgaaggaagtatatcataataaggctatctaaactcgaagtcctcataacccaccttcagtgaaaactgatatatcggattgatagtgtttagttcgtttaggatgaagtaaagcaaactggctctggccgccgccggtctgtaatattctcgggccttgtcgatctccttggaggtaatcttcgcctcggccaccttctgctcgatctccgaggcagtgctcttcgtggtctccaggttctccaccagcgccgtgtcacctaaaatattctcacccgccgacgaaaggcgcgacaatagatcgtcctccagtttcttcagcatgatcttaaaatcgttttgttgctttgtgagatcggctttcaactcctccagatcgggacgctctgctttcaccacttccgccagcagttgatcctctagtccatcgcgtgttacggtgaagttaataagtgtggtttgtgcttgcatctctggcttgtagtgcggattagctagcttggtgtgcaggatcaggcggaagttggagttgtattcgatctccttgtctccaattttaatagccctaaataagttgaataagtaagtaatttgcagaatagtctcatccaaaaccccgcacttactttcccttcttgatcagatttcgacccagcagagagtccagcactgggtccaggttctcgtcgatattctcgattagcacattgcagcccgcattgatggacttctcgatgatgtccagataactgcgctgacccagacgaatcaccttgaggtcctcgccatacttctgcttaatccactttactccctgcaactggggatcgatcatcagtggccatcgatccgagttggacagaatggtggcattctctattgacattcgatcgctgggtaaaccctcattggtccaaatggcgatggtggtgtcgtcggtcagcagcgaaaggggatcgagattttcggttgtgggtatgggcggatcaatgctcttcaaaaagggtgtccacatcttgagtaagaggtcgatgcggaatcctttcgtgaaacagccgacataggaaataaaggcggtgatgagtagaatatcgccgggcaacgtaatgccctgcttgacgaagctgatttaggataaacattgtcatttagtatggtagtttttattgtatgtactccggatacgcacttgttgaccgcttcggcccaacgtacgttctcactggccagaccgccaaccaggcgattggccagggcaatggtggcttgggtggcatccgcttcctgttggcaccgcaacttatctgcagtggccttctcaaagtccgcggtcagcttacccagttgctcctcgaggctctatgcaatggaaatagttcggtattaaaagagatcacctgagcgtattagtgagtcctaatcctaccatcactttccgcttgatgccagccagtttgtcctgggcagcggccaattccgcatttgccgccgccagggctttacgcttgggttccacgtcgcagtatacctcgtagaacttgatgatatttataacccaggcgcacagaccagccgctgcacccgacttggagcgcacgaactccggttcgaattccggatccttgagatagggctggatggccttagtgatctccgggtggatgttctccttgtcgtagttgatcaacgagtcgaggaacgtgtccaccttggccattgcgattttggccgctttccaagagcgatctttgggcaccttgccaccctgggagagcagcaccatcactgcggcggttacattggtgacggcacctggcggcgagccaaagctcttgagctcggtgagattcgccttattcagggtgttcagcgcatcctgtgcggccattagagctggctctgctttgaggagatcctcctcgcagtccctctgcttcttgctgacttcgtcggctatcaaagcgaccttcatttcctcctcgtcggccacggctttctccgtttgcaccttctccgtctcgatgcccacaatctcgatgagggcgtcggccgcctcgttcttctcctttagctcgatctcctggacggcgagcttcactttcagatcggccacctggagggcagtggaccgcagcttctcaagtccgttctccagacgctcgatcttgctctgcaggtcctcgttcttgtggttgagtagtttaatgtagaggttaatctgctccagataactcttgggtgtagtatagttgtagcgcctctcattctgcaggtacaccttggacgtggtgttgaccgatgtatggacgtaggccataaacttggccacggaatcgcggtggttctccggcaacaccttgttctgggcgagaaagttcatcgccaccgatataagtgcctcctgaggccattcgtggaaccaattgatggatgtggcattgatgatggccgggaattttctcgaccgaacacgcagtgtcgagcccactggtgaaaagcacaaaactatcttaagctgcttgcgcacacgatcgatgaagaatttccagcaattttctcgcgtatcaacaagtcccgcgcctttaacctcatttcgaacccctgcgataatattctcaatctcgtcatcgggaaacaaatccggaatctcgccagtctgttaatgattgtattgattataaataaatttggttccaaacatttaaatacccattagtataaacctaccgctagcatatcgttgatcaagacgaggaagtcctcgctggggatctgcgcatccgtcattaggaacataatgccaacgttctttagtccggcctttaaataaagtcctgaaaattcattctgcaatgcataaagttagttaggattagtcaggttaggttaggactagtagactgagaaaccttcaagtcattgactccgtaaccctttttcagctgtatctgcacgacctccaagctggatatgaatgctgccaagcgcgctagagattgtttcccgctgccaccaacaccaaccaataaggcgctgccacgcggtgattctaaaatgcgattgatcctgaaagtagcgtcattattagtaactgcctccattgcagtctatatgggtgtgtcccacctgcatacgtgcatcatcgcatcctcgaatagcaccaggttcatggcagcgactagatcattatacgatgacattgcttcctgaaggagtttgtgaagctcaggccaacccttgatgggcatgtacttaggatcaccaattcctccagcgaaatgacagtaaatattcggcttgtcgaatatgacggactcgtcaatttcctcgaatgacttcttgacaatgtcatgctgcatcttggtaaagctatcgatgtccttatcgtccgttagcttatccgagtacaccctctgtgtctcgtgctgccacaagcgtataagatctgtggagcccgtcaagcactctgtcgaactgaacagcaatccctggaaggggattagacaatttaaaagctatcaaccatccaccaccattgtcgagactcacctgaaagacattgctgatgtcgcgcagattgaagatgtagtgcgacttgattgccgtgggcaggaagacctgcaagcacttgttgtgcagagcgatcgtggcagccacaatgttgggcgtcatccgcgtgacgatcggagtgaacttctgttccgcattggcaaagtgctgtgccaggatggacgagtacatgaccgtgatggactcgggaccaggaaaactcacagccaggacgcagaagtgtcgctgcaggcgcggattgatcgtgaagctaccggaggtggggttcatgcaagccacgtactggcagttgtggatgtccttcagagtgagcttgttccggtcgtaccagtggccgtagtccaagtgctgccgcattagcgtgtgcggctggaccgttccgtaggcatccacctccggcatattgatgtcgtccacgaagtagcagagcagcttgttgccgggcggtccgtagttgcgacccgccttcttctctagcggcttttcgaggatcttttgcaacatttcggacgtggtatagtaattgaatggtattgtcgtgacagcgtaattctcagaaagcgattgaagcttctcgttcaccagtacggttttgccgcagccggcattccccactagcatcaccgggtgcttcttatccatcaggagatctaggaaaaaacgcaggcgtatcgactcggaggtgtgcacgatgacagcctgcagcggcaggtccgagtccagctcgaatttgggtatcttctcggtccagggcaggaaagtcttcgtctcgctgtccagaaagtaatcgaaaactgttccaccttggaggttacaatgaagcaggagagaatatcgttaaagctcgaggattgagtcaattgctcggggatcggcactcacctggcgggaacttaacagttttgaactcatttacccaccatttgctgaactccacgcggtagtcaatggcttgatcctggaacatggccgatccgaaggcccaaatacaggcaaaaacaaaatacagttcgtgccattcttttggacagtcggccggcgtgttcgctggtattaaaaaacagtttaggagatggcacagcatttgaatgtgtgccatttcggcgacaggcgtgatcttcttgaaacgcacgcgaatcgtttccaatgaaggcggtatgtacttatcgaataacatgaccaaattggacttttcggctggaatttttcgcgtttcaacccaactggttacatagctggaaagagagatgggttagtgcaacgaacttgtatagttcttatataaaattatataaaatgttctagaaaagatcggttccgattccagctatttgagaggaatgcaaaacgagaacatgagttacagcaataccaattttgaataataataaagaaactaatgatagatttgaatttgaaaagaaaagtgtatcccagttactccccatactcacggattccaacccaagtcctgcgggttaatgtacaggatgccagccctggatacggttgccggcgttgctgttctcaggttggagatctcgaagagcaaacgcatcgaaggcgtcaacgcaatgcgttcgttgctggccaatgtgaggaccttgttgtcgtccatcacggtattgagactttcaatccacatcggatcgatgtcgccgtcgagcacgatccactttggttgatcgcccgttatgtttgcctgatcccgcatcagcaccgagaacaggccgtccttccactcgcgtgtcgccgggttgataatgccgaaaagttcatcattggtcacagctttcggattcaagtcattgaaaatcggcttccgcttgatgttctggtaggtgcgcagcagcgtcttccacacctgggtcttcccagtgcccgcattgccaacgatgaacacggagtgacgtacctccaacagctcctccagctgcactaccttcagtatgaaattgtcttctggttgtagtaggagatcggaggccgcttgttttacggtgcgttcaaaatcctgatcacgtttgcggggcacatccagggcgggaaacaggtcgctgataagccccatgaacaccggcatgtcgtccgtgatgattttcggtatgttgaagtctcggagggcacgcatcagaacctcctcctccggacgaccgggatcacctctctggaaagcgaaacgtataattaagtcaactattatttatgcgatctttaacgaagggaattgtaattcttagtcacaatcaagtcttaccagaaacaaaagtaatctcaccttaagggatcccgccaccacaagcacagatttaatagctctgaggccccaatcgtagtgatcctgcttagagagcagttccttgcagagcgtgtaaagcgtgatgaacttgcgggccaggactcgcgcgtcctggaatccttcggccaccagcataatctcgcagataagctcgaagtccggcacgaccatggcacaagggcggaagagggcttttagattctccggtagctccgtacggccagcgtagcccggattcatagtgatgaatatgcccaccgtgggcacgcaactgatcatctcgcccatgaagttgaacttgtcctttttgtcgcgaatggcatcctggacggacttcacttgaacggcaaccaccgacaggacctccacagtgatgcggttaaattcgtcgaagcagccccaggcacccgtttgggccaggcccttgtaaatattgccgcaggattggtagtccatctgctcggagcaattgaagacgtagaccgagatgcctatggcccgccccaaatccttggtggtctcggtctttccggttccggctggaccggctggagcaccccccattaccaggtggagggactgggtcagtgtaatgtaacaacgatctgtgagcggcgttatgaccaggcgtggcgtattgcccaagtattcgtgacaatactggaattctgcgtcgcaaatattggcaaaacagtccttctccacatcgtcgaagcgatgccttaactgcgattgccacataaacgcggagcccgaatccaatttggcctgaatcatcttggcgaccacatctcttgagtgcacatcaattgtgcatatcgtcattatcttctgacgatcgcctttgctaagctcacccagcagaagcgttatgagcagactgagctgcgatatctgtttcttgtaatagtccttaatagcgttatcatagccctcctccaaccggctaaaggcgatgttcacctccgtggaccaccagatctgcgatccgcagagcgacacctgggcagggtagtcgaataaccactaattgaaagaacaaatttgttagttttataaacacctcaggaaaatcctattactattgggacgtgataagaattgaactaacctgttcccgctgcttttcctcgtaggcaatcaccgcctccatgacgtagtgccttagactggcacgcatcgccgcctggatacggtttagccagacctctacgggtcctcggatgctggccaactcgttgaactccacgtactcaccatctttggcgtacattcccgacgccgtgttaatctcgttggactcgtcgcggttgaacttcaggcgggcgatcgagtcgaagagcttggtcaggtgcttggtgaccatttccggctggatgccgttgctcaatacgtccagcaggtccgccgaggacacgaagtagaagcgaggaaaagccaagcgtttcgtttccaagtactctgccaatgccttttcgcaaagcgtaagctccttctgcaaatgctccaggcgttcgattaggccggaacgattggtggacgccaccacgttcgacgacacagacatctcatccatgaggacgcgaaactcggcgtcaatgttatcgaatcgatccgaatcgacgggaagctgtttgcgtatgtcttccgaactcatgaagatactctcaagatgggtccaagtgcgttgcacctcaaaccatacggttatcacttgatcggcgatcataagcttgttttgccaagtggacacttcttcgaggaaatgggcgatgtacttggatgttattagattctgtaggcaaacctgattatcttcaagcgtctctatgagttcttccgaagccttcaggaggttacagccggtacgcgggtgcaactcgtggtcgaactccattaccgtccacgttgtgttcagatcccgcaggatcttctccatggacatctccttgacggccttgtcgacgatgttcttcacctcctcctcgcattcgtgcagattcaggcccaacaattcggccagcgtcgtttcgtggtccatgatgaactttacctataagaggttcaagtttaggcaatactaatcggtgcttttttggcgtgcatatatcgactacagtggctataaggatataactacggtactacgactgacacatgcgctggacttggcctagccacttacggtcacttccttgggcagggcggccaaactctgcaatgaaatggtatttacaagaactgtacagtttgggccgggcacagcatcccggaaatcaagcggaaacgaaacgagtttgggaaagaaaatgattaaaacgttttgctatacaatggagctgccaattggtggagctcgtgtgctgggggaagtggaaagatttacacggattatttacatcgggccaaatggctgggattggcttaagagttcaaaaacaaagacatcattaaaaatggaaacacaaaatagaccttggtggagttcatcagctggttccagtgacgctcccgaatggccggattctgcagctccccgacggctcggagcgaggtcagcatgttcttgaccgtcgactccaggttgatgaacgtgtcccacgggcgcatctccttgtccaacagccgtatgtccttggcgaacttcttgcactcaatgtccatgttctcaacgtccaccttgcgccacggcgtcgttttccaatcgtcgatgctggtggccacgatattgacatagtcccagagttgctgggagagtttaaagagttattggaacaattgggggattagtacggattagggtattcattacgattagggttagttaatcacttgcgggggaaaaaagaaaagctcaaagttccacatgtggcatgcataaatttagtatagtagtagattaaacatgcacagataaagtggtagatataaagaaataaatccatatttgtgaaattctaaaagcaaaagagataccttcagcatgcgcagctccttgcgacactgtttcagaactttgaattccggaatgttgacttcaaacaaacttccggactcctgaatgtccctcatctcactctcacatagaaacatatcgtcgttgatgcggtccatcagtaggtatggcttgtagcaatcgaatcggaagaagtcgtacgtcttgaagacttcccggaagagctggatgtgactctcaaaaagcgcgatcttgttcctgatgctgaccacctcagtggcctgcagaggcgacacctgctgcttcaccgtagaggcgatcttcttagtgttcgcccactgctccggcagttcctgcagtagcacgttaacctcctcgggaatatccatgtcatagtacttcagcagttgaatggtctcctgcatgggctcaaacatttcgtccgtcttggctgcccgttccttaacctgcattagatacgccatgatgctgaccagaccctcgtagtccttttccttcaccgtctgcagtagaccctcgtcggctttacgaataaaatgactcagattcatgaggcttgatgtgactgtggtgacaaggtgctccttgaacatgttgccccacttgcacactgtattgagcagggcctggcgaaatggccgcacatccacctggaaccaggaactgaacacctggaatggaccaatgtcctcgatctcgttgaacagggattcgtagttgtcgatctgctccctgaaagcctcgatcgtaggttggcagggttgcggaggcggctgattgggatcgttgatcagtatcagctcaatctcatcgggatccaacatgcgtccgtactccaggaagtactccatgcactcttcgcgatcgtcaagccagagatacgagtaccgctcaaactggcgacaaaatcgagaggcctcctccatcaccagatccacaccgtttaatatctcgcgacgcatgtcgatgatgtcctggttttcctttatcatctcaacgtagttccgcttctcattgggctttagacgtttgatcaacgaccccatcttcatgatgtcccgcatcagttctatcaacatgttgttaaagcccatcggatcctcgggatccagcgagggcacaaacacgagattgggttcaacaagttctagccgagactcaaatagtggagcatagttgttctccggatccatattctctgctaaatagccaacgctcacgccaactgtctttaggatgttttcgtaaacgatgttgtccacaaaatccacataactcagccacactgcgtcgtcctgtttgctttccatgtcaaactgcagcatgttgtcctgcagcagcttatggatctctatagaagctgcctggatctccgcatatcgcttggatgttcgatccgggcgttcgtctatggagagcactgtgtcctttttgcagtcccgcctctcgaaaagaggctgcttggcccacacgcccatgatcttgcgaatctgtcgaagatttccctgggtgtgatccattcgattctgaagagcagccaccggcttgcgtaacttatcgagataacttagaatatctgcaaaagccagaagaaaattaacatattatacctaaaattaaatttaaattaaggttaacttaatatgtctcgatctcctatgcgaaaatgcgaaattttccacttgactgaaaagacgcacctgacgaattccaaactagctgattcacgccgatctcaaccagatcatcaatcatttttatctcgggttcgatcagccttagttccaccggtgagctaccttcttgtatgctgttgtaccaatcgatggtcttctccaggttgagggtataagatcggaagacgtcgctcttttcggcaaaatcgatggcaatttgaggaattccttcgatcttcatttgctgcatataatgcacctccctcagaatggaaaacaaggcggcactgaagttgagaatcagcgaattgtgtcgacgatcccgtgcaataagggatttctttagattctcctcgatctgtccgtccaattggcccgcccagtcatcaaagaactgagtcttgcaggagcccagtttcaccatgaggatctcgtagcgctctacgatttcctgggacttctctgtcttggtgatcctgcaacggatttgagattgatagaatcatattcatcatatgccttagtatgcttactcatgctgtaatgccttgaagttcttgactggagccgtaatccgcgtctccagctgatggcaccagcgtatgaaggcggctactggtggacaattgtagttgggatacaggttgtcgcccacctttttcagttccatttgcttgtcgtagatggattcacagatggtcatctcatcatcgagcatgcgcacaatttcggcataacgctgggtgaactcctccttgatctttggtcgatcgagcacactacccacaatgctaatgagctaaaggattgacataacagatctgtgattatataattatgttctatggaactccacgggataccttgaaaatactctccaggttgtggcaatcatcaaaagcctggcacaaaatggccgccagcttcatgtccagctcaaggatgcgggtctggaagcccttgaagtcctcatcaaactcgtgatcatctggatcgaggacatcgtagcttttcgaggcgaaggccgtgaagtactgattgaactccacgtagacatctgtgatacgagtgctgagctgtcgaccccgcagcccaccgatttcgactttctctaatttcaggaattcaatcacagtaaagaaaaaccttggcaaagccagaggtaagtagcagcaactatctttaaagtaaaccaacccaacaaacttaccattgaattgttgtgaggcgttcgaggaaggcattaaagcgcttgaaaactgaatttggatgaaaagtccataaaatcggcggccgctcctcgggttccgtgaagaacgtggccaatcgttccttgtagtagtcgaatagctcccgaaagaactttagtatctgtatggacagggtgagtcgctgcatggcctcgtcgatatcgctgtggaatatggacgagggatccaagtatctcttggcctgcaatcgatcaaatatatcagatgtcggatccgtttatatccgcccaatgattcccacccacctggtgtataatcaagttgcatatttcctgcaacagcacggttattttcgccgactggcaatagtagcgtgagttgccccacaaaatgcccaccgtattcatgaacggaatgagcagcggcttgcactcggcgaaatcaatctcctccaggtgctgaagtgggcgcttcagggggttcaaatagagtgttatgtcctttgcctccgccagagctgcggaaatcaccgattggcatgctaaactcacgtttcgctccaccacactcacccgtaacgacgttcttgaagagggtctggaaacacggatggtaggcactcatcgagtactccagtatcagggccatggcacgaatgcgctcgttgcgcaactggtcgtagatgaacgacagattcttgaggcgattgttccaaaatgtgaactctgtcaggggggatatacagatgacacgatggagattacgcaaattagttaatcaagcgaaatattccagatatttggttttacatattttataggaccactttgccaataaggtacttataaaatctggtaattatttggtggtgagttatgaaaagtatacattatattctgtttagaaggtgtatggctattcctccgcttttcaatttgaaagacatgtgaaaatcggagggaatttaggtaattcctgcccttagtttccgccattctatgtaaactcattctactcaattgtcaatgtcaaatgtgaacgcgtaataaagccggtaacccatttagtcctatgacaatagcatcagaagtacatacatattgcatgcacgcagaatgtcattcgtgaacagataataaagcaggacgaaacttttggatgagtacgaacatgcaaatgtcggggttgctaggatatggggagacttgaattttatcaataaataataaacggaggaagccaaaaataaaaccgccacacgtggtgccaccaccgccacctcgtactcacccgtgtgtggagttggattctggccattggcaaaggcgttcgaaggactctccttgatgacctcgtggatttgggtggcccatttgatgacaacgccctcgatggcgctcttcaggtacagatcgaattggcactgctccgtttcgaccagctccttggccgccttcacgatcttctcgacgcccacgggcatggccaggatggtctccccgctgacctgacccttcacctggtgcacggtgctcttgaggctgtgcacgtgcttctgcacgtcctgagccaccatgatgggccagttgcgataattgtcctcgttggacaggaggggcaccaacacctcctccaccaatgcggacagctggtcaatggtgcgggtggctagatcgccgtagatgatgaagttgccgcaatcctccctaggaatgggcaatgcatagcgcttgataaagtacactcccttgctcttcagctgtgacagtggaaaggtggtcgatggcaccagctgggcagctggggtgaggatgattatcaggacaaccggggtgttcctgtccagaaactccttaatgatgcccttgtgctcctccaccgtgacgacacgcgtccacttctccggctttagcttaagggacttgatgacaaaagaacccatcagctccaggcgcggatccgggccaccagctgccgccgctgcagcggcctcggcgctggtggatggctccatcgcgacccactcgctgtgggttggttgtgggtggggcggttgctttggtgcttctgctcctgcagtggttgtctggttgttgctgttgtctgttgtttactgtggggacgaggtgcacatgcatatctgagtgtttggctgaccttgttaccactaacaactagtatatgaaatcgattaaaattgcaaatcaatagggatttttcggtattacgaaatatgtatttatgttattctataaaaataacttgataaaaatgagcacttttaattagaagaacttttccgtaagttatgtaacaatttacataatttttactgattacataaaactcatgatggcaaaacctgagcaacttccttagaaatccaacagaattacttgtaaaacgcgcctaacacgtattggctatcaagtatttcattagtcaattaatttgcaattttttttatataatatatgtattaaattagtttcccaaagagggtttccacgggttttccttttccaattgcgactgcttacctcggctgctggtaagcgactgaattgattgttatttccgctgacgacttgacacgcacattcaggcgcaaaagtgatcgtggcaggactcgttgctaaggatttgttgatttttcccctgaaatccgtccgtgttcagtgactactgtttgttatttcccctgcgccattatggccgttgtcacgttggttgctaggtcaatggccatttgttgcgctaatttccgtttaaatggctgaaggcacgccattttcaaattaagttccttggatttgcacactttgattcgattgattatgtgctaattgattaagtggatgtgtacattagtcaatgaatattaattgtgcaattaattaggaaaatgttgtgacgatttatataagcgtagcttaataatatgagattatatcgtagatggtgtgacttttgctttggcaaaatgtaaaagtttctttgatatctcgtttaga

SEQ ID NO: 7094 - DNA, 13419 bp, DROSOPHILA
atggagccatccaccagcgccgaggccgctgcagcggcggcagctggtggcccggatccgcgcctggagctgatgggttcttttgtcatcaagtcccttaagctaaagccggagaagtggacgcgtgtcgtcacggtggaggagcacaagggcatcattaaggagtttctggacaggaacaccccggttgtcctgataatcatcctcaccccagctgcccagctggtgccatcgaccacctttccactgtcacagctgaagagcaagggagtgtactttatcaagcgctatgcattgcccattcctagggaggattgcggcaacttcatcatctacggcgatctagccacccgcaccattgaccagctgtccgcattggtggaggaggtgttggtgcccctcctgtccaacgaggacaattatcgcaactggcccatcatggtggctcaggacgtgcagaagcacgtgcacagcctcaagagcaccgtgcaccaggtgaagggtcaggtcagcggggagaccatcctggccatgcccgtgggcgtcgagaagatcgtgaaggcggccaaggagctggtcgaaacggagcagtgccaattcgatctgtacctgaagagcgccatcgagggcgttgtcatcaaatgggccacccaaatccacgaggtcatcaaggagagtccttcgaacgcctttgccaatggccagaatccaactccacacacgggtgagtacgaggtggcggtggtggcaccacagttcacattttggaacaatcgcctcaagaatctgtcgttcatctacgaccagttgcgcaacgagcgcattcgtgccatggccctgatactggagtactcgatgagtgcctaccatccgtgtttccagaccctcttcaagaacgtcgttacggctctggcggaggcaaaggacataacactctatttgaaccccctgaagcgcccacttcagcacctggaggagattgatttcgccgagtgcaagccgctgctcattccgttcatgaatacggtgggcattttgtggggcaactcacgctactattgccagtcggcgaaaataaccgtgctgttgcaggaaatatgcaacttgattatacaccaggccaagagatacttggatccctcgtccatattccacagcgatatcgacgaggccatgcagcgactcaccctgtccatacagatactaaagttctttcgggagctattcgactactacaaggaacgattggccacgttcttcacggaacccgaggagcggccgccgattttatggacttttcatccaaattcagttttcaagcgctttaatgccttcctcgaacgcctcacaacaattcaatggtttttctttactgtgattgaattcctgaaattagagaaagtcgaaatcggtgggctgcggggtcgacagctcagcactcgtatcacagatgtctacgtggagttcaatcagtacttcacggccttcgcctcgaaaagctacgatgtcctcgatccagatgatcacgagtttgatgaggacttcaagggcttccagacccgcatccttgagctggacatgaagctggcggccattttgtgccaggcttttgatgattgccacaacctggagagtattttcaagctcattagcattgtgggtagtgtgctcgatcgaccaaagatcaaggaggagttcacccagcgttatgccgaaattgtgcgcatgctcgatgatgagatgaccatctgtgaatccatctacgacaagcaaatggaactgaaaaaggtgggcgacaacctgtatcccaactacaattgtccaccagtagccgccttcatacgctggtgccatcagctggagacgcggattacggctccagtcaagaacttcaaggcattacagcatgagatcaccaagacagagaagtcccaggaaatcgtagagcgctacgagatcctcatggtgaaactgggctcctgcaagactcagttctttgatgactgggcgggccaattggacggacagatcgaggagaatctaaagaaatcccttattgcacgggatcgtcgacacaattcgctgattctcaacttcagtgccgccttgttttccattctgagggaggtgcattatatgcagcaaatgaagatcgaaggaattcctcaaattgccatcgattttgccgaaaagagcgacgtcttccgatcttataccctcaacctggagaagaccatcgattggtacaacagcatacaagaaggtagctcaccggtggaactaaggctgatcgaacccgagataaaaatgattgatgatctggttgagatcggcgtgaatcagctagtttggaattcgtcagatattctaagttatctcgataagttacgcaagccggtggctgctcttcagaatcgaatggatcacacccagggaaatcttcgacagattcgcaagatcatgggcgtgtgggccaagcagcctcttttcgagaggcgggactgcaaaaaggacacagtgctctccatagacgaacgcccggatcgaacatccaagcgatatgcggagatccaggcagcttctatagagatccataagctgctgcaggacaacatgctgcagtttgacatggaaagcaaacaggacgacgcagtgtggctgagttatgtggattttgtggacaacatcgtttacgaaaacatcctaaagacagttggcgtgagcgttggctatttagcagagaatatggatccggagaacaactatgctccactatttgagtctcggctagaacttgttgaacccaatctcgtgtttgtgccctcgctggatcccgaggatccgatgggctttaacaacatgttgatagaactgatgcgggacatcatgaagatggggtcgttgatcaaacgtctaaagcccaatgagaagcggaactacgttgagatgataaaggaaaaccaggacatcatcgacatgcgtcgcgagatattaaacggtgtggatctggtgatggaggaggcctctcgattttgtcgccagtttgagcggtactcgtatctctggcttgacgatcgcgaagagtgcatggagtacttcctggagtacggacgcatgttggatcccgatgagattgagctgatactgatcaacgatcccaatcagccgcctccgcaaccctgccaacctacgatcgaggctttcagggagcagatcgacaactacgaatccctgttcaacgagatcgaggacattggtccattccaggtgttcagttcctggttccaggtggatgtgcggccatttcgccaggccctgctcaatacagtgtgcaagtggggcaacatgttcaaggagcaccttgtcaccacagtcacatcaagcctcatgaatctgagtcattttattcgtaaagccgacgagggtctactgcagacggtgaaggaaaaggactacgagggtctggtcagcatcatggcgtatctaatgcaggttaaggaacgggcagccaagacggacgaaatgtttgagcccatgcaggagaccattcaactgctgaagtactatgacatggatattcccgaggaggttaacgtgctactgcaggaactgccggagcagtgggcgaacactaagaagatcgcctctacggtgaagcagcaggtgtcgcctctgcaggccactgaggtggtcagcatcaggaacaagatcgcgctttttgagagtcacatccagctcttccgggaagtcttcaagacgtacgacttcttccgattcgattgctacaagccatacctactgatggaccgcatcaacgacgatatgtttctatgtgagagtgagatgagggacattcaggagtccggaagtttgtttgaagtcaacattccggaattcaaagttctgaaacagtgtcgcaaggagctgcgcatgctgaagcaactctgggactatgtcaatatcgtggccaccagcatcgacgattggaaaacgacgccgtggcgcaaggtggacgttgagaacatggacattgagtgcaagaagttcgccaaggacatacggctgttggacaaggagatgcgcccgtgggacacgttcatcaacctggagtcgacggtcaagaacatgctgacctcgctccgagccgtcggggagctgcagaatccggccattcgggagcgtcactggaaccagctgatgaactccaccaagagtttggccgccctgcccaaggaagtgaccgtaaagttcatcatggaccacgaaacgacgctggccgaattgttgggcctgaatctgcacgaatgcgaggaggaggtgaagaacatcgtcgacaaggccgtcaaggagatgtccatggagaagatcctgcgggatctgaacacaacgtggacggtaatggagttcgaccacgagttgcacccgcgtaccggctgtaacctcctgaaggcttcggaagaactcatagagacgcttgaagataatcaggtttgcctacagaatctaataacatccaagtacatcgcccatttcctcgaagaagtgtccacttggcaaaacaagcttatgatcgccgatcaagtgataaccgtatggtttgaggtgcaacgcacttggacccatcttgagagtatcttcatgagttcggaagacatacgcaaacagcttcccgtcgattcggatcgattcgataacattgacgccgagtttcgcgtcctcatggatgagatgtctgtgtcgtcgaacgtggtggcgtccaccaatcgttccggcctaatcgaacgcctggagcatttgcagaaggagcttacgctttgcgaaaaggcattggcagagtacttggaaacgaaacgcttggcttttcctcgcttctacttcgtgtcctcggcggacctgctggacgtattgagcaacggcatccagccggaaatggtcaccaagcacctgaccaagctcttcgactcgatcgcccgcctgaagttcaaccgcgacgagtccaacgagattaacacggcgtcgggaatgtacgccaaagatggtgagtacgtggagttcaacgatctaaggcactacgtcatggaggcggtgattgcctacgaggaaaagcagcgggaacagtggttattcgactaccctgcccaggtgtcgctctgcggatcgcagatctggtggtccacggaggtgaacatcgcctttagccggttggaggagggctatgataacgctattaaggactattacaagaaacagatatcgcagctcagtctgctcataacgcttctgctgggtgagcttagcaaaggcgatcgtcagaagataatgacgatatgcacaattgatgtgcactcaagagatgtggtcgccaagatgattcaggccaaattggattcgggctccgcgtttatgtggcaatcgcagttaaggcatcgcttcgacgatgtggagaaggactgttttgccaatatttgcgacgcagaattccagtattgtcacgaatacttgggcaatacgccacgcctggtcataacgccgctcacagatcgttgttacattacactgacccagtccctccacctggtaatggggggtgctccagccggtccagccggaaccggaaagaccgagaccaccaaggatttggggcgggccataggcatctcggtctacgtcttcaattgctccgagcagatggactaccaatcctgcggcaatatttacaagggcctggcccaaacgggtgcctggggctgcttcgacgaatttaaccgcatcactgtggaggtcctgtcggtggttgccgttcaagtgaagtccgtccaggatgccattcgcgacaaaaaggacaagttcaacttcatgggcgagatgatcagttgcgtgcccacggtgggcatattcatcactatgaatccgggctacgctggccgtacggagctaccggagaatctaaaagccctcttccgcccttgtgccatggtcgtgccggacttcgagcttatctgcgagattatgctggtggccgaaggattccaggacgcgcgagtcctggcccgcaagttcatcacgctttacacgctctgcaaggaactgctctctaagcaggatcactacgattggggcctcagagctattaaatctgtgcttgtggtggcgggatcccttaagagaggtgatcccggtcgtccggaggaggaggttctgatgcgtgccctccgagacttcaacataccgaaaatcatcacggacgacatgccggtgttcatggggcttatcagcgacctgtttcccgccctggatgtgccccgcaaacgtgatcaggattttgaacgcaccgtaaaacaagcggcctccgatctcctactacaaccagaagacaatttcatactgaaggtagtgcagctggaggagctgttggaggtacgtcactccgtgttcatcgttggcaatgcgggcactgggaagacccaggtgtggaagacgctgctgcgcacctaccagaacatcaagcggaagccgattttcaatgacttgaatccgaaagctgtgaccaatgatgaacttttcggcattatcaacccggcgacacgcgagtggaaggacggcctgttctcggtgctgatgcgggatcaggcaaacataacgggcgatcaaccaaagtggatcgtgctcgacggcgacatcgatccgatgtggattgaaagtctcaataccgtgatggacgacaacaaggtcctcacattggccagcaacgaacgcattgcgttgacgccttcgatgcgtttgctcttcgagatctccaacctgagaacagcaacgccggcaaccgtatccagggctggcatcctgtacattaacccgcaggacttgggttggaatccctatgtaaccagttgggttgaaacgcgaaaaattccagccgaaaagtccaatttggtcatgttattcgataagtacataccgccttcattggaaacgattcgcgtgcgtttcaagaagatcacgcctgtcgccgaaatggcacacattcaaatgctgtgccatctcctaaactgttttttaataccagcgaacacgccggccgactgtccaaaagaatggcacgaactgtattttgtttttgcctgtatttgggccttcggatcggccatgttccaggatcaagccattgactaccgcgtggagttcagcaaatggtgggtaaatgagttcaaaactgttaagttcccgccaggtggaacagttttcgattactttctggacagcgagacgaagactttcctgccctggaccgagaagatacccaaattcgagctggactcggacctgccgctgcaggctgtcatcgtgcacacctccgagtcgatacgcctgcgttttttcctagatctcctgatggataagaagcacccggtgatgctagtggggaatgccggctgcggcaaaaccgtactggtgaacgagaagcttcaatcgctttctgagaattacgctgtcacgacaataccattcaattactataccacgtccgaaatgttgcaaaagatcctcgaaaagccgctagagaagaaggcgggtcgcaactacggaccgcccggcaacaagctgctctgctacttcgtggacgacatcaatatgccggaggtggatgcctacggaacggtccagccgcacacgctaatgcggcagcacttggactacggccactggtacgaccggaacaagctcactctgaaggacatccacaactgccagtacgtggcttgcatgaaccccacctccggtagcttcacgatcaatccgcgcctgcagcgacacttctgcgtcctggctgtgagttttcctggtcccgagtccatcacggtcatgtactcgtccatcctggcacagcactttgccaatgcggaacagaagttcactccgatcgtcacgcggatgacgcccaacattgtggctgccacgatcgctctgcacaacaagtgcttgcaggtcttcctgcccacggcaatcaagtcgcactacatcttcaatctgcgcgacatcagcaatgtctttcagggattgctgttcagttcgacagagtgcttgacgggctccacagatcttatacgcttgtggcagcacgagacacagagggtgtactcggataagctaacggacgataaggacatcgatagctttaccaagatgcagcatgacattgtcaagaagtcattcgaggaaattgacgagtccgtcatattcgacaagccgaatatttactgtcatttcgctggaggaattggtgatcctaagtacatgcccatcaagggttggcctgagcttcacaaactccttcaggaagcaatgtcatcgtataatgatctagtcgctgccatgaacctggtgctattcgaggatgcgatgatgcacgtatgcaggatcaatcgcattttagaatcaccgcgtggcagcgccttattggttggtgttggtggcagcgggaaacaatctctagcgcgcttggcagcattcatatccagcttggaggtcgtgcagatacagctgaaaaagggactttatttaaaggccggactaaagaacgttggcattatgttcctaatgacggatgcgcagatccccagcgaggacttcctcgtcttgatcaacgatatgctagcgactggcgagattccggatttgtttcccgatgacgagattgagaatattatcgcaggggttcgaaatgaggttaaaggcgcgggacttgttgatacgcgagaaaattgctggaaattcttcatcgatcgtgtgcgcaagcagcttaagatagttttgtgcttttcaccagtgggctcgacactgcgtgttcggtcgagaaaattcccggccatcatcaatgccacatccatcaattggttccacgaatggcctcaggaggcacttatatcggtggcgatgaactttctcgcccagaacaaggtgttgccggagaaccaccgcgattccgtggccaagtttatggcctacgtccatacatcggtcaacaccacgtccaaggtgtacctgcagaatgagaggcgctacaactatactacacccaagagttatctggagcagattaacctctacattaaactactcaaccacaagaacgaggacctgcagagcaagatcgagcgtctggagaacggacttgagaagctgcggtccactgccctccaggtggccgatctgaaagtgaagctcgccgtccaggagatcgagctaaaggagaagaacgaggcggccgacgccctcatcgagattgtgggcatcgagacggagaaggtgcaaacggagaaagccgtggccgacgaggaggaaatgaaggtcgctttgatagccgacgaagtcagcaagaagcagagggactgcgaggaggatctcctcaaagcagagccagctctaatggccgcacaggatgcgctgaacaccctgaataaggcgaatctcaccgagctcaagagctttggctcgccgccaggtgccgtcaccaatgtaaccgccgcagtgatggtgctgctctcccagggtggcaaggtgcccaaagatcgctcttggaaagcggccaaaatcgcaatggccaaggtggacacgttcctcgactcgttgatcaactacgacaaggagaacatccacccggagatcactaaggccatccagccctatctcaaggatccggaattcgaaccggagttcgtgcgctccaagtcgggtgcagcggctggtctgtgcgcctgggttataaatatcatcaagttctacgaggtatactgcgacgtggaacccaagcgtaaagccctggcggcggcaaatgcggaattggccgctgcccaggacaaactggctggcatcaagcggaaagtgatgagcctcgaggagcaactgggtaagctgaccgcggactttgagaaggccactgcagataagttgcggtgccaacaggaagcggatgccacccaagccaccattgccctggccaatcgcctggttggcggtctggccagtgagaacgtacgttgggccgaagcggtcaacaacttcgtcaagcagggcattacgttgcccggcgatattctactcatcaccgcctttatttcctatgtcggctgtttcacgaaaggattccgcatcgacctcttactcaagatgtggacaccctttttgaagagcattgatccgcccatacccacaaccgaaaatctcgatcccctttcgctgctgaccgacgacaccaccatcgccatttggaccaatgagggtttacccagcgatcgaatgtcaatagagaatgccaccattctgtccaactcggatcgatggccactgatgatcgatccccagttgcagggagtaaagtggattaagcagaagtatggcgaggacctcaaggtgattcgtctgggtcagcgcagttatctggacatcatcgagaagtccatcaatgcgggctgcaatgtgctaatcgagaatatcgacgagaacctggacccagtgctggactctctgctgggtcgaaatctgatcaagaagggaaaggctattaaaattggagacaaggagatcgaatacaactccaacttccgcctgatcctgcacaccaagctagctaatccgcactacaagccagagatgcaagcacaaaccacacttattaacttcaccgtaacacgcgatggactagaggatcaactgctggcggaagtggtgaaagcagagcgtcccgatctggaggagttgaaagccgatctcacaaagcaacaaaacgattttaagatcatgctgaagaaactggaggacgatctattgtcgcgcctttcgtcggcgggtgagaatattttaggtgacacggcgctggtggagaacctggagaccacgaagagcactgcctcggagatcgagcagaaggtggccgaggcgaagattacctccaaggagatcgacaaggcccgagaatattacagaccggcggcggccagagccagtttgctttacttcatcctaaacgaactaaacactatcaatccgatatatcagttttcactgaaggcttttagtgtagtgttccaaaaggccatagccaaggctgaacctggcgatactttggatttgcgtgtctccaatctgattgattgtataacgtattcggtgtttcagtacacttcgcgtggtcttttcgaatgcgacaagctcatcttcgcctcgcaaatgacatttcagattcttcttatgaacgaggaggttacatcggcggaactggacttcttgctccgcttcccgatcaagccacatgtgacaagtcctgttgactttctgaccaatcaatcgtggggcggaatatgcagtctagcgtccaaagatgaattcaggaacttggaccgcgacatcgagacctcctcgaagcgttggaagaagctggtcgaatcggagctgccggaaaaggagaaattcccgcaggagtggaagaacaaaacggctctacaaagactttgcatgatcagggccttaaggccagatcgcatgacatacgctttagccgacttcattgaggagaaacttggatcaaaatatgtagaaagccgcgccatggagttcgcgaaatcgtacgaggaagcaagtccctccacccccatattcttcatcctctcgccaggtgtaaatccactcaaggacgtggaggcgctgggcaaacaaatgggcttcagcatggatctgggtaatttccataacgtgtctttgggacagggccaggaagccatagcggaggccgccatggacacggcggccaagcatggccactgggtggtgctgcagaacatccatctggttaggaaatggctgccggtgctggagaagaagctcgagtactacgccgaggactcacatccggactatcgcatgttcctgagtgcagagccagcctcgacgccttctgcccacatcataccgcagggcattttggaatcatcaattaagatcaccaacgagcctccaaccggaatgttggctaatctccacaaggctttggataacttcacccaggaaacactcgagatgtcaggcaaggaggcagagttcaaagccattctcttctccctctgctatttccatgctgtggtcgccgagcgtcggaagtttggtccccaggggtggaacaagatctatccattcaacgtgggtgatctcaacatcagtgtgtcggtgctgtataattacctggaggcgaatgccaaggtaccgtgggaggatctgcgctacctgttcggcgagattatgtacgggggtcatattacggacgactgggaccgaaggctgtgcatcacctacttggaggagtacatgcagccggatttggtggatggcgagctctttctggcgccctcatttccagctccgccaaatacggactaccagggataccatacgtacgtggacgaaatgatgccggcggagtcaccgtacttgtacggactacatcccaatgcggagatagggttcctaaccacccgtgcggagaacatctttcgcacggtgttcgagatgcagccacgggatgctggcgccggaggaggggcaacggtgacccgcgaggacaaggtcaaacagatcgtcgatgaaattatcgagaagctgcccgaggagttcaacatggtcgagattatgaacaaggtggaggagcgcacgccgtatgtgatagtggcctttcaggagtgcgagcggatgaacttcctcaccagcgagatgaagcgcagcctgaaggagttggacttgggcttaaagggtgaattgaccattacatcggacatggaggtgctggagaattcactgtttttggatcaagtgccgcccatttggacgcaacgtgcgtatccttcgctcttgggtctcaacaactggttcatcgatctgtgcctgcgtctgcgcgaactggagacatggtccactgattttgtactaccctcttgcgtctggctggctgggttctttaatccccaatccctgctcacggcgatcatgcagagcaccgcccgtagaaacgacctgccgctggacaagatgtgcctccagtgtgacgtgaccaaaaaacaaaaggaggaatttacgacggcaccgcgcgacggctgctgcgtgcatgggatcttcatggagggcgccaggtgggacatacagcagggtatcatcatggagtcgcgcctcaaggagctctacccatccatgccggtgatcaacattcgggcaatcacccaagataagcaagatctgaggaacatgtacgagtgcccggtctacaagacccgcacccgaggccccaccacctatgtgtccaacttgaatctgaagaccaaagacaagccaggcaaatggatcctggccggcgtagcgctgctcttgcaaacctaa

SEQ ID NO: 7095 - protein, 4472 aa, DROSOPHILA
MEPSTSAEAAAAAAAGGPDPRLELMGSFVIKSLKLKPEKWTRVVTVEEHKGIIKEFLDRNTPVVLIIILTPAAQLVPSTTFPLSQLKSKGVYFIKRYALPIPREDCGNFIIYGDLATRTIDQLSALVEEVLVPLLSNEDNYRNWPIMVAQDVQKHVHSLKSTVHQVKGQVSGETILAMPVGVEKIVKAAKELVETEQCQFDLYLKSAIEGVVIKWATQIHEVIKESPSNAFANGQNPTPHTGEYEVAVVAPQFTFWNNRLKNLSFIYDQLRNERIRAMALILEYSMSAYHPCFQTLFKNVVTALAEAKDITLYLNPLKRPLQHLEEIDFAECKPLLIPFMNTVGILWGNSRYYCQSAKITVLLQEICNLIIHQAKRYLDPSSIFHSDIDEAMQRLTLSIQILKFFRELFDYYKERLATFFTEPEERPPILWTFHPNSVFKRFNAFLERLTTIQWFFFTVIEFLKLEKVEIGGLRGRQLSTRITDVYVEFNQYFTAFASKSYDVLDPDDHEFDEDFKGFQTRILELDMKLAAILCQAFDDCHNLESIFKLISIVGSVLDRPKIKEEFTQRYAEIVRMLDDEMTICESIYDKQMELKKVGDNLYPNYNCPPVAAFIRWCHQLETRITAPVKNFKALQHEITKTEKSQEIVERYEILMVKLGSCKTQFFDDWAGQLDGQIEENLKKSLIARDRRHNSLILNFSAALFSILREVHYMQQMKIEGIPQIAIDFAEKSDVFRSYTLNLEKTIDWYNSIQEGSSPVELRLIEPEIKMIDDLVEIGVNQLVWNSSDILSYLDKLRKPVAALQNRMDHTQGNLRQIRKIMGVWAKQPLFERRDCKKDTVLSIDERPDRTSKRYAEIQAASIEIHKLLQDNMLQFDMESKQDDAVWLSYVDFVDNIVYENILKTVGVSVGYLAENMDPENNYAPLFESRLELVEPNLVFVPSLDPEDPMGFNNMLIELMRDIMKMGSLIKRLKPNEKRNYVEMIKENQDIIDMRREILNGVDLVMEEASRFCRQFERYSYLWLDDREECMEYFLEYGRMLDPDEIELILINDPNQPPPQPCQPTIEAFREQIDNYESLFNEIEDIGPFQVFSSWFQVDVRPFRQALLNTVCKWGNMFKEHLVTTVTSSLMNLSHFIRKADEGLLQTVKEKDYEGLVSIMAYLMQVKERAAKTDEMFEPMQETIQLLKYYDMDIPEEVNVLLQELPEQWANTKKIASTVKQQVSPLQATEVVSIRNKIALFESHIQLFREVFKTYDFFRFDCYKPYLLMDRINDDMFLCESEMRDIQESGSLFEVNIPEFKVLKQCRKELRMLKQLWDYVNIVATSIDDWKTTPWRKVDVENMDIECKKFAKDIRLLDKEMRPWDTFINLESTVKNMLTSLRAVGELQNPAIRERHWNQLMNSTKSLAALPKEVTVKFIMDHETTLAELLGLNLHECEEEVKNIVDKAVKEMSMEKILRDLNTTWTVMEFDHELHPRTGCNLLKASEELIETLEDNQVCLQNLITSKYIAHFLEEVSTWQNKLMIADQVITVWFEVQRTWTHLESIFMSSEDIRKQLPVDSDRFDNIDAEFRVLMDEMSVSSNVVASTNRSGLIERLEHLQKELTLCEKALAEYLETKRLAFPRFYFVSSADLLDVLSNGIQPEMVTKHLTKLFDSIARLKFNRDESNEINTASGMYAKDGEYVEFNDLRHYVMEAVIAYEEKQREQWLFDYPAQVSLCGSQIWWSTEVNIAFSRLEEGYDNAIKDYYKKQISQLSLLITLLLGELSKGDRQKIMTICTIDVHSRDVVAKMIQAKLDSGSAFMWQSQLRHRFDDVEKDCFANICDAEFQYCHEYLGNTPRLVITPLTDRCYITLTQSLHLVMGGAPAGPAGTGKTETTKDLGRAIGISVYVFNCSEQMDYQSCGNIYKGLAQTGAWGCFDEFNRITVEVLSVVAVQVKSVQDAIRDKKDKFNFMGEMISCVPTVGIFITMNPGYAGRTELPENLKALFRPCAMVVPDFELICEIMLVAEGFQDARVLARKFITLYTLCKELLSKQDHYDWGLRAIKSVLVVAGSLKRGDPGRPEEEVLMRALRDFNIPKIITDDMPVFMGLISDLFPALDVPRKRDQDFERTVKQAASDLLLQPEDNFILKVVQLEELLEVRHSVFIVGNAGTGKTQVWKTLLRTYQNIKRKPIFNDLNPKAVTNDELFGIINPATREWKDGLFSVLMRDQANITGDQPKWIVLDGDIDPMWIESLNTVMDDNKVLTLASNERIALTPSMRLLFEISNLRTATPATVSRAGILYINPQDLGWNPYVTSWVETRKIPAEKSNLVMLFDKYIPPSLETIRVRFKKITPVAEMAHIQMLCHLLNCFLIPANTPADCPKEWHELYFVFACIWAFGSAMFQDQAIDYRVEFSKWWVNEFKTVKFPPGGTVFDYFLDSETKTFLPWTEKIPKFELDSDLPLQAVIVHTSESIRLRFFLDLLMDKKHPVMLVGNAGCGKTVLVNEKLQSLSENYAVTTIPFNYYTTSEMLQKILEKPLEKKAGRNYGPPGNKLLCYFVDDINMPEVDAYGTVQPHTLMRQHLDYGHWYDRNKLTLKDIHNCQYVACMNPTSGSFTINPRLQRHFCVLAVSFPGPESITVMYSSILAQHFANAEQKFTPIVTRMTPNIVAATIALHNKCLQVFLPTAIKSHYIFNLRDISNVFQGLLFSSTECLTGSTDLIRLWQHETQRVYSDKLTDDKDIDSFTKMQHDIVKKSFEEIDESVIFDKPNIYCHFAGGIGDPKYMPIKGWPELHKLLQEAMSSYNDLVAAMNLVLFEDAMMHVCRINRILESPRGSALLVGVGGSGKQSLARLAAFISSLEVVQIQLKKGLYLKAGLKNVGIMFLMTDAQIPSEDFLVLINDMLATGEIPDLFPDDEIENIIAGVRNEVKGAGLVDTRENCWKFFIDRVRKQLKIVLCFSPVGSTLRVRSRKFPAIINATSINWFHEWPQEALISVAMNFLAQNKVLPENHRDSVAKFMAYVHTSVNTTSKVYLQNERRYNYTTPKSYLEQINLYIKLLNHKNEDLQSKIERLENGLEKLRSTALQVADLKVKLAVQEIELKEKNEAADALIEIVGIETEKVQTEKAVADEEEMKVALIADEVSKKQRDCEEDLLKAEPALMAAQDALNTLNKANLTELKSFGSPPGAVTNVTAAVMVLLSQGGKVPKDRSWKAAKIAMAKVDTFLDSLINYDKENIHPEITKAIQPYLKDPEFEPEFVRSKSGAAAGLCAWVINIIKFYEVYCDVEPKRKALAAANAELAAAQDKLAGIKRKVMSLEEQLGKLTADFEKATADKLRCQQEADATQATIALANRLVGGLASENVRWAEAVNNFVKQGITLPGDILLITAFISYVGCFTKGFRIDLLLKMWTPFLKSIDPPIPTTENLDPLSLLTDDTTIAIWTNEGLPSDRMSIENATILSNSDRWPLMIDPQLQGVKWIKQKYGEDLKVIRLGQRSYLDIIEKSINAGCNVLIENIDENLDPVLDSLLGRNLIKKGKAIKIGDKEIEYNSNFRLILHTKLANPHYKPEMQAQTTLINFTVTRDGLEDQLLAEVVKAERPDLEELKADLTKQQNDFKIMLKKLEDDLLSRLSSAGENILGDTALVENLETTKSTASEIEQKVAEAKITSKEIDKAREYYRPAAARASLLYFILNELNTINPIYQFSLKAFSVVFQKAIAKAEPGDTLDLRVSNLIDCITYSVFQYTSRGLFECDKLIFASQMTFQILLMNEEVTSAELDFLLRFPIKPHVTSPVDFLTNQSWGGICSLASKDEFRNLDRDIETSSKRWKKLVESELPEKEKFPQEWKNKTALQRLCMIRALRPDRMTYALADFIEEKLGSKYVESRAMEFAKSYEEASPSTPIFFILSPGVNPLKDVEALGKQMGFSMDLGNFHNVSLGQGQEAIAEAAMDTAAKHGHWVVLQNIHLVRKWLPVLEKKLEYYAEDSHPDYRMFLSAEPASTPSAHIIPQGILESSIKITNEPPTGMLANLHKALDNFTQETLEMSGKEAEFKAILFSLCYFHAVVAERRKFGPQGWNKIYPFNVGDLNISVSVLYNYLEANAKVPWEDLRYLFGEIMYGGHITDDWDRRLCITYLEEYMQPDLVDGELFLAPSFPAPPNTDYQGYHTYVDEMMPAESPYLYGLHPNAEIGFLTTRAENIFRTVFEMQPRDAGAGGGATVTREDKVKQIVDEIIEKLPEEFNMVEIMNKVEERTPYVIVAFQECERMNFLTSEMKRSLKELDLGLKGELTITSDMEVLENSLFLDQVPPIWTQRAYPSLLGLNNWFIDLCLRLRELETWSTDFVLPSCVWLAGFFNPQSLLTAIMQSTARRNDLPLDKMCLQCDVTKKQKEEFTTAPRDGCCVHGIFMEGARWDIQQGIIMESRLKELYPSMPVINIRAITQDKQDLRNMYECPVYKTRTRGPTTYVSNLNLKTKDKPGKWILAGVALLLQT

SEQ ID NO: 7096 - DNA, 7444 bp, DROSOPHILA
tcggttccgaagtagcttcttataacttctaatttgttgggattttacaattttttttgttggatttttctggtagatttcgtgttgctaatgtggttgttgttggtatgagtttcatttgcaacattcgtctacggtttttgggttctgcttgcacgacttttgttgtgggtattcttgtttgttggtttataattttgctactacaatttcttgttaatattttatacataatatatatttatatatataatattttctttactatacaataacagcggaaaaagtgtgtgttgtggttgttgatttgcagtattttttagtttgtcgcattacattcattcacatgatttgtattgtttcgtacgttttataacaactttctcgtgttaatatgtataattgtttatgatttcttgttcttgtttatatatatatatatattctgtatatattatgtatatcaataccgtaattgtttgcattaccatctgttcttatcacaaaaaatcataattatatatataatttattattattaatttttaatatattattcttagaattgaacaataattaaaaataaacgtaggacttagttacattttgtatgtgtgtgtgtgtgtgttggttttgtgtgtgtgtgtgtgaatgattgcatgtagttggtttccgcagttgacgataaagtattgccaagcgtccgcttgccgtccgaaatccagaggcaccactgtactgggcttccacccccaccaccaaagaagggggcggggcgcgcccaaacagcggcaatcggacaagagcggtacgttgccgcaccggatgacatcgggcggtagcattgatgttgtggttgctgcttgtttgtttgttgttttggccctttcgctaaatttgttgatctgaattggttgcagccgcgtcaggctcaatgcaaatgtacaaagtttcttctgacaattgttggttgttgatttctttacaattttttctttttgtttaacgaactttacatatacactaaacattatttaataataataatggaaaaaacaaataacaaagagcacacaaaattgtggagcgcaaaataaaaagtaaaagagcaggatttcttgatatagcaaaaatcataattattacatctttatgaacttaattgcaaattgttttcctcgtgtttaagactgattttgaacggaaaataactaagctaaaccacgcgccagcgaatcgaggtaaactgaacaacaggtgcaaatcggcggccaccaatgggcagtgcgtggcggagatcctgcagtccggcaggactggttttggttgttctccctatgtacaaacggtccacgccgggcttgcaccgcacacgcactgttgtggtttttgcttgttggaagttgcatgttgcacgttgctcattggcttgacacaattttacctgctcctcttgaagctgctgctgatgttgatgtggctgctgttgaccgctgggcgccgtttgtctatctgttgttgttgtgtgtttgcattgattgatttatttcgtgtacaggtaaatggccacaatcaagccgtagagacccaacacttcggcgaagatgagaatcaggatcatgcccacgaacagtctaggctgctgtgctgtgccacggacaccggcgtctcccacgatgccgatcgcaaaaccagctgccagaccagagaagcccaccgccagaccggctcccaagtgaatgaagcccctggacattgacatagttagtaagttgaatcgtacgaggtagacaatcaataattacctgtatagtgagtactttgatggctcttccagcgcgccggcaataagcacagccaccaccagaccgtaaatggcaatgatacccgccatgaccacaggaatgatggatttcatgatcagttcaggccgcatcactgacatggcagcaataccggtaccagacttagcagtgccataagcagcgcccagggctgatgaagaaaatcaaatgcataacaattagttttgggcaagcttttctatcacaaacatattaatgtggcagttttctagtgatttgaccaggatttatcccatagctacacctaaatacgatatcaaggaatcgcccattatattggacttcaagcgcgattttctaattatgccagaacatttaacattatgatgtaactcttaaatttgtcagccattcgagcgctggccaaccgaatactcttcgatacccttgctccaactttggccgcgggcgtaacagtttgcagtcacatgatcgcttttaactgacgttgtttgtttcataaaaaaaaaccccaaagtccctccacccgcaaaagtgccactcattgcccagagttgagtttcagctggagagcaataaaactcgctccgctcacattccaaatcgcctctccccgcaaatcggcgggttttattactcgctctctctctctctcgaaaagtcgggcaaatattgataaggccgagctgaagtacatagtataaacggcaggtttccgaggggggccagctgaactcggatcggtatctatcgagcaggcaggtgggcagaataacccagtggcgagagattcagcttattttgtgtatcgatggggcattaattgaagtacaaaaccagtttcatgtgacggtcaactgaacgttcgtgtgttcgtgagagactaataaatcgaattaagccgcacgcacaccaccaactcagctgagtgttcagatatatgggtgtattcaaagctggcggagcgggagagcagatatccaccgagtcatgtgattcgatgttaattacttactttccgcctcgagccaagaattgctgatattcgatttggaagacagcagcgcacttcgggaacacataaagcgcaccgccgaatcgaatctaccaataatcaccataacttatgggcagttctgctcttgatcaatgtcggctggcgactatctacgtcactaaacaggaaaatgatgggaaatgcccatgataaaaaccagaatgaacttgaacaagcaattggttagagccacaatagatatctacgcgcctagcaccagcacacagaaatctgtgaggtcgaggttgtcgtcacaaaagcacgaacacacatcctcaaaaaagcagattcctctcaagcacaagtacagaaatattctggtgcgtttgtggcccgtattgcgtgaaatggcattaacattataaacatttatttatcattgaaagcctaacataggctgttgacccagtactttctccgattgcttacaacacgtggttttcctagactatatgcacaaacaaatgcatagctatcgtattatattgataagtaggaacaaattcttgggcataaggtttccttcaaaacacaacagaaaagtggaactcatcgtttagaatttcagaactatttgtttatatcgttgtattggctactgtgcagcaacagcgtatactgcgccattgatgttttttcggcattattggcgccgcattcaaatcgcagaaattattcgaaagtgccgaaatggcattgacttttttcgccttttaactgcctgtagagctgctgtgcattttaagttattgcacacacacacgaaccagtacaaggcatttatcaagaaacagacggcatcgcagacgcttctgtgggcgttgaaatttaaacaatatagcaaataatcggtcgaaagaagaagagaacaacaacaaatgccagcacatccgaagataattataaaacaggggagataccaagagacgggctggcaaaacactgtaccgaaaaaaacccagcaaaacaaaaacaaatcgaaggcgtcacagttgagtgagcagaaatcaaagggaattgcgagcgatgcaaatagtggcgagctttgggatgagacaggttgtagtcagaaataagtgcacttcggacatatgtgtagcgcagcaggtgtgtttgtttttctaatctctcctgcgagcgagaagaatttgaacgggaaacggaaaataagataagataagataagcgcccactgtattctaggctgtaccatgaaaacagctttgacgttcattgattaaaatgcaatacgaatgaaaggcatgagctcactcacacagcagcatccctgttgccgagtcaatgtgtgcgctcgtttaagtcggggattacaatggtggggcctggccagtgtggcatgtgccgatatgatgaaaattcatcacatgtggcagcaaattatgcgttagtataaccgcctttacataatttactagaccaactaccattctatgtatatctgctactattcccgctactgcgattgcgcaggcaaacgtgcgagtgtgtgtgtgcgtcctcgagtgtgttggaggagctgaatgtcattgtgtgaaggattttcgtggcatttgggtatttttagcccagtgcgaagcgaggatgtggaccagcattccaagtggcgacaagtgctgataaagcgcagctgaaagcaacgcccattgttcgcagtgcagtgactcagtcatcgcatctgtcatcgaaaaagacaaatgcatttgccagctgaaagagagtgagagctggagaaataagtaactggaactctcattcgtcggcactcatgtgatcgtcaagcggcgttgccagatcaccaggccagttagcgctgataaaaactggaaattgatttatgctgttgactctaattgcataagcagtctttaagtcagataaatttactcattgggtgatgataatggggcaggtaaacaccacaggaaaccttattgtttactatcaaattgaaatgtcgggtgtacggtgttaagcgcaaatcacaagacattacagggtaacatgacataagaattgcgtcacaatttgatggaaagcggtgtgggggtagcctaaattagctctcataagcagcagcgcgtgctcggttttttttttttttttttttttttttttcatataatgccttaagttcgtcttgcgacaatcgcttgggaacttgctatcttatcatggccaactgaattggtaaataagccacttatcagtaaggtaactgagaatgagtggtcttgataagcccctgaaaagatcgtcagctaaccatgtgatgtgggctaaaaagtcgattgatcatgcacccaacgatttgggcatgtgattaacgacgatcatttacattgggtcatacataagttgtctgctaattgggctggagaagatatcgataggaaaatacttcatacttctttcgcgccttaacaaaaatatttgttgtcttttatgtgatttttctttggcatgcaattcccgacaactattgttcgttgttcgaacaataaatattgaatcataagtagtcagttaattgggtttacaaagagcgaaaggcgagggttttatgttcttcaatagggtttctagtccattgtgtgcccaagctctaaccaacaagatgaaaagaaaaaactttaatatggcaacacttcccaacggtcttgtgactgttgtgagaaaaggaaagcgcgcttcataaacttcaccaaacacagtaactttgctcgctctcacacacacgcgctcaatggcatcgagtccgagagagtgcgcatcgctcataagagcgaagcgctcacatgagtgtgtatgagtaatgccgtttttagcatgctgaaaaagcgaaattttttttttcaacttggccactgcgaaattaaaattgctaattcttcacgttgtaaaaagggggaatactattcgtttcaaaatcgagtttgccaatccaaagagttttggatattctgcttgtcacgcgcatgcatatgagcaccttaatccctatgtgtgagtaagcccgtgtccgtacaccgttttcgtacacttgccgctatttcccgttactaccacctacagaagccagtacgcccacacgcttatccccgcatttcctcttcttcttctaccctttacgccacacaaatgttcgatttttcacagcacgggcatggcatccttattctagtcagatttaaacttacccgagaagatgatggcggaggcggctcccataactccgaagaaggggccatagatggggttgtcgctgctcacttcagaagacattttgctttgtttgttgtgtgttttttaggctacaaatgatgagaaatcgaaattttagttcgttttgctgctgctgtggtgattgcactatagtttttattcggcgttttgcacagatgaatctgaatgttatgcgcgctcgttatatgtatgcgttgcttcaagtcgaaacaaagtatttttattatatgtacaatatatgtgctatatacgtggggttttacgctgctctgcgaccaatgctgctgcgacgacgaacgaattgcgagtggccgctcacggaatattcttaaatatactttttaatcgagagttggcaagtcggagcgagtggccaacaacgaaaactgggagagagcagcaagagagagtgagattgagcgagaggccactcgtcggattattgcgcttgtgtggagtgtgacctgtgtgcatgtgcatgttgtcatgtgcttgtgtgcgcgcgagagtgagcgcatgacaggcacacatcacggatagtaagtccaattggcaatgacaacggtctggaaaattacacacgtacacacaatcacatgggagctgttaaaaccctggtttccaggcttttgcaaaatgaaaatgcaatttttgcactttctgaagatgcctgtgctccttgttcaattcccattgctcaacgcgcaaaactcacactcacaaggaatctcattgtcattggctaagtgtggcttgcctgtgtgtgtgcatgtcgtggcagaaaatattgtacaattttttttctgtttgaactctgttcaaattcaagttgtcgcagcagcatgttttatcgcaggcccgaaacttttccgcagggctagcctcacatgaccgcctatcttttgactgctttttcactcacgtgattagaaatctaattaaaagcaattcgctgctctgtggcctcttcgggttactgctggctgctgcttaaaagcgcggatcggatactgaacaccaacgagttattatgctttgcttttataaacgttagtcacgggggcggattttcggcgatagttgtgccagcgctgccacctgatggacgtcaaaatgcactaacaatgtttccactagagccaatacaattaaagcattgctttcacaccgattttaaaaggatgcacgaaattgaagaacataagcacatcaaaattaatattttattttatatttctgatagcttggtcaattcgttcatgaacttgtatggaaaacatctttttgtaccatagaa

SEQ ID NO: 7097 - DNA, 1281 bp, DROSOPHILA
ttcgtcgtcgcagcagcattggtcgcagagcagcgtaaaaccccacgtatatagcacatatattgtacatataataaaaatactttgtttcgacttgaagcaacgcatacatataacgagcgcgcataacattcagattcatctgtgcaaaacgccgaataaaaactatagtgcaatcaccacagcagcagcaaaacgaactaaaatttcgatttctcatcatttgtagcctaaaaaacacacaacaaacaaagcaaaatgtcttctgaagtgagcagcgacaaccccatctatggccccttcttcggagttatgggagccgcctccgccatcatcttctcggccctgggcgctgcttatggcactgctaagtctggtaccggtattgctgccatgtcagtgatgcggcctgaactgatcatgaaatccatcattcctgtggtcatggcgggtatcattgccatttacggtctggtggtggctgtgcttattgccggcgcgctggaagagccatcaaagtactcactatacaggggcttcattcacttgggagccggtctggcggtgggcttctctggtctggcagctggttttgcgatcggcatcgtgggagacgccggtgtccgtggcacagcacagcagcctagactgttcgtgggcatgatcctgattctcatcttcgccgaagtgttgggtctctacggcttgattgtggccatttacctgtacacgaaataaatcaatcaatgcaaacacacaacaacaacagatagacaaacggcgcccagcggtcaacagcagccacatcaacatcagcagcagcttcaagaggagcaggtaaaattgtgtcaagccaatgagcaacgtgcaacatgcaacttccaacaagcaaaaaccacaacagtgcgtgtgcggtgcaagcccggcgtggaccgtttgtacatagggagaacaaccaaaaccagtcctgccggactgcaggatctccgccacgcactgcccattggtggccgccgatttgcacctgttgttcagtttacctcgattcgctggcgcgtggtttagcttagttattttccgttcaaaatcagtcttaaacacgaggaaaacaatttgcaattaagttcataaagatgtaataattatgatttttgctatatcaagaaatcctgctcttttactttttattttgcgctccacaattttgtgtgctctttgttatttgttttttccattattattattaaataatgtttagtgtatatgtaaagttcgttaaac

SEQ ID NO: 7098 - protein, 159 aa, DROSOPHILA; identical to SEQ ID NO: 5832

SEQ ID NO: 7099 - DNA, 2824 bp, DROSOPHILA
cccagctcccttgctctctcctgctctttcgctgtttgtttcgagaagtttgtgtgccagggggatgtgtggataaaacgacgagcgcgcggccacggtttctgacgcactgacaatttctccgaaagttcagaacattgggggcttttctcagtggggtttccctgtcgtttggggatgaaagtgtagctttaagctatcgctaacgaaattcgttaggttattgcctttgctaactgggaaagcattgcaagtaacattttaaatggtaaaagtttctgcaggatattcgttctattcaagactacttaataaaaaaagctcacattaagcttacattcggttatttagagtttttattaaaagccaccaatagatcctgccatggcttatgcttccaaaagctgtgtacttaaccggcgtaaaagcttttcggtttgcatccttaggctgagctgaggagcttctcacctcaattgtcccctagatgttagtcccaaagttgtcctaatttcccaaactgtttaccgtatttgaggggcgtggactcatgaatcaatgtccattatgacctacattaccagcacataaagcgttgaccgcatcggggaacacgcggttaccccctgccacctgcaaataaacagcggaatccgcagttatctttgagtgcttcgtgataagaagctggcggagattaaaccgcagcaatcggttctgtggttctgcgtctcctgacgctgacaaggcatcttatcaactaccggctgatgatgggcctgataagtctgttgagtgtctgacacagcaaccatggcggtcgttttggggtcacccccgcaaacaagacgaatgatacgatacccagaaatgctgttttgtacttacatatgtgtattctacatgccatctggccgcgttagatgatttaattcagcttaattctgttctgtttaaccaacttttcctatttcgatgtggtaaaaacacatttttggttcattgtggttactacttatttattgaaaaaaaaaaggatggaggaaacgtaattacggggaacacgcttaacgaggcgtcagattgtgcttgccaccatcgatggggaagagggcgccggtggtgaaacttgccttggagctggccaaaaaggccactgcctcggccacttcggtgacgtcgcctacacggcccatgggatgcgaattgatggcccgctggagcattccgttgtactcctcgtcgacgatgccaatgttccgatggatgttggtcaccacgaaagccgggattcaccgagttcacgcgcacaccctgaggcgccatttcgagggccacaatcttggtgaactgatcgagggcggccttcgaaactccatagctcagtgctccggcgaagggacgaatgccggcacagctgctcacgttgaccacggctcccttggtcttcaggaggtgcgggagcaccgccttggtcaacagaatgacaccacgcagattggtattgagcaccgcgtcgaattcctcgatgtccagatcgatgaggccacccttgcccagaatgccggcattgttgacaagcacgtcgatgcgtccgaacttggccaacgtttgctggacaatcgcgtccgcatccttggtcacatcggccaccacgatttctgcctgcgtgcccttcaggctcttcttcgtggcctccagattggccacattgcgacccaccagcgccaaagtggcaccttcgcgagcaagaacttgggcgatggcggcaccaattccgctgctagctcccgtcacgatcaccaccttgttgctgagactcatattgaaacactggagtcggagtagcctggcggcggaatttatgggcgagctctcttctgcctcagataagattagtgctgcacttcacaaaaaattatctgggaaaagaaaaagcaagcaactcaactccgccttccaaaaagtggttgtaatttatggcataatttgcttgttagcaagctactatttcgttaattcattaaaaacatatgttcatatgtacatataagtggatgcttttgaccttgcaaaggtaaattatataataatttgagttacgatttccaatgatttacatataatcagtggcttctcttaaagctagttgtgctttattttaactttggaattcgctgaaaagctccaagcattttttcgcagtgcggacgtgacgtgaatcgctcgttgctctctccggaaaaacaacctgtagaggttcaccttgggtctccgagggtctttatcgatgctctagcatcgcattagcagccgcgatgcctcgactcgggtttttaaaagtcagagccgaaagtttttaattaaaactttccgtgggtcttgtctgatttcaagcattagcgaaatcaaggcatatctcctagaagacgggcctccgaaaacgccaccgctgccgccgaacttcgagttgagcgcctccgttgtcagataattagcatttccatttggcttgagtgcgcactcgtatatcaacgcctcctcgcgtagataagacgccaggggttccagctggaggacattgcgagcgattatggtacagtggaggcccagtacctccaatcgccatttggccaagatgaatgggagtgaatgaacagaatgtcaagataggagcgacccgttgctcacttcatttatatccacttaaagacgtgtcgacgtgtcgacgtgccgacccagggccgcgttttgttgacgaggtcacactgtacttgtgtacgattcggcccaaaaagttctgtgcttttgatggtgtatttgg

SEQ ID NO: 7100 - DNA, 824 bp, DROSOPHILA
atgagtctcagcaacaaggtggtgatcgtgacgggagctagcagcggaattggtgccgccatcgcccaagttcttgctcgcgaaggtgccactttggcgctggtgggtcgcaatgtggccaatctggaggccacgaagaagagcctgaagggcacgcaggcagaaatcgtggtggccgatgtgaccaaggatgcggacgcgattgtccagcaaacgttggccaagttcggacgcatcgacgtgcttgtcaacaatgccggcattctgggcaagggtggcctcatcgatctggacatcgaggaattcgacgcggtgctcaataccaatctgcgtggtgtcattctgttgaccaaggcggtgctcccgcacctcctgaagaccaagggagccgtggtcaacgtgagcagctgtgccggcattcgtcccttcgccggagcactgagctatggagtttcgaaggccgccctcgatcagttcaccaagattgtggccctcgaaatggcgcctcagggtgtgcgcgtgaactcggtgaatcccggctttcgtggtgaccaacatccatcggaacattggcatcgtcgacgaggagtacaacggaatgctccagcgggccatcaattcgcatcccatgggccgtgtaggcgacgtcaccgaagtggccgaggcagtggcctttttggccagctccaaggcaagtttcaccaccggcgccctcttccccatcgatggtggcaagcacaatctgacgcctcgttaagcgtgttccccgtaattacgtttcctccatccttttttttttcaataaataagtagtaaccacaatg

SEQ ID NO: 7101 - protein, 270 aa, DROSOPHILA
MSLSNKVVIVTGASSGIGAAIAQVLAREGATLALVGRNVANLEATKKSLKGTQAEIVVADVTKDADAIVQQTLAKFGRIDVLVNNAGILGKGGLIDLDIEEFDAVLNTNLRGVILLTKAVLPHLLKTKGAVVNVSSCAGIRPFAGALSYGVSKAALDQFTKIVALEMAPQGVRVNSVNPGFRGDQHPSEHWHRRRGVQRNAPAGHQFASHGPCRRRHRSGRGSGLFGQLQGKFHHRRPLPHRWWQAQSDASLSVFPVITFPPSFFFSINK

SEQ ID NO: 7102 - DNA, 3213 bp, DROSOPHILA
ggaaaaaccgaacgctgtggctggcatagccgtgttgctttacgaaattcttgagatcgtggacaagcatcatggtccgaagcctctgcagtacatggaccagatctgcgatttcctgtaagcaaatccacaaaatcgcatgaaagggtactaaacaaatgtgtttgtatcatttcagctatcacattaagtatatacatgtgggtaatatcattaagaacgaatcggaagccatcattaagcggctacggcccctgctgcaaatgcgcctgaggttcataacccaccttaacttggaggatattcacactgaaaagatgtaagggccatttaattcaaactctacttcggtttaaacataacttttccaatttcagcaacgacaataccagcaataatgcaataaccagccaaacgcagtctccaatgcaaacacagcatcagcagcagccgcagcaaccacatcagcaacaacagcagcaacaacaacagcaacagcagcagcagcagcagcaacagcagcaacaacagatgcagcagcaacaaatcaacgcagtacaaacaaccagcgttcccttgggcagcggtggcaacctacagcagcagcagcaaatcaaccagcagcaacaaatgtatatgcagcacatgcagcagcatcagcacatgcaaaacatgcgccacaattagactttgtgggactcccaagtcagttcaagctgacataacgacataagcctaatttatagtagtattatcttatattttatcgcttattgcattattcattttccattgaatgtgtaaacagttctcagatatgtttaagttagatactaagggaactttttgtaagtcacagctgtcggcccaagtcctccctccagctttacaatcaaaagcttgacttaataagcccagcttaaagctcttcgtagataacctgtagttggtgatcttgtccacctcgagcgccgttctcagttgtgatcgcagagcactgcgatgtatgcgcttccgggaatccagattctgttgctgattgcttcagtcagcgtggtgaccgagtactgcgacaatggaacgggcgagtgcaaggagctgacgccctccgactgtccagtgatattctacaaccagcacctgatcggagccgaagtcaagtactgcgacgagttcaacgacattgtctgctgtcccataccgctggatcaccagaatctgaagccagccgaacagacgaggccttttgagaagcgtgaggagtgactgcaacaattcccttcgattgatggaatttgaatattcgttttttttttttagagtgcaagcaatacaacgaggtcagatccgcctgccagtccacgcccttcatcgtgggcggcacaaaggcatccggtaaagagtttcccttcatggccctaatcggcactcatcggcccaacaagtccaagtcggacatcaattgggattgtggtggatccgtggtgcatcccaaattcgtactgactgcggcgcattgcctggagacggatgagtaagtattctctgggattctcttgagtgatactccttccatatgtgtacttttaattgtcagatcgaaggccgagcgactggacccaaactttgattcgcccaaatttgtagttcgcctgggggagctggactacaacagcaccaccgatgatgctctggttcaggactttcgggtggtcaactatgtggtgcaccctggatatgatactgaagacgaagagcagggctttaaaaacgatattgccctggtggaactggatcggaaggctgagttcaacgaccatgtggcagcggtatgccttccgccagacagcggcaacgatgttcagcaggtcacagccgccggctggggatttaccgcggacggtgtgaagtcctcgcacctgctgaaggtcaacctccagcgattcagtgacgaggtgtgccagaagcgcctgcgtttcagcatcgatacacgcacccagttctgtgccggctcaatgtccagccaagcggacacctgcaacggtgactccggcggacctatattcgtccagcatccgctctatccgtgcctgaagcaggtcatagggattgtctcatatggattagtttgtggctcccaaggactcccgagtgtctataccaaagtccacctctacaccgactggatcgagagcatcgtgtggggcaattgacagttaggagtcgtaatataacaaaaaaaggatagtttaaaaaataaaaatatttcaaataaatcaaattaccttgaaatgtttatgatttcaaagcatatcagcgacgttggggccctgaaacctcggcgttgccagatccggagagaaattatcgcagagcagagtaaacaaaatgtatgattttaaatttgaagcagtcttgtttttctttaattttttttaggtaaattttcgaaattgctcttctaagccaaagcctatattccaattgcaaggctattttataattttgcctaatgaccaataatgtagcataatttatttataataaaatccaaaacaagatcatatcaacaataaaaataccagattcaatcattatttaatttaatatgatccaaaatgtaaaaagtcaaaatcaacaaaaaaaaataccattcaggtgagagcgctgagctcggctcacctgcaatccgctcccatccgatccaatcgtcagtttcgatcgagacgcactggagtgcggacgtgtggtgcgcttgagtctgcgatttcctgctgcgctttgcggtgtcgtcgcatttttcgtgccttccggagcgtggatcccctgcatttttgtggtcgttgtgcaagtgcgcggcagtcacgtacagccgttgcaacaaaatacgagaaatcaaaaacacatcgtaacagacgaacaaatccgccagaagtaagcaaatcaatgtggcaaatagtgtaccttcgatgcgcgctcgctgattgattaacacatcacctccctcccacacacgaaggcaaaagccgtgtgtaaagtactcagtactcgtacttacctgtgggtgcaatccgctgcaattggaattgcaactgcacggtgtgcatccccagcggagaacgctgaagaaaccaaataaaaaaaaaataaaagagtttaaagtgccgcggctgcattgttttgactttgatcgtgtgtcgtgctctccaccac

SEQ ID NO: 7103 - DNA, 1085 bp, DROSOPHILA
cgatgtatgcgcttccgggaatccagattctgttgctgattgcttcagtcagcgtggtgaccgagtactgcgacaatggaacgggcgagtgcaaggagctgacgccctccgactgtccagtgatattctacaaccagcacctgatcggagccgaagtcaagtactgcgacgagttcaacgacattgtctgctgtcccataccgctggatcaccagaatctgaagccagccgaacagacgaggccttttgagaagcagtgcaagcaatacaacgaggtcagatccgcctgccagtccacgcccttcatcgtgggcggcacaaaggcatccggtaaagagtttcccttcatggccctaatcggcactcatcggcccaacaagtccaagtcggacatcaattgggattgtggtggatccgtggtgcatcccaaattcgtactgactgcggcgcattgcctggagacggatgaatcgaaggccgagcgactggacccaaactttgattcgcccaaatttgtagttcgcctgggggagctggactacaacagcaccaccgatgatgctctggttcaggactttcgggtggtcaactatgtggtgcaccctggatatgatactgaagacgaagagcagggctttaaaaacgatattgccctggtggaactggatcggaaggctgagttcaacgaccatgtggcagcggtatgccttccgccagacagcggcaacgatgttcagcaggtcacagccgccggctggggatttaccgcggacggtgtgaagtcctcgcacctgctgaaggtcaacctccagcgattcagtgacgaggtgtgccagaagcgcctgcgtttcagcatcgatacacgcacccagttctgtgccggctcaatgtccagccaagcggacacctgcaacggtgactccggcggacctatattcgtccagcatccgctctatccgtgcctgaagcaggtcatagggattgtctcatatggattagtttgtggctcccaaggactcccgagtgtctataccaaagtccacctctacaccgactggatcgagagcatcgtgtggggcaattga

SEQ ID NO: 7104 - protein, 360 aa, DROSOPHILA
MYALPGIQILLLIASVSVVTEYCDNGTGECKELTPSDCPVIFYNQHLIGAEVKYCDEFNDIVCCPIPLDHQNLKPAEQTRPFEKQCKQYNEVRSACQSTPFIVGGTKASGKEFPFMALIGTHRPNKSKSDINWDCGGSVVHPKFVLTAAHCLETDESKAERLDPNFDSPKFVVRLGELDYNSTTDDALVQDFRVVNYVVHPGYDTEDEEQGFKNDIALVELDRKAEFNDHVAAVCLPPDSGNDVQQVTAAGWGFTADGVKSSHLLKVNLQRFSDEVCQKRLRFSIDTRTQFCAGSMSSQADTCNGDSGGPIFVQHPLYPCLKQVIGIVSYGLVCGSQGLPSVYTKVHLYTDWIESIVWGN

SEQ ID NO: 7105 - DNA, 5156 bp, DROSOPHILA
agagcgggagcgcgtcgtgcgaatgaaaccaggtcaattccagttactccttttggtggatactcaggaaaccagtggcaaaaacaagagagttctggaccagacgaggagctacttggagtccttgggagcccgtcatgaagtgcgtcgcctgacaatcggcgatttcctttgggtggcccaggatcaagagggcaatgaactggttttaccctacattgtggagcgcaagaggatggacgacctggcatcgagtattcgggatggtcgcttccacgaacagaagcacaggctgcagcactgcggcctgcagcacatcatctacctggtcgaggactatggcgataacgagcagctgggccttccactggactccttgcagcaggctctgactaatgccaaagttcaaactggtgtccgagtggtgcgcacggcgaatcattaccgatccatgagctatttggccggaatgagtcgcacccttggccagatattcgccggcaagaagttgcacagcgtggatcgcggcgccatcgaccaatccacctgcctgctcacgcattccgacctggggttgctcaagtttcgggccctatatgaggattccgcaaagaatgcccagctcacagtgcgcgaggttttcgtgcaacagttgctacagctgcattccctttccctcgaacgcgccatggctattgtggaaagataccccactccacgctggctgctggacgcatacgcggagtgtgcagaccaaaagcaggccaggctactcctcgccagcatcccgtgtggacccctggaacgtccactgggcgacaagatcagccagtgcctacacgaattctacagcacgcactttcgttaggattagcaattgattttatgggacatatctaaggttatatacacgagtttatacataagtgagagagagaatacgttggacattgaatagtgtgatctagtctaagccaaaaaatgtacaagtcagccgcccttagatgttgcggaagtgccggatggccaggtccaccggcaggtcgaagtcaaatcgagaaagagcatcgatggagcgcagtgagtcgcggaatccggtgcgggccacgtagctgtctgctgagtagtacgtgtccaccagttcatggcagctgaggatcaggttcagccactccaccagcaaatgggaactgtttgaaggaagagaaaagcatttcgaatgaaagaagtgtgataaaagccaaggtaaaggtctatccccgcgtccctgttagccttatgcttaaattaattcggcagactgcaaagtcaaaagctacctgcacctagctaaatatattaatatttacatatttatatttacatgttaaagcaaaaaatcgattaagcaattcattgataaaaaagtttaagacagtagagaattgacattaccgcagaattgctgataattgcagtaagaatattttgattttggacacttgtaattataaaaagtttgtgtgtctcttgctctttaagattcctctttgccaggaaaataactataaaatgaagatttgaagatgtaaaaggctagtgcttcaaactatgcacctgtaaataatatggtattgcaaagttatgcggcttgtaaattcatcttaactaacattccttcgatttcccagcgtttagcccatgtaaataactcacttgagtccggcgcagacgaaggctttaaagtgcgcgttgttactccgtttgtatggacgatgcattgccagaatcatgcccacggcgctgagcaaactttgcttggcggtcacagcctgcgcgtccacgatgtccagctggaagctctgcgacaactttctggcaggcgtgttgttgtactcctcgccgtgtttcaacctataataggctagtactagttcccaggcgtgcatggccctgcccaagccgaggaactgcgagtctcctccgacggcgggcggcactaccggaggcccagggtgcaggcacctcatgaagggaaccatcaaactggaggcagccgattccgctggtatgcgaagtccgtgttgtataagctgctgcaatgtgcgggcaaagttcttccgcacaaccgtagtcaattccctgccaatagtggcaatggaatcaccgcgtgcatgcgtcgtccgccggctcttgctctccttttcccactcgaagttggagtagctaatgtcttcgtcggagtcggaggatatggcgcccccggacgcatatggagccagttcgtgaccagttggcactgctcgccggcaacgaggcggcagggtcagtgctccgttttgtgagttaataaccggattgccagtgtcggagaattcggttgactccgcctgttgttgctgtttgcgcaaagctctcttgatgttggccaacttctcgcggtcgcagctcaaagtggcggccagtgcagctacttcctggatgtccacctcaagctgggcacgtagatccctaaattgggtgaatgatcaagtcaggttggtgttctttactttggtgttggtgcttacgatttccaaacttaaaatcttaagtttatctttaaataacattaatacttttggaaatggaaacatttaggtgattatttgtggcgggttaataagtgggggtatctccttggctaaaatccatttcgatctaagcctaaaagattctcttttacgcaaagctattagtaaaggtctcaaagtcttatctaaaatgtatatcgaatgctagtaattgggccgtgagaaaatggatcttacccccagtggttgcccttgtgcgtcttcttcagcgaattttgctggaattcgtcgtgagttcgtggtttcaccagatgcgtgctggcgaacatttgcatgaggaccgaagccttgtccagcaagccatgtgccttgctgtgcaagctctcgccggaagaatgggcacccaatcccgaggatggcggggtagtagctgtcgtagctggagcgtttgtggcaacgtaacttgcctgtgaactccgtgctgtctgctttgcagcgtagctgttgtacgcaccggatagaagcttcagtcgatccccaacggatccctcaatggcatcgcactgaaggaaggcaatgaagcgctccaagtcagttatctgcgtcttcagttgggccaccagttgctccttcatcttcagagggcccacaaactcgccgatggcattgtcgacctggtggcgcagttgttccgtgctaagggccggcagttcgtgctgctctacctggagattgagcttggcgcgcagctcgtccaggataaacttttgcttctcgagcaatacgtgctgcggcaggatgccaggttcgccagcctcgtaggctatttgttccagctcagtcagctgggacttcagttgttggatgagctggctatcaggaccatggtccttttcaccatcgcttgcgggcttatctggatgggattccttggactggactgcgtctggaattccttggaaggcgaagtcctcgaggtcgcgtaaaagttgatcccgctcctccgctggcgcctccacgatttggcggactctaagctggacgtgagcaaagtgggaggtcaaagccagcagagaacttgtcagaagctcctgctcctcctctatgcttcgcagacgggccagttcgctgccagtgcttccacgtcgcgcttctgacttttccagtcctggttctagttcgcaatccacgccagaactggcgctattcgcgtcatcgtagttggctcccaacggcgaccaccgttcgcttagcagctcctgctgctcttgttcgacctccacttcttcctcctcatcttcagcacgaacaggtccagctggcagctggccttcgatcgtcgagcaagagtccttggtttcctgggcctctgccattttcatttccatatggaaatgctgcaggggattgccttacccagcgtcgtttgtttccactgtttttgtgtttcctacgctcgagaaaaatcaatcgatggcttgttccgctttctgtgccagctggcccagctcccttgctctctcctgctctttcgctgtttgtttcgagaagtttgtgtgccagggggatgtgtggataaaacgacgagcgcgcggccacggtttctgacgcactgacaatttctccgaaagttcagaacattgggggcttttctcagtggggtttccctgtcgtttggggatgaaagtgtagctttaagctatcgctaacgaaattcgttaggttattgcctttgctaactgggaaagcattgcaagtaacattttaaatggtaaaagtttctgcaggatattcgttctattcaagactacttaataaaaaaagctcacattaagcttacattcggttatttagagtttttattaaaagccaccaatagatcctgccatggcttatgcttccaaaagctgtgtacttaaccggcgtaaaagcttttcggtttgcatccttaggctgagctgaggagcttctcacctcaattgtcccctagatgttagtcccaaagttgtcctaatttcccaaactgtttaccgtatttgaggggcgtggactcatgaatcaatgtccattatgacctacattaccagcacataaagcgttgaccgcatcggggaacacgcggttaccccctgccacctgcaaataaacagcggaatccgcagttatctttgagtgcttcgtgataagaagctggcggagattaaaccgcagcaatcggttctgtggttctgcgtctcctgacgctgacaaggcatcttatcaactaccggctgatgatgggcctgataagtctgttgagtgtctgacacagcaaccatggcggtcgttttggggtcacccccgcaaacaagacgaatgatacgatacccagaaatgctgttttgtacttacatatgtgtattctacatgccatctggccgcgttagatgatttaattcagcttaattctgttctgtttaaccaacttttcctatttcgatgtggtaaaaacacatttttggttcattgtggttactacttatttattgaaaaaaaaaaggatggaggaaacgtaattacggggaacacgcttaacgaggcgtcagattgtgcttgccaccatcg
